United States Patent Application Publication US 2008/0114160 A1 - sequence listing, part 37

SEQ ID NO: 9430 - DNA, 34425 bp, Oryza sativa
gtcagtgagtgttttgctaaaaataaaaaaaattatagttcctcctctttctcgctttcctcctcatcgtagatgtcatcggcggcggcggcggttgcagggccggcgaggcagaggtgtgcccaaaagatgaccctgaaatcaaatctcccggagtttttgaccgagtcgttccaccggagcaagccgctcttgacagacctcatggagctgggcgtgcttgccgtgccattctcgacggacgggaacacgccggacctgcggttcgacgagaccgatgacgatgacgccgacgacgcggcagctttcttcttcgtataatcaatcaaaaattcaaacgttaattcattattcatgtatctgcctttcaaatcgattgctgcttcttgcagattgctagatggccagaagaagcaagctaatgtgtcacctgattcccctgtgtgagttggacttttctgaacttatttgaagatatagctgaagtttttgcgtatgcagcgcggaactgaactgctcttgcaggtatctctcgctccggccggacagtcgcgtccgtggcagcgacgtcgggtacccaccgtggcaagctttcgtggcgcagctgccaccggtaaaggggatgtggtctgaccttcttaacgggatggatgggagggtatccccgtgggcgagcaataggccatggcgcgcgggctcctagcgcgcctcctcccgttgcactccagagctttgatttcatggtcatctccgggtgcaccttcgcctcgctggccctgccacaacggccaccgccgctgacaccgacgacgacgacgacgaaagggagagagaggaagagagaagaggtaaaagagatgaggcggtgacgtaggtccctctgcattttttttatttttaactaaacacttactgatatgtaggtctcatgttttttttttctgttttacgtgtcacgccaatgccatatcagccgaaaacgtcgtccaaaccgttttgggaccttatttatattagttttgagagttgtgagacgcgtcgtattattactattcagggagacttagcgataaattaagggacctgaagtgaacttaatgcacagccaacaggtcgtaccgtaccctcaatcctattctagcccaactaagcggcccacacttaagccattatattgtaccagcccaactagaatgatccgcatgtaaaccataataatgttttggcccaaccagccgtgatccgcgccacaaaaaacgaacccttccggcacatactgccattatacataggttaatgctcaattatatatagctccagtttaaattgtgtaaaaactaacatggaaactccatcagctattgaaatcggttgttttgcctcctcttgagtggttggttttatcctacatgcactactggagaaaagggtcttcactcacggttcgtaaccccctgttgtcccagttgtgcaaccgggaccccgaatcaggtactaaagatgggcatatagtcccggttgaaataatcgagactaaagatgaatcttcgtaatacgaaccaacactaaagatcagagtgccacgtggctgacgctctcatctttagtatttttttttgttttatttttaattattttttttgctacttatattaatttcaaaccaaactcaacgacaaaatcatccccattcacaaaacatcacaaaatcatcgacaaattcatagatcgaatgaacatactcaaattgacataacaaattcattagacccacggtatgaacaaattcacataaaaaaacaaatacacattaatcaagtcattgtcgcgccggccgccgcccggtgctgctcctcgtccggcgtcgtgttagccgccgccgccgcccgacgcgcgcaggccgcccttgcccggtgctgcgctggccgccgccaccgcccaacgctgctcctctctgttgcgaaaaaaaatggagagatgagatatagagaggagcctaaggataagatcgatagaggataagatagagatgagagagagagagagaggaggaggaaagggagttacagatgaggaggagtttgtgaggatgaggtgaggataagtgcgagggattatatataatgcatcgatctttagttccggttggtaacaccaaccgggaataaagatagtgggacgcctgacatattttgaaccgagactaaaaatggtcttttaacttacattgcgattttaaatcgggactaatatggattttgcatgacccaacaaagatcagttgccagtagtgatggtagctacatggtatgtttccggtattcatcatatatgactcttacatggaattataatcagtaaagaaatgtaaaaatatattgaggccgacgaggatggacgctgtagcagccataataatgggccacaacacattagcaataagaagagtaccatttacatggcaataacgtgtcatatcttcacgtatgacatgtatttttcccgaccagaatactcataggcataaagctataacaacagcaaatagttcagaataaataaataataaataaaaatctaggggaaggaggacgggatactttagtgaccactttcctttccttcgtttggctgaactcccacgcacaagctaagcagtagcgtccctcgtctccttgcccccatcgaccacaacaacaaacagggaaggaggagcacgtaagaaaaagaaagtagaagaggagaggaggagccgttgattgtgacttgctgggcaaccaacactactacagaaatgaatatttaggtcagcattatatatgtcggaaatggtataaacgttagctgtagtgccttgatacttggtacttacgtataacggtatttggtagttggtttggtacctcacaagtcacaacagggaagatgggagttcattgaggagagaaagggagtagaatagtgatgaggacatcaacaattcaacaccatcaatacatccatgtctccacaagtacaagtacaactatcggtgagttcattctttacttcatgtttatcttagttataccacagagatgcgcgcactcttgttttactcaggaacaatagagaggatccaaaaggagaggattcacgcgggctggattcggactgcaggacagagccaacttcattctgacgaccgctacgacttcatgcgaactccgatttaggcgtgcaactacttcatgaaaatcttatcaagtctactttcaaatggatctagcctcgtgtccatatctatgttggagcggccgcaatcatcattttactaccaagttcttatttgggtctaatgggccatgtatcgagtttggtccattagggacgtgtactagggttagaacatgactccaacacccctgtggtcgttctctcatcttcttatacctttagccgccacaaagaacaattgggttttgtttacatcaaagtttagctttgctactttgccgtgtaatcccgtgattggttagatcgccggtttgttcgctgcggaagctcacctgtgatacttttgttgattcaatcctacatctttaattcgcaaattgagttgcttgttcatcttattcttgctagttatcgattgcttgcaagaataaataccctcgtggttgggctgaccatgcatccgtcgagattcataaccgcctctaagattggtgtacgattgctaaagcgcaaatagttttactcagattactaacgacgtgcacatcaaatggaggagcaagcaatttgatctgctgggaatagatcgatggaaaaaaattgtttgctcgttatgttatcccattgccaaaacggaatctcttgccgtggttcatttgataattttataagtaaattacagctttcatccattttataagtaaattacagctttaatcctttgtatatgcatgcaactacatgtgtggttgaccgtgtgcattccccttataatgcagacaccgggcgctgcccattacaaatcattgataaacatgtgtggttgactggtaggtccaaacatatcaacaaaacaattttgcaattcattgataaaatcatttattgctagttttctgaaacaactagctaaagttgccgtaaatcaatagttttgataaaacagttatagctttctgaaatttactcatacgaagttacaaatagactatacggtttactgttttatttatttattttatcatgaggaaacgtataatgcttttattgtacccttctgctgtacatctttcgcagtttcgctggccagtccaactcgaggcacaaataacattctattaaaaaaaatcctttgcatgataaattttgacacgtatattatattagctcccagggtttgaccaatttggccgagttacctcgagcaagccttgtaaaaatggcaaatgtcttttccaaaacctatacagtcaatccctaatcatcaccatccgtccagctgaagtttagcctgtctagttgtatattctcaagaaccatcatctcaaaaggaaataaaaaaggtccaaattaagtagcttgttctgtggtctggtcagtttgttatattcgctgctgtatcattttcactacagaagaactcttcagccttgtccaagaaagaagctgggatttttctatgcaacatgaagttagatgaagtttctccagctctttgcttcagaggtccatcatcaccaattcttgctcctcggccgtctctttggcccttatttctgctcaatctgatgacccctgaaactccttttcctaaaactggccgtgcacttttgcggttcgaccttattgagatatcaccttgcgggtttcttgtatccaataagatctgtgtattatcactggaactgttggttccccaaccatccaaaagaatggaatctgaagcagccagtcctggtgttttgcatgatttgatcaaagaacgaagcatctctgtgcttatttcttgctgaactacacttctattctggtcacaaccataacagaccgcgataagagcagtagccaagataggcatcaactccgggtcactgaagaaaacgaaaggcaagtcgcacacctgtttttcatcttaatcagttttgcccataggtctctgaagttaggagagaaacatggttatataaaactttgtttaccttgtgaagtatggtgggactctttccccaccgaagaactgcttggttcccagcatggaacaaagagaagtaaccaagaagtagcagagattctagaagcagtaaaccaacctgaaaaaagaagcacaaactcttatggtaaatagaattatccacaactatccctgcatgttttgcacattgaacgtgatagctgatcattcaaccacatactaaagcattgctttgagcatcagtgtgcaagttgtcaatagaccacattataagaatcacatatataatggaaagtgtttgtccaataagaacgtgcaaatgctgaatacacattaagattcttgttcaaggacaggagcccatgcatttattcttgacaatctacacatcaactagattctaaggtacccactctattagtctaatgtcacggataacaaagaaattgtaaccaagtccatccaagtaatagcaaactgtttgagatgcatcttgctattgctatagtattgctatagtgatagaagaattgatttacattaaaatctgaaacttgaaattaaagtactatgatacttaaggcaacaatgtacctcgacaaaaaaaaaagatatttaaaagtatcacatatatcatgtcaagaatgtatgaaccattttttctgtaaggaacagtctgcactttacctgatcatttggcactctccatttattcatgcaatggctaagaaggaaactgatcaaatggaagaactccatctttagatccgatctagcctgaaattatgagaagagtgaaaacttatataggtgaaagaacagaaagaaactatcttcagaattcctatactggaaaaccatcaatttgcctgacagctatgcatgaaacctttatggaagactgattgtgtccattgataacatggagacatttgttgctatgctaaattcatctaacaacatcaagttatacatgaagaacagacaagcagacagcaacaacaataccaagccttcgatagttggatgccaccacttaccagcatgcattgaagaagggtgatatccaaacatgccatgttgttcagaactttcaaaacgccagtggctacctcttcaaaattcgatggaagaattgctgaagcctgaaaaatgaagtgccatttgcttcaaagagaagatccatgaaacaagtatatatatatttggtctgtgaaaagaattccagttttatccttatgtgattcttaaagtctgaaagtcaccaagtaacagatttatgtgcataatgtcatctgccatgcttgtttataaatgcatgtgagcatgtcattttgaaactgagaaccttatgcatatccaaatgcatgtgtggcttctatataattcacttgcaatatggtaaaatggtgtttcataatgtctatgaagtattggaggcaacataagcagcttttttcttaaataaaaacaacattttttccacacaaagcattggatgtaaatagagaagaaagacaaacctgttctgatgatgatctgttgttggcctggagcaacacagctgtcaaaagagaaggcagactaacaaggcctgtctctgccatagcagaaagtacaagcactacaggttgatttaggtttatttcattgtcttttccaggactatcatgcaaacatgtagtactccccttttttctttcaagggtgccatctgcagcatctccctggcagggaattacagagtgtacctctagtgtatcagatgactgcatttctggcatggaccctgagtctttgctagcttcataaactgacatgttgtcccctggaatgttgaatttatgatgatccaaggacttattttctttgatcaattcgctaggatcgcattcatcacatttcaatagatcagacttggtagatggcaatttgacatctccagattgatcagatatcatcaactggttgcccatacctatgtcttgtgaacaaagatattcatattcttgaactagattacccgctagagttctgcatttgcaggactcccaatcaatggtagagaaatttccaggtttagatgttaagacggccagaaggttgagaccaaatagtatggatgatggtaatggggatccttccacctggggcctgtcataaagggcaaaaagatctcgcaggcgatgaattatttgataagccacaatcagttctatcaaccccccttgcatttgaagctgttggtcattgagatatacgtggccaacaattacggtcactgtccaaaaaaatccatctaacacttcacctactgactccatgtattcagttgatgttttgcttgactgaatgttcgaacttccagagtttgatgctgcaacctttatgtaattctctagagataccgataacatgggaataatcggaggtaaaagattttgtacaagaaaataagttcgattggctggaagcgagagcaacactctcaacagtcgtagtaggtagacagtgacttgacaagctccaggccttgaagtgtgagaggcaggtaaagcagatgcaataaaatcaagcaagccaacttgtctagatgcatgtaattcaagatcctttccttctaaatactgtgccaaaataaaaagaaagtggtattagtaaacatctttattacaacacaatatggaacaaacaagaagtacctttgtcatgtcactaacaatcaaaccaatactcgcagcaccctcttttctagcttgacgaagtctttgcaagtcctgaagccatctacttaacttagcttttgcagtacctagagcagacctgtgcacaattcctgtattttcgcctatgagtggttcaacaaaatcatgcttaagagccattaacctctggcgtatctttttaatccttcgtttcatttgcgtggaattgaatgatttaacaccagactcagcagcgttggcactgcttattatttgtgaatcttctccactattagctgagctagaacgattttggttatctttacttggaaagcggcgctgaaaaggtgaaggctgatccctgaaatccattgaagctctctcacgtatctgctcaaggtaatacttacggcgctgctcactttcacgaagcttctctgctaatttttgggctaacagttcagcctcttcttgttgagcttttgctcttatctcttttctacgttgctgctctgcagccctcgcttctcgtgcagcactagatgctttgcgctcctcttctcttctaataatagcttcttctttcttacgctgtatttcagcaagacgttgcatcttctcagcttcaagaatttttctccgttccaatacagcttcttcccttgcaatgtcctccttttgctttgttttgatcaccagtagcttttcagctctccgcatttcagaaccatgaagtttctgcctcagtaagaatttcttgttttcttcatttagtgatgtaataaaacggacctcattgaccttagtactctcatcaccagctctttttgcaacctgggcaaggtatgcctcatgacgagattcactacgttggtggcgtgcattcattacttctcgcagttttgagctgcgcacagcctgccattcattgacacgatttaacttttcagaggtacgttgcagcctctgaactctctcactttctagttgactccggattcgtaaagctcgtgcatgtttttcttctgcttcctttttcatgtccaaagcacttcttttcttcttttcaggagacattaacttgtcatgtagaacacgagcacgctctggtacttttctgccaacaccaggggaatgggagacacgagaactccgaacaggagatttcagtatatcttcccagtttcttttctctttccaggcatccaatgacttccgtggtgctgcattttgtttctccttctcagtatgaactgtagtcctttttgccgtatctgttgacctgagcttgtcaaatttgttttctggcaattccttatccttcctaaaattatgcttctctacctcagagataggttccagtgatccttttcgactctttgcagaagatgaaggcatattttgtggaggtgatctacctgacttgattgtatccttgctttgcctctctccagcaatttttttctcagtgtcagaaagtttcacctgactctccactttcaaacttatacttccaacagtcgctgatgctgtggttagctttgatgagctaccagaaacttctccagaagagctggatgcaaagctctctgttgttataccagcttgtttgcgagccagttccaattgaattctctgaaatgcctctagagatgaagacaatatctcttgcctgtgtggtgaacttgtcatccttctgacctgcatatatgatttaatcaaaaagggttttgttaactcttttagcactgtgagatactccccaagttgatttctagcattcaaaatttgtctaaaaaagggttgatttctaaccatccttggtccagaaatcgagaagtattaatgagtcttatctcttcaataccccttactacattcctattaatgaggggcacgtctttttccctactaatctgtcttggaattgctagtagaaatcaactcttttggagacgtagtagatttgcattccatgaaaagtgttttgtggcaattaaccaggttattttaacaactattaattcaataaagggtccaagtccagaaactcgtcatgatatatgtaatcgttcaattcttgataagtacataggcttgtggacagagaataatatgtgcacactatgagttgttcaatgatcataaaactacgctaaaacttggagcaattgaaatgaaattctgcatacaagtcatgtaagaaaatatttcataattttgcgtattatgagaatacggacctcccaagacaaggcatgtggtcttcgatggtcagctttcacagccattggcatcccctcctttggtagagcagtagattttttggtgttatcaaaatgctccgccctggatttcagttcttgaaaatcagatatagcttcttcaagaacaaggatggattcattaatttgctccatgtcacattctaactcacagaggaggtaaagttcatccacagccctattcagattctcaaaaagaaaacaccagagtctctgcctgaacctttctttgcttccagcagtttcacctccaaaatctgctgaagttggtgcatgaagaactgtctggctttctgttgaagcaacagaagacgacttaactggaacttcaagatcattgtttgcacaggacaaggagactgtgtcgtccaaggaaggtgaaccactaacatccaaacgattatctgttatttcacatatatccaataccttgctctcatcttcagtgggcgtttctgccccttgaataataacaggagatgtctcaacaattgttttacaagaattcggctcagttttaagttcactttcatctttacattcatttatgaattctgtagcatcgccaatgtgtatgtgtttttgagatgaactattatttctacatgcatctgcaggtaatgctagacctggcacttcatcaaaatcaccaaacctgacagaagtgttcgataaaacacctatactatctgtcattggagggcctttaacatgatcataaaaacctgaagattttgcaagaccacttgaacagttggaggattgatgtggagttggagaatcagcacagtcaatcttaccaacgttgggaggttcacttatttcttcagtcactagcagttttttaggtttttctattgcatgatccgaggctgaaacacttaattcactcttcagattgctagcatctgcatgagcacattcttcaccatgaacaaccattgtgactacgctacccggttcattaacgcaaacattaacctttgtgatctgaggtgagcattgtaacctgtcacaccactttgcactatcactgccaaagttggtctgagattgtgaggacgagtttgaaattttattatcattggaacctcctgaagacctctgcaatgtgaattttgagctggatcggtgtttctgttgaatagatttgtaataagttaggaacagaagcactaagagttcttctggcataatagagcatcaaatgagagcatgatccaagtctctgagcaaaatgcaaacaaaaaatataaaatgtttgatgaaatatggtattaacttgatgatccagaaaaaatgcttctgaaagagccaataatcttcaagcaacttagagctgtttacagggtataccttcgctatgtaagtctatgtgtgtgcaagatagtactggttaatagctatcatcctggacagaatggaatatggccaaaatatatcactgaatacatgcccttttgctatgcataaataacacagaaactcctaccacaacatctgtttggttcaatctaggtattcttctaacatttgatttataaacaggtgttaaattgattattatcactctcggccaagctattgcatctgtttatctagaaatgactgtcttgttgcatggatcaaactcacaccccttaaggccttaaccttgcatttaacaataaggcgattgtgggaacatattgttagagtttgtgtcgaatatatgtacaaagtcagttccagtttaggacttggaattgtaataggtgttaggactagagtaagagtcagactctatcctaggctctctcataaatagaggggcgtgcctattgtaaccgcatgacgacttagcatagcgagagggagcggctgccggcagcgaccagtcgtgagtcgttgtaactctgatacgctgtaatatgctggattggggaggagcgtccgtaatcagtgctccggagatgtaggctacggctgaactccgttatcaaatatcgtgtctcggtgtcatcatcatatttggatctcctatggtgttttcttccgcggtttggtttccgatgtgatttcggggccggttttataacacatataatggggaaaacaccacaatcattcgatgcattataattgaacagagagaactccttacttttttcacttcaagccaccctgatcccacatcatctagatctccatgatcattctccattaccaccaataaatcttcagtggttcctcatgcattcctgctttttcatacagatacggcagttaattataccaggaaatgtaccagctaaaatatttttttaagtgtacagtgtgctgagggattaaaaaaatcacagatttttcaagaaaacaactataatctataggtactgaaatcctcactaaaaccctgacacttaactgcaacataaaacatagcaaaatagtgcagaagattttgccaacgatgcatatccagacaaaataaataaataaatccaaaaccatcaaaggaattggacgaaatgtagacaaactaaaacgtggggctacttaagttccggatcccttcgcagctggtctccgaatttccaatctaaaattccaaaatgactcctgccactcaccgtcactggcattcactacaatcaaccaaggatcgaacaactaaaaaaagcaagaacattccattcctctcgtgctaacatgtcaacaacaaggttgttggttggaccaatttccggcgcaaatttgtacgatttgggggtaagaagagaggccccgctccctcccttctccctgcccatccatcccaattcccaatctacaccgcgcccgcctgcctcgcgcaaagtgggcggaggaggacgaataccttcaatccgatccgaaccgagacggaaggatgtcgtcggcggcgtcgcccctccagacctgcctgctcccccgacgcgcgcgcgaggaggccacgccgctcatgaggggaggatggccttccccgccgccgccgccgcccttctcgccgccggccgcgcgcgcgaggagtcggggagccacgtctccggctcgccgcagtttttttttttctttttttttcctttttttttcgttttagggaggctagtggagactgcgggttgggagagagtgagagaggcgtggggaagtcagggtgaggggcatttcggtcattttaggctgagggtgactggcttccaggtggcggatgacgaagacgaggcggtccagcgcggcgacggtgctccggcgaccggcggcggtgacgtgagggcggtagggaatccagaacctccgtagtaatgcaaaggtgcactcttcatgtggggagcacaataaatcaatgcgtgtgaacagtgtcaattcagtgtagcaaccgtaacgaaaacgttgtagaacactacagagtactgtagcatagttaccgtagtgcacgatttgatcttgatcggacggtctccattgctcctaatgctgagtatacctattcgggcagtgggagcgctcgatgatgttaggtcaagtgctactcgtgtcggcgaggattaggagcagtgtcacttcctcaaagttgatttgggttgggatttgattacgagctaaccggttccagctcacttacggtttgttagagcttagctccaacttcatctctcctaaagttagagcccatttatttcagctccaccataaaagaaaaaaatgaaacggttaagtgttctcacaaaatgaactggagaaatggagctggatttaggctgctccacaactccactttaaactgaactcttggtgttaaatctcgaaattgaagtactctcaaacatgctctcaatccaatcggatacactcccttggcatcaaaatacatgatttttaaaataaagaataaatattataaaaaacccctatgtctcaaggcgttcctatcacaaaactacatgttaagtacttcctctatttcaggttataaaactttctaacactgcccatattcatatagatattaatgaatctatgtgtcatctatatgaatatgggcaatgctaacaagtcttataacctgaaacagaggtagtaaattttatcatacgcacttccttgccccttccgcaaggacgaagtattgacaccgatatagcccatcccctccacttctctgtcatagccaaccgtgtaatacataacttcaatatctaagtattaaccagaactaaaatatgcaggataaaccttaaccaataggtttatctaggttttctaaaatatgactattttttactataaacttagataatatttttagttacaaatctagtagtaatagaaaggagtatataaatttttttacgggaggatggtataaccttcagcgaacaacacaaagaaggttagttagaggcaggactaaagttgcaatcatgttccttccgtgttttcatactcaaagtctcaaacccagcagttagcaacttccatttctaaacaatgcgctggtcagcaagaaaaaaaattacagatatccattgataaagaacacaggagcatcaaaaccaacaccgcttgatggcatggcatgtctgattgtctgtggccatttgcgaccagttgtacccaaccaacagccgctccaaagaatcaacagacgttggtcactgctcatccagagacaaacccctgttagtaatataaaaattgtttctttttctttttcttttttactccccaatcccccttcttcctccttgatccctttcttctccccatccctctttgccatggtttccgcatcttgagctgagcagagcacagcttgtacctgcagccagccatggtgaccaccaatttcgtgcagaaccaccaccttcagaacagccagttcttcctgctccccaagaggcagcttgtgacctacgccctctacgctctcatccctctcgccctcctccattaccttctcttcaaccctgtggccactgccaagaagccggtggtggtggtggttcaggcgacagacgatgcttcggtcatcgcctcgtctcatcacgagcatgtcaaggtgaatgccaagcagctgcctgtgcccccttctgaccaaggagatgaagggttcaagaagaatgcgataggtgagatattgggatctcttgtcgatttcgagtacctaggatttttttttccatgatgagatttgtctgccccgattggttttctccatttcttgatgtttttggattatcggattctgggcattagatttgtgatgtttcttgtgcagattttagcatgtatgaacagatttgagttcttggggatttaattgggggagggaagggcatccttttgggctaatctttgcatcttgtgttggatccgagcagccggagaagtggcggcggcggcggcgtgcgactactccgacggcgagtgggtgccggacgcgcggccgcctctctacaacgggacgagctgcgccacgatcaaggatgggcagaactgcatggcgcacggccggccggacaccggctacctccactggcggtggcggccgcggcggtgcgacctcccggcgttctcgccggaggcgttcctcggctggctccgcggcaagcacctcgcgttcgtcggcgactcgctggcgcgcaaccaggcggagtcgctggtgtgcctcctggcgtcccgctccacgccggagctcgtgcaccgcgacggcgaggagaacaggttccggcggtgggcgttccgggagcacgacgccaccgtgtccatcttctggtcgccgttcctcgtcaaggccgcggagaaggcggagcgcgccggcgtgcggcacaacaacgtgttcctggacgcgttcgacgagcggtggatgtccgggctggggggcctcgacgccgtcgtgctctccatcgggcactggttcctgatcccgggcatctaccacgacgccggcgaggtcgtcggctgccacgactgcgccgagttcaaccacaccgagacccccttcttcgccgtgttcaggcaggcggtccaccggacgctcgccgagatcacccggcgccacgtcctcgccgccggcgcgggcacgagcaagagcaagagcaaggtggtggcgttcacgacgttctcgccggcgcacttcgagggggagtgggacaaggccggcgcgtgcaacaagacgcggccgtacaagaacggcgagaaggaggccgggtacacggaggcggagatgcgcaagaccgtcgtggaagaggtcgccgccgccgacgccgccgcggccggcggcggcggcgcgggcctgcggttcgcggcgctggacgtgacgacgctggccaacctgcggcccgacgggcacccgggcccgtacatgcgcggcgacccgttcgccggcggcggcggcggcgcgcgggtgcagaacgactgcgtgcactggtgcctccccggcgccatcgacacgttcaacgagattctgctccagaccatcaccagatgacgacgttgataagatgaatcgtttcgtctcgtttacgagatcatacgagtagatagtgcgaattccgcggtaaaaatggtttggtttagatctcagtgatttttgggtgtcgcctttgatgtagctgtaattgttagagcatatacaatagcaggctataagtccgttataaacataagtccgttataaacatattttaaagagatatatgaaaagataggagagcagcgggctacagatctgtagccagctgcagcatgggaattggctattacattggttatagatgatttggagttagtagtgtgctatactattaaacttgctctaaactgctccattttaaatctgaactactcccactgaactgaactgtactactgtcatcaatacaacgggattacgggatcgtcggtggcgtttgatcttacgatcacgtgtgaacaaatcgtgcatttgatttttcgtggacactgctactcgatcacttgcttgatttgaaaataaatgcagacgttcatgagccgtgtacatcgtctatcattttaaaaaataaataattagtcctaaatatgagcatcaggattaagtacaggactttgcgttcacatgttgatcctgatctggtgtgcaagtagcagtcaggcaagtagcagtcaggtttcccaaaccgccgggtctggggttaccgcgccccgacggtaagcgtggtaaccgtaaaaaaccgtacaaaatcgtgtaaaatttatcaaaaattcaaattattttttaaatttatttaaatttaagaagattaccgcggtatttatattaccatacctccgcggtaagaccggtaaccgcacggtaacgtcaaccctggtagcagtcaatctaccatacaatctggttggtgtgtcgcaagtgggctgtcggctccgtggatctgtctgtgcttagcctccggcggaagttgtgccttgattgtctctgcttcttagacaagagtggtggccactttgacctttgagtgtgttgtttgctgtccctttgatacccactcgatagcagcagcaggccagcagccagcagcatatctgcatatggcgtcgagaacaattggctcgtcttccggcgagggagtaccatgcaggccggccggagcggtgaaccgggaaatttccggcctccgacactagggcggcggtgaggccagccatgccgtctcgcctcgcctcgccgcgtcatggtcacggcacgaacgatggcgtcggctgccgtacgtgtgccacgacgtgctgggctgctggcatggtatggtaagggtctctttaaatcatttaaatcatatgaatgaaataaaaaacatgattatagaaatgcaaatgtaaaacagagaattacaaaacacaagaaaaacatacgaataattgtttgattgggtcgcaggaaacacgcagtgagagatagactcaaaggatttttctaagaggttggacctcttactaaattttctccaaaatctacgtgcaatgagctattccataggatttgtataggatttggaaaactccaaccctttgaatcaaatagccaaatagaaaaatttcttataggatttcaatcctatgaaggttaattcaggacgtcttgtttcatggttgttttggaccaccgaaaacaacatggttttcagagacaaaatggtttactctccactgatcctgcctttccaaatcattttctttttgttgcagtgaaaagcctatgtcgttctgaggagacttttgctgatggagacgatgactgagaagttaaaagtgacaacaagtgctcttggtgctcagagaaccggtgttggatgatgatatgccttgttttagcttgtcatagtatcttttgtcggtgacttttttctgctcatggccttttgtgtgttggctgttagtctcactgtaatagatgtgtgtttgagcctttgatatgtaaaatgggtatccccgtaaggccataaacttgtttcgacattttgctttcaatataagcagggctgtgaggccttttctttaaaaaaaaatttcaggatgtcccacttgttttacttcttttcatcaaaatggcacaattatattaggtttattcagcagatgctgacaaattgggccaccatttgagtaggaacttaaaagtcttatacgatgatcaaacaatccaaatgacccaaaattatacggttggaccttaagtgggaccctgagttgggcaaatcaagttattgagattcgaatttgctacatactaacagtcatgtgactgtttttctttttccaagacctgtggaaaacaatcctttcggcatcaaacactccaaagaaaccactcaagtcgttggtgatattctagttgcctgggagatttggaaaaaaaaaaactcgcgcctgtttagaagcctagcaaacacccctgagaccatcgtttacgcatcgtatgggttggttttgttataaaaaatatatcaaatgaatataattataatgtgattacactataattacaatattattatattataaccatacttagtgtgatttttactcgagtgatatagttagtccaattgagacttgatgtgccactattagatttgtgcagccagacacgattatggtaggaaagaaggtgttacaaataaagttgcttaaaaattttggctaaagaacaagaaatacacatgaaatccattaaagttgtgcctttgagagagtgcacgaccacttaagatcttgccaatgcgctcagagtaaagaatatcacacctcataagcattttaaggaagataaatttcgtcattgcattgacttttataaagtttgcattgactaatgagaactagaaggctccatgttgagtacggaagaagctcctctaacatgctgatcagtcacttaaaattagagaacatcaagtccgaggatttgtttccgttgagtactgcttgtccatgttcataccgaattcgctacttacaatttacaaattagtgtacaacgttgtgtgcccgtgtcactaacgccagccccaccggccagctccagcgttgtgcctctccgctccatcattggagtatatgcaaacgacaaacgttcttaggttgtgctcgaaggtagaggttgagaactccacctcatcacatgtaaaaggagtgatttgttagtacataattaattaattattaactaaaataagtttgaaaaatggattaatacatttttcttaaaagtaattttcctagatatagaactcttgcaaaagacacactgtttaacagtgtgtgaaaaataagagagtagaagttggaaaaaggagtggccaaacacaaccttagacattaatatggggacgaccgacattaaagttattaggtgatgataaaataaggatggaagaagtatcatgatctttaaagattggtactttataaaaaagtgacattgcacattataccaccaaaataagtctaatacataattaatataataaaaaagtcatctccacttcaaactgccgcaatagtttttcttgttttaaacagtcaactaccgtagaaatgatgggtagtaaaaggacccagaggagaggccgatggatcaaatttgaggattattagccctaacatttatgagtctactaatttaagagaaatttgagaataaaatgtttacttttctcatagagtttctatgtattttagttgattagaggtgacacatggtgatttaaaagctggtgatttaaaagcgttccacaagatgttcaatgggctttctttttttatgttacgtttgtatcttatgtagttcatctatctctaagagttttagctaggtacgtaaagagagattagccagatgttaaaatattatcatgccctccattaatatggagagaaaatatcgaggagaagaagcgagtactgctcgtttaatttgatgattaagaataaatgataaagtagtattaaaggggtctagtggattcctctaaaattcatgtttagtaaattaattattagcctacaactaacggtgggaatatgttttttcctacttagtttttttttcttttgtgaatagtacgtacgtacgtgtttttctgttgtacgtccacgtactggaaaggagggattatcttttataatagatttataatttaatggtttaaaaaaaggttcaccgatttaagtgtatataaaggctaagatgttctgatttaaaaaaaaagaatttctaagctttttcataatttattaggatgacgtagtgactcaagggcatttcagaggatatttgatagacattttatcataccgtatatatgtatatatatttatagactatatattagcttacatgtgtatatatattcatatgtgctccctccaatttaaaatataagcatttctactatttttttaaaaaatatttatacgtattttttaaggcttctctctcttttttttcctctcgcgaatagtacatatacgcactgcacttttctccagtaagtcacgtacatgagatatctcgtaagtacacatacatgagatcaggagactttttaaaatgatataatggtccaaaataatggtttcactgattttaggtgaaaacctagagctaaaaattttacatctaatagaattttaatcttttattttaattcatttaatgtgacacgtggcgacttaaaatgcttcagagaatgtttaatgaaccattttcaaccgttcatatgtaatctctcttttataagattatcatttctgcatgtttttttgaatgcatatggacatccctccgtcaacatatattttaagaaacaagagaaaatgattatattttagaatgaaagtggcttttcttttgcatttctttctctctttttcaggcaaacagtacgcgtgtatttttcttttgtaatcatacgtactgaagataagggagagattatttttaaaataaaatctgatagtctaaaataacgtatcatcaatttaagtgaaaaatcatgagctatatattttgtttttttctcatttaatttctaatcttttttctaatctattagaggtgacacactgtgagttaagagtgttccgtttagtggaattttagtatacaaccgaaaaaaatagaaagatggatgatagataatgatatgattattgcttcacacaaaccagtggattagatttgacacaaatattagggatactttggccactcgaaatcgttactgtacttcaatcagccagtttaatcacttcctctctacttcagatgttaatcccctttatgttcgattaagcaataatgctgtgctttccaggttacactccatccatctcctctctacatgtagtacaaactatctgaagtcaccactcccacctgttcgacgccgtacgacgtcgtcgtcctcgtcgtacgcgctagctatggccgcgcgcgagccaccgcgtcaaggccatggcgccacccggctgtcgtgcccaactccggcgaccaccaccaccaccaccaccagcaacctttgcagcttcctcaacagagccatctccgcttggctcgtctgcgccgtgctcagcttgtttctcttcaacctcctctggttttaccctgtcgacgcgccgtggaacgtcgtcatttccggcgaaggtaagcgtccatccatggcgatggcaggaggaggaggggaggaggctaggtgcgactactcggaagggcggtgggtgccggcgccggggcgcgcgcggcggtacaacggcacggcgtgcaacgtgaaggagagcgagcggtgcgtcgggaacgggcggccggacacgggctacctggactggcggtggcagccggcgtcgtgcgagctcccggcgttcgacgtggcggcgttcgtgggcgcggcgcgcgggaagcacgtcgcgttcgtcggcgactcgatggcgcgcaaccaggcggagtcgctcgtctgcctcctcgccacggcgttcccgtacaccctcgtgtaccgcgacccgcacccgcgggagcgcaagttctggcgctgggcgttcccggcgcacaacgtgacggtgtccgtctactgggcgccgttcctcgccaggtccaccggcaagacggacgactaccggaagccgcgcaacgacgtctacctcggcgcgctcgccgagcggtggtcggccgacgccgacacgatggacgtggtggtgatcagccaggggcactggttctggatcccgaccgtctaccacgacgccgccacgggcgaggtggttggcatgcacaacgtcaccgggctcaagaacaccggcgacatcggcctcttcgcgccgtacaggaggactctgcggatggcgctggagcggctcgtcagctccggcgccggcaaccgcacccgcgcccgcaccgtggtggtggccacgttctcgccgtcgcacttcgagaaggcgtgggacgaccccacgacgtgcgcgaggacgcggccgtacgacgacggggagaaggaggtggacgccgacgagagggagctccggagcatcgccatggaggaggtggccgccgccgccgctcgccgtggcgccgccgctggcggcggcgagagcagggtggaggtgctcgacgtgacgaagctggcgacgatgcggccggacgggcacccgggggtgtacatgcaccgcgacccgttcgcgcgcggcgtgccgaagcggctgcaggtggactgcctccacttctgcctgcctgggccggtggacacgttcaacgagatcttgctgcagctactgatcagcaagaggcggtgacgataaaccggagtactagcgtgtgcgtgcatgcaaggcaaatatgaacaactaacttgagatttgagatacaagtctgatgatattaagttccatttgtattacaaagttatgtacatgtaaactatgtttcaaacttatgccacggcaatcaaaaccgatctcaatattatattaggagttgagaatacatttgtactggttttaaaagatgagggttacgttgtatccgttgttttacggttgagcaacatgattgcaaactcaaccattatgttattaggaatgtaaagtggactttttcccttaaacttaaggtatattctctgccagaaatacactttttcggcccaaaagtagggtgtcaatccgtaccaaaatgcggtcgtgaaatgcgcgtgagttgagcccacaggccacagatggtcgtgaatttggtccaaagcttagcctgaattcagccctacgttcttctaaattcagcccaaaagtgtgagcgatctcagctctcaactgtgcacgcgaatgcggcccaaagatccgcgtaaattaagcccaaacgttcggcgggttggaccatatttgaggccgagaaatgtgcgaaaattcggcttttaagtatggaaattccggcccagtgggcgttaattcagcctatatctttaaggaaatttagcccacgtgaaaagaacgaagtatgtgcgccagtccgccagatatcatcatcgcaagtgggccgacatgtcattgggctgaggcctttatttctgcccattgagcgtggaacatgtcccagctaaaattcttcactacttcaaacgtacactaggtgaaaccccacgtgttgctgtgagagttttgtatagtattaataaaaataacatgcaacatagatacattatgtacacttttcatctttgatcaactattgagaaaaaaactataaacaattaagataatatggattatgaaaattaaaatcatatgtggattgatcattcaaaaacaaaagtaaggtaacgtggcttcatgagagaggaaaaaaagaacgtaatatagatcaattatttaaagagaaaactaaggcgatatgattttataagagaaaaaaggaggaggataatttagaccataaatcaatcatgtaaggaaggaataattgagatgatgtgacttaatgatagaagagaaaaaataacattaactatatatagtggtgataaactatatagatattcgctcagtttcatattataagttgtttgatttttttcttagtcaaaatatctttatgtttgaccaagtttatagaaaaataatagcaattgctacaataccaaattactttcattaaatttaactttgaatatattttgataatgtatttgttttatattaaaaatattagtagagtttttttataaactttgtcaaattcaaataagtttgattaagaaaaaagtcaaatggcttacaatataaacgaatggagtatataggatacgcggcttaagattctaagaatctagttgatagccagtttctgagaatctgaagtgaggtttattttttagattttataactaagtttaaaatttggatgataatctggattgcttgagggagctgaagtttatgcgagaaacttcggctgctaaaagctctttcaaacaggtcttgttgcaggaatcttgcggcgtggtggtagtaacagcgagtcagaagtcagaacttcttcgcaggacacagatttaacactgcatcaccattggtgctcgctaacatggagatctgcaaacccgttagtttttgcgcagcacaatcgatgcagcccccatttgcgaggcaagttcgatggaaatgccgttgaaaatggaacagatatgcccacttgcagatatagaacagtattgtcctccaaatctcgagaccgtaattcagattcagttaatgacgcgattgacggcatggcctcgatctacagcaaaactcttcttcctctctctcactctctgttgcggtcttttcttttgtgtgtgtaactgagttctatcacttttgaaacgatttaacacttctgcgatatggtttagtattatagttaaaatctcgattgcatgattttacatttctaacttgtaactaaggtacccaactctacgattccatacggtaaaaatgagtaaattgtatcaccagtacacaaacttgtcaggtgggtgtaatctagtgcacgaatttgtaaaatgctcattttagtgtatgaacttgtctggtgcgtgcggaggaatgtgaaaaggttactacatggctagtcttattgatttaggggctaattaggatactatgtaaatagagtaaattgtattggtggtacacaaacttattagctaggtgcaatttagtatataaacttgtaaaatactcgtttcggtacacaaacttgtctagtttgtgcggacgagaaccaaaataacttggcaatgttaattttacgaagctgatgttaggatgtgacgtgcatacatgtagtgagtatgcataagaaatgcaatatttataaatttaatctctagtttatccttcatcatggaaatgatgaatttcatatatttctaacacttatattgctcagtttttttctttatctttatctttttctactatcactatattctattaattttttattgaataggtgtatgcctgatagcaaccttctcatatatatatttacatagtatcctaattagcccctaaatcaataagactagccatgtagtatccttttcacattcctccgcacgcaccagataagttcgtgcactaaaatgagcattttacaagttcgtgcactagattgcacccacctgacaagttcgtgtaccggtgatgcaatttacttcggtaaaaaactataattttataaatttcactagaaaaaaatatcagtgctttgtaaagggtgaagctattttaatattattattgttatacagtttagctaaggtaaaattcattgtgggaattcgtttcaattttctttttataaaatcattagctgcaattagaagttcaatcatctcaagttatcatgcgagtttttttaaaaagagatttcttatatgacttcttctatattttcgaaagcgaacgaatttaaaaacagctcaaacatgaataggtatttccaaaagcgaatgaacttaaaaccgactctaacttgaattacgtaccaaagtaccggcaaaacatcttcaatttttataatattagatagtagagatagatatagagataaagatagaaatatagatagagacagagatgtataggattctatagttgcgattctacttagaatttccaattctaatttagcatcgtgatttcgaattctagttcaggattgtgattttaataatcttggtttaatattttttaaatcacactttagtcattttgagtcattttgaaactttctactacgcccgtcccaataaaaatcaatgaccgaatgagacgattattatattttggaatggagggaatatcatttttacatctttttttcctgtgtggcctgtcaaataaatgggaaagtaatttcatcccttgaggggatatcccctcgttttgtgcatgccacctaaatagtcgtaaaaaaatatgaaaaaaaatgacaacatagattaatatgaaatgtatcacttcacaaacatgcaagtttaaattcaacttatacaagttgtaacaaaaataacaaatatagttgtggatgcgcgataactattttcagtttaatttttatttttgttgcaacttgtagaagttgaatttggtcttgcatgtttgtggagtgatatattttggattaatatagtcaattttttaaattttttgataactatttagatgacatgtaaacaacgagaggaaaatccacatcccaaataaataaatactacaactatattactcctctcacaaagtgtaatttgggttgttttctcaaatcctatgcacaaatcccaaacaacagaatatatttgagttgttttcacgtcacgctccgttgacattttttgggtttgagctcttcttcttcgacaatcatttcatttctacatagacctatcagaactcataacacagaacccccctggtaacatcgtcatccactcatcctcaccgattccgacgtacggatcgccgccgccgtcgtagctgcaccggcggcaaatgggagcgtacgacgagccgccactgcgtcaccaccacggcggcgtgcaacccatcagagacatcttcacgtcgctcatctacgtcgcgctctgcttggccctcctctacctcctctgcctcacccctcgcggctcgccggagaacgccgtctcggctctgctccggcacgtcaccattgcttcttccggcgaaggtcgtggtaagctaagcgcccatccatggatgcgcgtgatcgcgtcgtttcagtgtaatcttgagttgatctcgtgtgtttgtgttgttgcaggaggaggaggcggcggcggcgggtgcgactactcggaggggcggtgggtggcggcggcggggcacgcgcggcggtacaacggcacggcgtgcgacgtcaagggcagcgaggactgcgcgcgcaacgggcggccggacacggggtacctggactggcggtggcggccggcgtcgtgcgagctcccggcgttcgacgcggcggcgttcctcgccgcggcgcgcggcaggcacgtcgcgttcgtcggcgactcgatggcgcgcaaccaggcggagtccctcgtctgcctcctcgccgcggcggcgttcccgtaccgcctcgtgtaccgcgaccgggagcccgggacgcgcaagttctggaggtgggcgttcccgacgcacggcgtcacggtgtccgtctactgggcgccgttcctcgccatggccgccgggaggccggagaactttagcgtgcagcacaacctcgtctacctcgacacgctcgccgagcggtggtccgccgacgccgacacgatggacgtggcggtgatcagcacggggcactggttctggaacccgaccgtctactaccaccacaacggcggcgaggtgctcggcgtgcacaacctcccggagctcaaccacaccgagatcggattcttctcgccgtaccgcgaggccatccggatgtcgctcgagcgcctcctcggcttagccgccgccggccgccgcggccgcaccgtggtggtgaccacgttctcgccggcgcacttcgagaaggagtgggacgaccccgcgacgtgcgcgaggacgcggccgtacgaggacggggagaaggaggtgggaggcatcgagggggagctccggagcatcgccatcgaggaggcggcgggggcggcggcggcggcggcggcggcggcgaggagcagggtggaggtgctcgacgtgacgaggctggcgacgatgcggccggacgggcacccgggggtgtacatgcaccgcgacccgttcgcgcgcggcgtgccggagcggctgcagagcgactgcctccacttctgcttgcccgggccggtggacacgttcaatgagatcttgctgcagctactgatcaagaagaagcagcagtgaacaacaccggtatcgtacaagtacaagtgacatatgcgttgcgtacttgcgtgcatgcatgcacgcacgcacgacaatataacaacttgacgaatttcctagacattttttatactcttaagggatacaagttggaagctgcatgcgttggtagatactaagagcttctccaatagactatttaaatcagactctccaaacacatatataaccaactttctaattgatttagcaagccaaatttgttgcttacttcaacaaactctgatccatctacgtaccctctttattttgagtctatgacattgagaccccaaatgttagcctctactatactcttcctcatcctctttctccccctcttcctcactacaccacaacaccaaataggaggcacttgatatatcgggataaacaacttttagtagcaagcagtctgtcgggaaagacttttgccaacactttgtctgttaggtgagtccgagtcccccttcctcctcatggtgtcttgctccatttaccctgatgagacttcggtgagttggagccccatatctcccccgtgagttgacaacgtccctttcatcctcgccgacatgccttgcatctcgttccaagcaacgacgaaaagccaacacaccttcctcctcagatccggactacattaggagataatgggacttcttttttggggggagctaatgcaatttagttgacatttgaggagttggtactaaagtttttcaaattttagttgaaagttttatgattttgagttgaaagtttcaaattttgaatcaaaagtttgtgatttcaagttgtaagtttaagatttcgaatcaattgtttttgtgattttgagttaaaaagttgtttgtggttttgagttgaaagttttaagattttggaccataagtttatgattctaatttgaaagttttagactttgaatcttgcgtttttgtgatctgagttgaaagtttaaagtcacaagtggaaggttttggaaattggaagtaaaagttttggtaagattatctttaggaatatagagctaggggtatgcgtcgacacttcaaatgctcttggcatgcacacgctctattcatggaaagggcagcgaaattggtctgacttccctaacgcatgcctgacctatcctgctggtgcataccccctccgtcctaaaaataatacaatcctagctacaaaacatatgcatgtccagatttgtaactagggtttatcattttttggaacggagtagtatgtgcgatctaggcgcctccgaaattgggtaacctgtttttaattgctagtttatttttttagtaaattacagcgatggtatataaacttttgaggtgggtatagtttggtataaaaacatgtaaaacacttgtttcggtggatgcattttgtctggtgcgtgtgaaccttaggccaaatgagcatgccatgccatggttaatcctacttagtttgaatgtttattaagatgtcgtgtaggcatacatattagcatgctgtcatctagacgtgcatatgttcaatcaaatgtataataagaggcactgataattgatgttttaaataagaacatatttttagagaaataactttaaccactatgttctgttacatataatagaattatcaacaaatatataatttttgtttacacccaaatttagtacctttgcacgaaatagggaaaaattgctaaagtttggaaagcaccggattttcttcacatggccagtcagaccgcaggtgtgttgtcggtctgactagctagtaggaccggtttgaccgcaggcatgtggctggtcagtccgtcagagttcgagcccgaagcgaatttcgtcaggtctcgggtttccttactcgggaaggtatgttttgggttttcattggtttctaccctgagttgaacatggaggagcacctgtaaaaggcaagaccaacccttatataagggacaaggccggttcaattgaatcacacaatctactttcaaccaattagccaattgaattgctttttcaatattgcatctacttttcgcttagttctagcctagtttcgtccatctttgttggtttgcaccgtgaaccgttcgccgtcactgcgagagtgcaataccgctttgtaggtttgtcccgtaaaccttctgttcgcccacgagacgggtggttatcctttgttccacctagattagatccgctagccggtctagtttgcaaaacacatcttgatttcgaaaggctaatgggcgatcgattgcccctagcgatcacccccctcctccacgtggtttctttttttggcaccgcattactttcctattttagtaaatttatgcatctatagtttgtacacctcaaatttacacatctaaattttatacacctaaagtttagagacccaaagtttataagtcaaaagtttatatgtctgattcaaatttgaatctgaattcaaatattttatatatatagtatttctatacatctaaagtttatacacctaaagtttggagacccaaagtttataagtcaaaagtttatatacccgattcaaatttgaatttgaattcaaatattttttatatatagtatttctatacatctaaaaattatacacctaaaatttatagacccaaaatttataagtcaaaagtttacatacccgattcaaatttgaatttgaattcaaatattagtttatagacccaaagtttataagtcaaaagtttacatactcgtttcaaatttaaatttgaattcaaatattttttatatatagtatttccatacataattttttctaactttgttttctttttttaaaatttatggtgtaaaagtaggaagagaagaagggggggaggaagccaggaagggggagaggagcgtataggggggatggcgggtgatcgctgtgggagatcacccgcccattagccacgccatcttgatttagccttttggctagatcggagtggttggcgactccatatcaccgtaagacgtttaggtatcccgatcatggttgtcttcttgccaaaaaaaagttgtcaacaattttgttgaagtactttttgagattaatctataaatatggagaccatgattataagtcaaatactacccccttttcaactgtaaatctttttgacttgttttttcaagtaaaactttttttagatttaactaagtttataaaaaaatatagtaatattttcaacacaaaacaaacaaaaaatattaaaatatgttcaacgttagatgaaataaaataaaattggtgctataagtgttactttctccgtttcatattataagtcattttgatttttttagtcaaatttctttacatttgattaagtttatagaataatataataacacttctaacataaaataaaatagattatcaaaatatatattcaatactagatttaatgaaactaatttggtgtttaaaatattactaattttttctataaacttagtcaaacttaacaaaatttgattaggaacagagtcaaaacgacttataatatgaaacagagggagtactatattttctataaattttgttaaactttcgagaaatttgatgggaaactattctaatccctcgaggggatgttccctcgtttgctcaaaaaccatctaaatggttatgaaaaattctggaaaaatttgacaacattcatacaacacatatatacaactccacaaaatcttaagtccaaactcaactcacacgtcgagatataaaaaagacaaattcagcgtatgaatagtagcgtactgtttatatctaaatttgtcttttttatttctcaatgtgtagatcgaatttgaacatgaattttggtggactagtaggtatcattatactgtacattgtcaattttttttcagaatttttcacaactatttgtatcgaatttagaagaaaaaggtatacgaggggatatcccctcgagggattagaatccactcccaaatttgactttaagaacggaagaagtattttagaagttatttataatattttttgaaaaaaaaataacatcagtttattaaaaacaataattattttaaccggaggctataagtactttgaccaagttggcaagttgaattcgtaccgcttgtggatggtcatgccctctgccatttgctgcatcgatccgcaccttcctcaattagatgccctgaggtgtagtacgagaaatagcaaagaaaatgacctcgaggtcaacccatctccattgtcgacgcacccatgcacattttcccctatcagtgtcagaatccctctatatagtaccagtactcgatactctactcactcactaaccaaaaccctcactgctcgatccccaagctcgagatgggagcttaccagccgctgcagcatcaccatggcggcgccgccgccggctacttcctgccaagaaccgccgtgacatggctcgccgccgcctgcctctcccttgccctcctccacctcctctgctgctcccctcccggcggccaccaagccgtcttctcccctctgctccagtatttcaatggcaatggcacttactcctccaacatctcgtcttctgggtatgtacaagctaagcttggatggatgagcgagcgatcgggcgagctagctagctcatcaatggcggtgttcgttgtcgttattgttgttgcagggtggaggagaggtcgtcggcggcggcgtcgtgcgactactcggtggggaggtgggtgcgggcgccggggcacgcgcggcggtacaacggcacggcgtgcaacgtcaagccggagcaggactgcgtcggcaacgggcgccccgagacggggtacctggactggcggtggcagccggcgtcgtgcgagctcccggcgttcgacgcggcggcgttcctcgccgcggcgcgcgggaggcacgtcgcgttcgtgggcgactcgatggcgcgcaaccaggcggaatccctccactgcctcctcgccgccgcgttcccgcacgagctcgtggcccaggacgccgagcgctacaagcggcagttcacgcggtggtcgttcccgtcgcacggcgtgacgctgtccacctactgggcgccgttcctcgtcaggtccggcggcaagccgttcaactacaccatgccctacaacctcgtctacctcgacgagctcggcaaccggtgggacgccgacgccgggacgatggacgtggtggtcctcaccgccggccactggttctggaaccc

SEQ ID NO: 9431 - DNA, 37527 bp, Oryza sativa
ccgcacacgaaaataggtgcccaccatttaatccggccgcgcgcccattcctccctctcccatctcctccctcctcccatctccatctccctctccccctcctcccaagctgcccggatctggcgggcgggagcagcgggctcggcgaccgagagcggcgtgcgcacggcggcgagctcggcggcggcaggcgacgacgatggcagtggcggcaccggtctcccagcgtctggatccgtcgccggcgatcgcggggcgatggctggattatggttagggttttggttttttctctttttttgattttttattttaccgtgcggcgtgcgagcacggaaaaatcatgattttcgtagacgttgggttccagacgagcgaaactactgcacgtgaaaatgagtttgcaacacacggaaagatcgttgttgtagtagtggcagccatgcatcgatcactgctataaaatcgatttttgtatgtcctagctaggtttttctttgcacatacagccgaaatgtgtttagctaaatagttagcctcgccttaggtttgtagatcatatgtacttcctccgtttcataatgtaagttattgtagcattttccacattcatattgatgttaatgaatctagacagattcattaacatcaatatgaatgtggaaaatgatagaatgatttatagtatgaaacggaggaagtaaaatatatttctgttaacggtctctaaaggaaccacttgtaagaataaattagtgcagacagtttgttagtaaatccgtgtgtcaaaacctttgtttctttattctttaacaaaaatacctaaacaatatcatagaaaattttcgactgagatgaaccaaggcgttcatctaaaatccttataatacctcctttaatatgaccaggtcaataattcctcagaatattttctttaacatgacataaatgaacgatcgtgacagtggcgtatttgtatatatgtatatgggtatggcacacatgtgtgtatacatgtaatcacatgattgcgaaagaacatgcagtctagtatttgtaatgaactaagcagcacttcaagagtgctgagtttaaatctttataagagcgaattttagattagattatttgaggggctaagttttctatttaaatcagtggcggatcttctcttgtggcaagggatggcaccggccatacctatgccatgcccaaaatagatagggtatttaagcatatggccatctcagccttgattacatatgctaattatgtgattagttagctgtattttaattggtacaagcttattcgtctaattaactggaggtaaagacctatagtgggactgccttgtgtctgcacaaatgaatgaatagtctagctaacaatcggtaaaaatcaaatgctaaataatagtgaatgtctacttgttatgaataaacacacctaaaaaacaggggaacactcgtggaaatgtagtttagtcgtaaaagttatacggcgaatttaagggcatcagttgtaaaaactgcataacaaatttaagattataatcattgtttgttattcgacgaatttaaagtgtcagttgtaaaaattgcatcacaaatttaggattataatcatcgttaatagcatatattctaataaatgcgaacatatattatagtttgtgtataataaaatgctacttcatttttaaaatattcgttctggtgtgatgatccgccatagctaaatttttatgctgtgtccgccactgatttaaatggctgcataatctagttggatataaaggccgggtaaaaatacatttttaaaaaaattaatcacatgattaagcgtactaccggtggctcctccggtgatttttcacggttgcacatgcttgcagatccactgacacgccgcacataatgcaacgaccagctagctatagccggcgtcatgctactatacaagcattaatatgttatagtacaaatactgtacatatatgtagcggaccagaagaataatggtcctatatatcctgtaccatacgacgactttcagctaagatcgatatctctacgacattatatttaccaacttggttaagaaaaaatcacttttaatcatcgatcactatacctagctagactagcttgtccgaggtgagcatgaattgagacgagagctagcctagaccgtagtctaatggtctaattaagacgctagacttgtccgtctagacagttaaagacgatcctaaactgtcaatatcacacatttaaataacaataagatgagcctaaaccataaaattatcgtttaaactatgatccaagcaacactaatgtattttttgtgagagaggagctaaaacttcgtgtcccacccaaggtccatattgcttaaggttttgacaccattacaaacccctctgctctgcacgaaaccttgcgttgccatgaagttgcaatgggaagagagaaggaagaaaatggagaaggaaggaaatgaatgaaaaacatgaccctagcatggttccaaatttgtaaaatccagtgacacaattataaatagacaaattataatgatatttatctaaatagacatatttacaatggcacgaatccaatttacactaaaatttagtagtggtttctattattttggatctcctgaagaccaaactaaaatgaccaaaaccgatgggttttcattatcatgcaatgcattttgaactttattatatttctagcgaaccgaaatatattgttttggtttgaccgaacgcccacccaaaatcgtgccttcatgactgaaatcaaaacttttaagtaaaataagagcgaaggcaatatatttttgtattgacatatacaggcatgaagccgttgcagtatttgactggaggggtcaaacctgcatatatatgggcccggatgggcagccactcgaccagccagtacagtagtactaccgcacctactcataaaagaccaaaacatgtaggagtaaaaagctggatccctggcctatccgctcatgccgtgcagcaggcagtgctgtatatgcaatcaggccaggacatggcccatcatatctcctacgaatgtgacttatatgtgcgtgatatatatgcaccagatctatgatccatctggctagccaaacatgcatggcccatatctgcatcttgcctttaatagttcagtataatactaccttcatcctagaatagatattttgggtgtgattagttcacgccaaaattaaaagtttggttgaaattagaacgatgtgatgaaaaagttagaagtttatgtgtgtaggaaagttttgatgtgatggaaaagttggaagtttgaagaaaaggtttggaactaaacaaggcctttgaaggaatgagacatatactagtactacaaatttaaacataaagattgtctagattcatactactagaatgtgtactatccatttaaatctcttatattctaggataaagggattagtcgctaaaagtaaaataatattatatagatacccactttgtttcatgacattatattgttttactttgactactcctgtttcatgaatatttttttaaaagaaacatggcacaaacgtaaacgcttacagcaaacacacactcacccttaaaaacacactcacacataccatacctctataagcacctcctaaaaactaggctggcatatcttaaattgagtaagccatcacgaggcaactcacccctaagaacttacacacgcacaccctatcctataagcacattcaaaaaattgtttcagcatatcttaaaattgatgaactcaccacggatggcacgctgtcgaatgatacattacctactattgaaagaacaattagtcatacacccgtgtcatttctaggatttaaacccaggtgaataggattctagctaaatacactcacttcactttcatgaataaatttgtaagagtgtccaacatactatattattaataaagtatattatacaataagtatataaaaaatcccgttcatcatgattaaacgatttacttcctctatcttaaaatatagctatttctagcacaatatcttgtcccagaatgaagctatttctctaactacctcctcctctcaaccaatcacaaccattcttcttcacctatctcctcttttcaaccaatcacacacctcctccaatcattcccacctacttttttaatactcgtgccaaccttaaaagcaagtttaatagtacagctaactactagctcgaattcatctatagccaatctaatagctcattcatacaatagttacatactacactattaatatatggtcccacctgtcacacatacactgcgtcttggagtccgtgctacagctggctacaaatctgtagcccgctgctcttctctctcctcatttatcttcttaaaatatgtttacagctggtttatagcctgctattgtacctgctctaaaaatacctatattttgaaacggagtaagtagaagatatcagtgatcaaattaaagcatgcactgctactctaaattatagaatattatgaaacggagggagcacattcttttgtatgcgtatggacggatgcagccttttacatgcacctatgtacagtctgctcattgaattatggagttgctagaaatatggcgccatatgctacaatcgattttttttcagtcacttacatatgtaattagtatgtaattttagtacttacatatgtaattttaagacttacattataaatacactaaaattacatatgtaatttagggatttacaatgtaaatacatgccgactatttttttataaaaaatatggcgccataaatatagctacacccttgaattaaccaataaactttgcatctcgtacgcagaagttgatggaatttggattttggatgtttgatacggccgtcacactaatgtcattgggcagtacgtactgactagccggtaattacatgcttgtacgtctggccaattgcccaaacctggtgtttaccgaaatgattgtactgttgtgaaaggctgaaatggccttaagtgcgagtgtacaactttacctgctagggataaccctgatgttcatgtttatgtacatgtaggtgcatgctctttaacagaaagttttgtaagttgtacgttcggatttattgttttgattaatttgtttattatgggccctgcattgcagtgatataaatcttagcttctattttcataaaaacaattgtacctacatggctacatctattaatccgagcaatctatgccattataatttggtaccacaatgattgatcaatggtcagcgtgaattttttttctccatgaattaagttttgtttggcacaactttagatcagaattttttagagccaatacacttcagaaatatatggatctaaatttgttattaataacatttggataaacacttttctatatattttatatgaaatatatataaaattttaaaccactttattttaacttacaaagtctaaatctagtagttatatatgtggagtagtaggaccatttcctgcttcagctctagaaaaaaaagtggtttagattttactactactcccaaaaaaagctatgtggagtagtaggaccattatctaaaatctattactactccacgatccactttattttctgcttcagcttcagctctagctccatttcttagagctgaagtccaaccaaaaaaagagtgaaattctgtttagaaagctctagaatgtgaagactccttgtataatctttactccttaaattaaatttaggataatctttaaaccctcgaatgtgaaggctccttttataggctttgataacttgtgtttagccttgagtttattgtcctttttaaggaggattgaggcaagaggcagcactcagccaacgtacagtgccgttctgccgggacagacaaataaaaccaagcatcctgcaggtttcatttccagttctcatatccagcgaattctcagctttgctatcgcccacagtgatccgctgctccaccgctacgacgcacgccatcacacgcgcgcgcgcgccgtcgcatcgcagcctgcaccttgtggcggccgtagctcgctctcgctctcgctctcgcggccggtgaaatggcggcgcacgacgcaatcatgtcttcttgctagctagctagctaagttcgtcggcgcgatgatgtacaagcatgtcggagacgacgcacgcgggtcctccgcgggcgtagtgtgctgcgtggatgtcgtcgacgacgacgtcgacgcgctgctgtgcggcgaggacgccggcgagctggagcgcgagggcgagccggcgcaggggtcgtcgccgtcgtcgtcattgtcgtgcgccgccgcggccgccgcagccgctgacgacgacgacgaagacgaagacgaacacggcgtccatggcgaggtggtgcaggtgactccaggcggggaggagcactgctacgactacgactacgacgtcgacgtgcccgtcggtgccgagctcgtcatgcctgcttgctcgccgccgaggacagccgtccaccggcccggctggtcggagtccgtctcctggatcctcaaggtgaagctatagctagcaccgccgcaatctagctagctcgatccatggcaatctaattaacttgcacatcttaatttcactcgcctttcttctccaggtccggtcagtccacggcttccagccggcgacggcgtacctcgccgtgagctacatggataggttcatgtcgtctcgcagcttgccggtaaatcaatggccgcccacacttttgtctctagctgtgtctagttactggattaagcgcagtgcactgcagagagccagagattaggccttaaaaaaagaattagctgcagattacgaatcaattgatcagactatgctgctgtagcatacatacttagtacagagttggcagaatttgcagtaaaaaaaaagcacacttgcactatagttatgtgccgatgatatgtgggttagaatggtactgaatttctaagtaacttgtgtgtccgtcccaaaatatatatacttttttgagtttttcaaagtaactaaggagatatataaaattaaattggaaaataattgtgattagtttaatgagctgaggaagcatgtgtatgaattaaatatataaaggatgattgtgattgtttaggacgagagaataataattttattgtggattgtagggaataagtacctagctagctagcacacaaggctaacgaatgtttttggcagatgcaactagtagcagcaaattaattgaggtcattagggatggaattctgaatctatgttaggtggctagtagggcattattctctgtcagaggatgtgtctattcaacagggaattttaactttcccattagtagacaaaaaacatgcatgtgaccggtgatgccattttctgcccaggtgtgccaccacaccaagattgagaattatgattggcaggggcactattttgatttggatttggtctcaatccccgatctacatggtcactaccctgattaagaggtaggacaaggcactttttcatggatcgacgttctacatatttttgcatatgattatcatgatccctctgctacagaaagccacagccattccttttcttaaacggctccaatttataatcgtctatagaaaaggttggggccgttgtaaggtcataggctgcctgtgaaaatatgtcaccatcgattacttaagaaaaccgcctacactaatgaattcattattatttgcaaattcctagagaatccaagtcagtcgtaagttcataacagttaatatcaatctgaaaatgactctgtacaccacacttgcaattgctacatagagttgtcgttggttgtactattccatcatcaattctcattgtgatcagttgcatggtttgtgatttgatgttatacttcagatttttctcttcgaacaagatttcttttaatcgatctcctcttgttcctcaatgctcagagaatgcggtgcattctttgttaatgcagagatagacagctgaatttccagttatcttaagaactctactcatctgattctagcttattattgcaatttgatttctttcacccaggatcatggttgggcatcccaattgctatgtgtggcttgcttgtctctggctgccaagatggaggagtcctctgccccacccctccttgaccttcaggtaactaacttgatgtgaatagtgagtactcaatgtctttatttgcttttgttatgaatatgaatttcagcaaatgcaaacagattgaaggaacaagattcatttttgaacctcggacgatccagaggatggagctcatcgtcctcgtggagttggattggaggctccggtcagtgacgcctttcgcctttgttgatttcttcgcttgtaaggttggctcctctggaagaagctcaaggatcttggcattgcgtgcttgccaaataattctcagtgcaattcatggtaatgctaacgttttctttttgagggaacagaaaacaaaattttactctaggatgcatataggttgatcatttattcgcatgccatataatatactagatgaataatcaaaattgttttcgttagagtctagttaaaatatctaaaataagcaaaatgttgattatattttaattttattaccatactatcactagtagtaaaaggtggcataacataagtaaactaaatgccaatgtcaagaggtgcaaaatagtacaatgaaatataatttgttgttttcattgcctgaataatattatcattgcatctttgactctctattgaagtacttttttgttcccctctctttgatgaaaagatgaatcactggagttatggtgtgagtagtgagtactcaatgtcatggtcccgaaaactgttggttttaccggtcaataaccggatggcaaccagttccccgggtagttaccggtcggaaggatgcgaatataaataaaataacatattgtaaaacttgaatatagaactattctgttcgggaacatgtaaaattctaaatttagatttgaattcaaaattagcatttaaatttcaccaggcctgttcctgccaaaccggtattctgaaccttgctaggtagcactatttgcgtcaggattaagagggtgtttggatggtgaccacactttaccacaactttaccaaaatctgttgtagtacataggaaggagattattggatttccatttcaatcaaccagttagctggctaaatgatcatccactacctgggccaatccaaacacatttgtaacatcctggattcctggtgacagttcaatgtgacaagagatcagatgctttcttaaccctgctaaaataatagtacttgcaccattttctgtgaaaaactacatgagtctcatcatcattaattacatattgaaattaagtgctagtaattatccttaaacatcccaactaatgctaaacttgtccttgaatctcgctgcatccaatgctcgctaattgatccaagaatcttcttgttgccatccgtggaacagagctcgagttcctgaaccactgcgcctcatcaatggcggcagcggcggtgctattcgcagtaaatgagtcgcctgcagccatgtcgcacaggagcagcgtcagctctgaatcagctgcctcgtggtgcattggcctgactgaggtaagtaacctgatctctgacgtcctgaccaacccaacccacgacatgatcaattgaaagatcttgtagtttgcaaaactttgtcagttcgtcagtaactttgaaatgatcctttttttaaaaaaaatgtttttatatttgttattacaggagaggatcagcagttgctatcagctgctgcagcgagctctgaatgctactgcgaggaagaggaagcgacatccgatgatacttgcagcttgttcatcagtaacaagttcatcttcccggagcaaaaggcgcaaacttgatggccattttggagaagattgaatctttcttttcttttcttttcttttcttttatttgagtctgaattatattacattcctcggcgatttctgttcctggatgagctatttatttgtttatttttgcatccttgtggttgttgaagctttgataattttgtagcttaattcagaaagatgacatatttgaacataaatgtggggatcgagactaggattaaagatttctcaaagaaaaaaaaagagtaaaattaaaagaggagcacctgtatgatgaaatcgatggggaccaatagggcagcaacctgtgtgtatttctttctgcaaagtgatgcgaaagtgaagcaaaggatgcattcgatacgacactttggactattgggcacactgcactttgcagggctgatcaagttagctaccactagattagcaaaagcttcctccccttgtttagccctgtcaaagatttgtgtttgtttagctagttaaacctgattagtattatttagtagtactttttttttcactgctcaggaggactactcctaggacagtaggacctccattttcagtgacatgcttatactacttctgttttaaaatatagctatttctagcataatatcttgtcccaaaataaagttatttctccacatacctcttcctctcatccaatcacaaacattctttttttttttgaacggaaaaacagcactagagtgccttttcattgaatagagcaggagaaaatacaaacccctaggggtaaaaggaaaacagagaaccactatagaaccactatagctgtatagtgtgcgagattaactcacgcaaccacttagctcctgctaaagccccaaaggctcgcctcctctttgattttcattagtaggaagttcgttgccacctatttgtgatcaaaaatccgccgattcctctctttccaaatttcccagacgactaacagaatgagcgatcgaagtccttttctcgggacactaggcgtgtttgcaatgttctcccaccactgtttgactgactgggcttcctcccattccgttgggtccatctgctgatagcccacccatgcagagacgaggtgccaaatcctcttggtgtatctacaagtggcaacaaggtgcaatgccgtctcaatctcgcggcggcaaagagggcaacaaccattgttctgccatcccctggtcgcaagccggtctgaagtccagactctgttctgaatgatgagccaagcatgaaatttgcatttccccgacgcccaggctttccaaatcaaggaattgaattttgtgctcggcgccccgcagcactgtgcatggtaagccgaggaggccgtgtagtgcccgttgtttgtgaacttccaagtaatctgatctggttctctaacgtctaagtgcacatttcggaccacttcccacagtgcggctagctgttcgacaaggtcgattgtgatagatgattgtgaatcaagcttcaaatcttgcacccaggtgtcctcctcctttccttgccgaaggggttttcctctgttttttgagatcgcatagacaagcggcatgaggtctttgggtcttcgcccaccaatccacgtggactcccaaaatcgcaccgtgtttccgtcccctattgttatgtttgttgaggcggcgaagaggttcctatctatttcatcacatggcgtctccagccccacccaaggtttggtctggtccttccattcatgccacaaccatctcaacctcaaggccctcgtgaatttgtccagatttaggacccccaatcctccttggctggtcggcatgcacgtctttgtccaattgaccttgcatttccctccggtaataacacctgtgcctgcccagaggaagcggcgccgctgcttgtctagctgcttgagggattcctttgtgattttcagagcggtcagaaggtagattggttgcgccgttagcacatatttgacgagcgtagttcttccagccgctgccatattttttcctctccagcttgctacccttccggaaattttgtcaaagataggttgcaagtccaccttccacagtcttcccagagctagggggaggcccaagtacttgatggggaaacttgccctcaccacagggatgccctcaagaacctcattcaactcgatgccgccgcatctgatgggcgccacttgggatttctgaaaattggtgacgagcccagttgcagtgccgaagtgctgcaggatgtccgtgaaggccgtaacatcgcctcgggtgggattaatgaagatgatggcgtcgtctgcgtacattgagatccttagcctagttgttctcccccgaattttcgagattgcgccgagctctgtagccttgaaaaggattcgctgaagggggtcaatcgcaagtatgaaaaggagcggcgatagggggtcaatcacaaacattctgtttcatctctttttctcttctcaaccaatcacacactttctctaatcatttccacctactttcttaatactcgtaccaacctaaaaagtacttacattttgacacggaggaagtactaacaagataaattaacggttaagatcacttatatcgatgataatactaaatagtagtagataggggtactcgtttgagatcaccataaaggtaagtcgatcatttcattattcagagtacattttaagtaaacaaaataactataggactctgaattttcttttttcaggagaccatccatcctatgaacttgaaaagattcaggacacttcatattacatatttatagttgcatgcgtgtgttagttagacctaaaccactgtgctacttaaattttgcctatggcaacacgacaaccagttgctatcttcagggcaagcagcagagagaggccccaaattcttaccagattatttgtcctgcctttatgtaaagcagcgtcgtcgtcgtcacagtggcaaagatcatttgctcaccagctcgatgcgcatttcgaactgctgcctgcagccagccaagcccagcttcgtgacacacatgtatttatttaaaagatgatctgaacaatcgatgagatcgactcctttcccagacaaatgcattgccccagctgctactgaagctgaggtgtcgtttaatccctgcactaatctagctatgaaaaaacaaagctctttgcgtaaagataacctaatcttggtcagtgttaaagcaggcaatgattgttgatatattgagatagtgtgatgacactgtggttttgatggatctgtgcataatatcatattatcatgggagagatatctttgcgtaatctgttcagtttggggctttgtagattgtatcattgtggtgtttgcctttggcaggtattatctctgatgatggatgattatacactgattgattaagatccagcttagcaatgtgctatagtactaaaactaactgaactgctgaaggtgataatttatttaatttgcaaaagatgagaagtgcaggtgtggtgcagttatcaagtttctagtatagtttttcataaaattgttgagtttctactatttgcaacagtgagctggtggccggccaggcgctctccttttctgcaaaaaatttaccgtgaccttaaaaattaaaggcataagggcatctccaatgtgcatgtaaagttaaccttaagcactaaaataatatttgtagtataactttatgtattgggaagtaaactcacaagagaatatatggctatggctaaccttaagagcaagtataataggaggctgtaagtcggctaaatgctgaggtgatggagagaagagaggagagagaggagaagcgggctgtaaatttacagccggcttggacgcaagaaccaaaaaattctgtgagagagacaaatgggcactatattaattataaatagttaactattatatttgtaggctaagaaaaaattgcaaagaaccttataaccaacaagtcggctgtattattagccttgctctaagcttagagctagccataagaaatataaaattaatttatatcttttcaatgtgtatgttggctttgaatcttcatgctaaaatggacgaatacaatttgttttccttggtgggccacaccttaaggtgaagaagagatgttatacattatagcatttaccacgagtaaaaatatatatggttgtgggtttcaccttatggttatggtgtatcttaacactgaggataccctaatgcggggacatgaggagtggtcttgctaggccatgtgggagccaacttatcacgtcaggcgaagcagtggctccgcatgaccacgcgtgccctagagaagctatggatggcttcccaaggaaaaacgttccgaagatgaagccatgctcaggtagctccattgctcgccgtcgtggttccaatctcatcgtcgatatgttctactgcgacctttgctcaaggctgctttgttgctaggacctttgcccagacaactccaccgtcttgtaatcaacctggttactccaccatcggtgccccttgatttggcctgatcatattcgtgacctgatccaatgagcacatgaccatattgctaggagctcaaccaccggaatctagtccgctcggagcgcggtggccggagtaggattgtaggaaacacaatggcgattgaggtagagatggacgatgcgcatagtctgagaagggagatgttggagactaggagaggatagcaatggtgattgaggtgttcgggagaacaaggaaacgacagcaccagtatggtaaagcaaccgacgtgaggcggacaaagaagcgaccggagaatggaggagaggagtcgtcaatgaacatatggaagaagggactgatcagagggggaggggttaggaaaggaaaaaagaaaagaaaagggagggtgactgacaggtgggtccacaagaagcttaagggtctatatgtatttcttttattataatagggtttaaatcaatttataaaaaaaatattatgagagctggtatataagctatccatggactcagccggtttgataaatgataatgaacattttcttcaacatgatatttttaaaggcatggatctaatcaaccattttcaaatttcaaattttttacatttgcatgcgttacaatctgataaaacgctgattgaaaccgctcttccacatgcaatggcagcttttaccagtcaccaccagtctaccacacgcgcgtgcatgccgacggacggtccgtcctcccctctcgcgcacgacaacagaacaagagatggggacgagaaagaaagagaccaatgacggactcacactctcgtatatcctccctcctctcctctttcccagtggaatccatggctcctctcgtcgctttcgtccctgcccatctcacacgcacgcacgcacatcacgcactgcgtctgcatgcatgcgtctggccggctccctccccctttcggcccggagaaaggcggagtacgtcagtcccatcaaaagaagccccgagtgcgcgctggatcgagagccgcgtgacacgatcgtcgtcgttgatccattccattctcgttggatgatcttggaaagtcatgatatgatgaacgtaacgtcccgttcttttctgattaagatgtaaattttattttcgtttttatttgtttgatttccaaactgctagaacagtgtatattttttcatcttaagtagaaacgaacatcacctaaaggtcctgctcgtcatggtcctagttaatttttacttccaaattttatactagtaagtggtaaacaaaattatgaagtgggtttttatgcggcagcgttggtaacgaagattcgtgaacggaagccggccgccattgatggaagtggaggatggcagtggcggtggagcagagtatgccacatgccacgctttgaaagcctgaatcaatcgggtattgttcgatcgatttgtgcgttctctgaagaagaatgggtggctctttcagctttggctgaatctccatcgatcgatcgatcggcaaggcaatcgatcaagctccccaacgttccgaaatgcagccgtcagaaaaagagggaaaaaaataaaggagttaaaagcgactttggtttggtcaacctggtaatcaagcactactgatcatcatcttttttttttacgtgccttgatttgtgtggcactctgccatggaatttggagctctttctttcacattctatctactgaattctgtaccggccaaccaaccagcaatgattgatttttttttctggtgctttgttgtacagccacaaacccatgttgttttggacagatgtgctatccaagcttctgaaactttttaggattggtatttgtaaatggaaattgtatgagtaggtttagctcgaaaagaacttgctttcctgatagcattatgatttaggacaccaaagttgtgtttgggacatgagagagtaggattcatcaagaaaggaaaataaattcagattagggtaattatccccaacagaacatatttgcatcatgtacaaacatggcatgatgctccagtgtccctttgatgatctgttctgtcaatcatttcagttcttcaactaccaaaccttgttcattgcaggggaactcgagttcaggtgttggcacctaacttggcaaatctctagcacttgtcttactaccaactgcatctgcaggaaacaatatacaaatgtgcaggcctaataggccgcgaatctgaagatgtatgcttgcttccaacacataaagctcggattccagctcctgtgttctatgattgcggcgatccaatgatcacaaattcggcacccaaagagcagcagtaaaatacacaagaatccttaaaaagctatctgcaaaggatgtactttgcatcttaaactgaatatataatagtacatcaccctgcttttgattaataaatacccctctgtatgtgccaactctaagatgcaatgcaaattaaggtaccaacttacttcccaagccagaaacaatcttgacctcagtaaaatggcctgagtaagattggtgatttcttacagtgacttggtacctactaactgaaactctgaatatgatgcattcagagctactgatcatcttcttctctgttgagagatgctgaacccaacacaaccaaactgaacatcgcatcagctgaaaatgcacttctgatgaaatgatgagcatgaactctaaaaacacagatcagttcaactggccggccactgacgatcgtgtcagcttctgacttcggcgatgctgtgcagtgatgggcgccattgacgatgcctagaatgtgtcgccgagctgctccgttggccgtctctgtcatgctgcaaaccacaataggatgggtggcagatgagtaatcagaattcagaacatggcactttgttaatcttttatatagtttaggagaccttggaatcaaatcaaattaaagataaagcaaaaattggtacaatccaaagaattagtgttggatgattcttcatgaccaatagttaatttttaggagttaggagtagctgcaagattttagactattgaaagtctggcctttcttggactttctgctatcatcttgtaaactagtaggttccatattccccatgtatctgacatcttacaagagaatgtcaaacttgcatgtttttatttaggagatgacaggaaagaaaaataagtaaaccacccatccatgcctttttccatgtggtgtgaggaaatcatggtatggcacacaaggttgttgtttaaagcttggtttgggaataatttgtccactaagtacataactaaacagagccattatatcatgtttaagagtacattattgctaaacatattcctggtatcatgatcaggtattatatgatatctataatggatctggttagttggttaggtactagtgtgtcacaaggagggtggccaactaaacatagaaataacagttgggttgagcaatagcctaagtaacttacttgcctcataatatactccaaatttagaatgttaaccaactatgtgctcacctactcctagactcctagtgttcactcaaccaaaagaaagaaattaattgcattggaacatagagctaaaattcaacatgcaaattcacaaatttaaatttcaaacatacaaaaatctgtcccttttgctcagaaattgagttctggatactttacttatgcaattagcacatatatcaatcaaattgttgcttccattataggagtataattaagttgatcgaatagtaggattataggagtaaattggccatggtaagaacagctgagatgatgaaaatcttgcagcaagaagattgtgacaaacctgatcaagattctcatcgagctgcgtgtggtcgtcgccgccggaattgatcctaactccggcggcgacggcggcggcggcggcgggcttggattccaggtgatgatgctgcgccgccgccctcctcgacttctcctccttcttcgcctgcagcgccctggtgacctcgtcgacggtgatgaggcggtaggcctggccgaggagcagcgtgtcccgcggcttgagcagcttcacccgcgtcacccgcaccgtgccggtgccggtgccgcgccgttcggcccgcgccggcggcggcggcggcggcggtggcggccgcttctcctcggcgacgcggagggtgacgagcgcgacgtagtggcccgggttggcgcgcatgacctcggcggcggtggtggcccagtagagccgctccacacgaccgcccgggtgctgcaccaccaccgtcgccgcctccgccgcctggcagttccccatcgagaaccgagaacaaaactaaagcttaacttccttcctccttgctggcggcgagcggcggcgccgcgtggcggcgagagcgcactggtggtagtacggtcgtcgcgggccgcggcggtgggcggtggcgcgacgcgacgcgacacgagagcgatgcgatgcgatgccgccgttggcgctcgcgttgggaactgaggagggtgaccgtttatatgtcgccgcgccagcgcggtgggtcatttacggcctaccgctcacaatttcgtcctactttttttaatgttttttgaggacaaagttttgatttttttttttaattaggcaaatattgttcaaacttagcaaaattttgtttaagttttttttttgttttcaaattttagccctctataattgtttactcatccagaaatatagttatatgctggcgcatatgcatgactttactctaatccatttgtcagggacttaaataagaggatcgcatcccgtataattgtggcatcacaatataaactctggtgggtttgagctatacaataagaggttaatgttgtttcccgtattcgatcgtttacatttcaacattaacctcttttttaaaaaaagattaataacccggcctttacatccacaaccaaagttaccctctcttttactctcttttacatgactgttgtttgggtttacttgaaaattttacttttccatgtcatggaagaagattttgcataagaacaaaggatggttctaaagggtcggtgatcatacatcctatcaatgatctatgcctctatggtctaacaaccaagcatgcagttttcaagaacacttgatcggaaagcaagaaaaaaaggcacaagacaaatgaaaagttattggcgatggcgtgtccagatactactttaatttctatttgacatctagtgttggcaatttgctgtagtataataaaagaagctttatgaagattatttaacttacttttcttggatacaaatagccgttttcggcgcctcatatctggaactgccttttcgcctcgttgataataatttttttagataataatggctgttgatagtagtgtctgttagtatagcctgtagttctgtaattattttttcccgttatatcgatatgaaacaccgaatcatattttttgtttgttttaaaaatatgtatagcagttgttgttactttctactctctctgttcgatatcataaactgttttagttttgtttaagtcaaatttctctaactcgtacgagcatcgatctctcgtgtaagatgttttcttagcagagtaatactgattaattaataaatgtgtccactaaacatgaacaattcccttgtacgagcatctcgtataaacagtatacttaatttctcattcaagtaaagactttgaagccatcccagattagtactgtacggtctgtaccagagcttacagccacaagcgttaccgtcagatttcagaagtactgaagcaaatgtcaatggtttcactctgaaaactttaaccaccaccgatcgctcggagtacaagtatatgtggtttgttgagattgtatacgaaatactcttgttgtatgacgttgttaatttttagacatgacgtatgatcatttatttggtttgaaaatttagtgcaaacacaaaatatatttctcatgcttaactcatcatgtacgtgagaagattgaggactatacgcatacatgtagctactcgggtttcatcaatagcactacaaaacgaaaagacaacatcttcatttaagttttggatgcatgtaactataaatattttatcttatgtgaaaaaagtaaaaaaataaaataagacttttggatgaagagaatacttttaataaaaaataattcacaataaaataaataatacttaatatcgttattctaataaaataattggtcctatgttatagcctagaaagtcaataactacatctagatttcctgaaatcacacacagccgcaggcatatgtcatttttggatcttcccatgaacattttccccccatcaacgcacaatttctccgccacggttgggggatcggctcggccgccacggtggcatgaggtcagcgccaatgggcctggcgctgacacgcgctaagccgacggcctatttttggttaaagtttttggcaaggttagtttcgaaataagttttcgaaaagggtcaatttgtcaaaaaaaaagggcaaactcagaacaaaaattatcaggatccaatacatattaattatctaaactagctgggtggtccgcacaattgtgcggctagcatcaatacaaaattatctattttttaacatgttttttcttgaaatttattaaatagatatctcatcgtcttaagatttgaaagaccaaatcttatcatctctgtgtttctaattttatagtttttaaaagtcacaccagttactaatgttttacttctatcatcccttctttatttgcttgctcgatcgatctaccactacttctattcattctctttggaacctttaaaaattggacattatagcttttagagtttattgtcttattgggttttggtttttataatgtttagaaatctcgttaaatactgtcactatactcctctacatcttgttaactgccttctctctttattgttattggcattttaaaaatcaaacgcttgccttcattttttactttctagaagccctgccaaaccgttaacggctttgccactgtactcttttgtgacttgcccgctgcctcttatctttattgtcattgagattttaaaatcgaacatgattattattggtttattttttactttttaaaagttttgaacctttaaaaattggaccatatagtttttagagtttactttctcgttgagtttcatttttataatatttagaagtcccgtcaaacacgctgctactatacttctttatgacccgtccactgcctcatctttttattgttactgagattttaaaaattaaacataattatcattttgggattttttttttactttgtagaagtcccgctaaaccatccacagctttaccactgtactcctctatggctgcacgttgcctcccctctttgttgtcattgagatattaaaatcaaacatgattatcattatcttttattttttaccttttaggcgtcccgccaaccgccttgactatgttggttaacggcctgtccatcattcctcgttttaatcataattgggattctatttagagttttgttagtagtttttagatgcccaatcaaccgtcaccactcaactctttacatgcacattgcttctcccctctttattatcatctgtcatttgtcatcgttgtgttctatatgtactttatttttttattttgaaaatttcatattttcattccgatatgttttatttacaaaattatattcctacttgaactcttatagttatttttctattttcaaaatttattttatttgttattctgatttttaattaatctcgtcatgtgttctggatggtctcttctttcaatagtctttatttttttattacaaattttggttatttataaattgtattcaacttttttctaatttcagaatttattatattttccttttttcctacggttaatgtggtaatttctagcatccggattgagtttttattacatttgtattttgaatttaaaggatttttttcaagaatatgcaaaagaaacatagaaacaatatagatctggtgataatgcacatgttcttttgctagtttttagtgtgcccgttaatttttattggaaggtgtaaatcactgttaaaaacaatgataggattatacgcgtatgcaaaagaaagaaacaatctagatctggtgataatgcacatgttcttttgctagtttttagtgtgcccgttaatttttattggaaggtgtaaatcactgttaaaaacaatgataggattatacgcgtgcggtacaactattttactgctgcctcacatgaaacctactctagttctgtttcgttttgctaagttatattcctttccaaatagagtctggtgtcctgatgctactactatacgccatactcaatctgagttgtatcatactaacatgtccgcttctatagtgcttatgtggaacaacagtatatttccaaaattttacgcattaaatcttaacccttgagatctagatttactatgatttagtggtctatatttttctctttttctccgattaatgtgggagtttctagaccccacagcgaacgtagtgccttctttcaaaactgttttaataatataataaatagatagattatttagtgatatactagaattaaataatttaaccaggatcccgaccctagttaatagtactacgtatgaacgctcctgtgtataaatgatgagattgtatacaaaatactctcaatggttttaatatgtatgatgccgttaatttttagacatgacgtatggtcattcatctggttcgtaaatttaatgaaaaaaaatatctcatacttaagcacttttaataataaaataaataatccccgcaaaaaaataataaaataaataatatttatagttatttcaataaaattgatggttatatgctatagcctaaaaaagtcaataactacatatagatttcctgaaatcacacacagccacaggcatatggcaattttggatcttcccataaacattttcccccatcgacgcacaatttctccatctactcgagataccagatgtgactgatcgagctcaagctagctcgtggaatagaagaaaaataacttgcagctccaagtggccggcggtgatgtgagagctgaattaggttgatcagttgagaattgaatgccaagaattcagtcggcaacagcagaagtccacgtactgctcaagggacatgagaattgaggattcataaatctcgtacttgagtatcaagaatcgctttccgacgtcgtcaagatcatcaaggatgtagatacacgacgctatattcaattgtactgtgctgaatttaagaggccatgtgaggatcggtttgtgatgtccacgtattcaggattagaccacaggcccggctagatacagatgttacttcagttttcgttagcacgttttttaaattatattaaacggcatatttcatgagaaaatttattatataaaagctatttttaaaatattagataaatctatttttatgtttaaagtaactaaagtttaattaattatatgttaatgattttcttttcatgcccgtacttaatttactgcagtaaacttgaacggagccatagtagcactgtttccaggctattacaaaactgtaaggccttgttcggttgggccgggaacggctgggatcaaggtccaatccccatggatcaccctggcgaggaaacaatctcggcccatatgaaattgtacgttcggttaagccctagcgtaaattttagcccggcccaccacggggtttccctgtgctgtccgcccgggaaaaaatcacctactctccagaggagcggaaaaattcctcgagaggagcggcggcgcaacgaagacccggacgcgacggcgggagcggcgcgatccggaggcgcacagctctctcctccggccgccaccttctctccggtgagcacgcttccttcccccctttcccctcctctttcaaatttagggttagggtttccttctcttctccctttcctgtcgtcgcacgcaccgtgccgtagggcccggccatctggtcgtgctccggcgccgacgccgacgccgaccgcgtgttcagctccggctccgacttgggcggcttgggcttgggcttgggtggcttcggcttcggcggcgccttgtccttgtccagatccggcggcggcgccgggacacgggagggttcttggacgccggagaggagaggagaaggaggaggagagggttcttggttcttggcccgtagcatctctgtaagactcgccaaaaccctgatgaaattcagagtcatgtagatgtagttgcagttgcaggtttgcgaaatctgaaggaattcagagtcatgtaatggcaggtgcagtacagaggagtttcttctttcttttactttccaaagttgcagggttcgaacttgattcttctcaagattgcaaaatctgaagaaattcagagtcatgtagatgtagttgcagttgcaggtttgcgaaatctgaaggaattcagagtcatgcaattgcaggtgcagtacagaggagtttcttctttcttttactttccaaagttgcagggttcgaacttgattcttctcaagattgcaaaatctgaagaaattcagagtcatgtagatatagttgcagacttgcagtgcagagatttccttttttatttgctggtaataaggtgtcaacaaatacaggaagcttaatagcatcaaagtgaaactagcatacatatatctgtctaggggccgatcagcaggagcactgaagtgctaataagagttgttttttattagtcattagtttattgtgatatatatttgattaatcaatcagatttgtactggattaggatcctctgtgtttatctatagctagctcttgctcaaacttcagaatgtcacggtgtttagttgatacaaggaaccatgatgatactttagtggtgaaccttacatatgtgaaacttaaatagaagatgaaacttgcagggctttcctattaagagcatcgttttcaccgtagtgtatcatgttgtcgccagattcagacagcaaatgcagtcagtcctcactgtaaattttggtctaactgaagaaatgaacaagctgctttctcttcttttatctccatttcttgttgtgaaactggagcacacttgtatagctgtacttacaaagtagtgcttgttccagaaaaacaaaagccaattaactgtatttttgttagcttcctagttcatgaactttcaagtctcttttcatcttttgttctatcagactgttagcattccatgtagtgcatcagccttagtttggatatcaagtgtggctcttttctttacttgtctgctcttctgtaatctgtactctgcattaattcaatttgatatttggttgacaagaaagaacatatatggtgtatttctttttggaattgatccaatgttgttccctttttttttccagagatgggaacactgcagctgggtgactgaagctcatggtggcattagtgctaagcttaaacacttgcattcaatttgtagtttagctcttagctggctagttctatttattctaaaaaaacaactgaattgtaaccattttgattactttgtgaccctttcatgtatgcatttgtgaacgtacagcatacatgtgtgttttccctgtgctaaacaatgtttttttttactgtgtcctatggatttgatctgggagaatgcatattggttcattgcttacttgggaacgtacagctgctgccttatttttccccgtgctaaacgaaagcagggtttctatgacagggattagaaacgggcagggattcgaaccccgcagggattgagtgatatgggagggattcactcagtccctccctggataggttccccttgagatcatttcccaagcaaccaaataaggcctaaggaaaaaggttgcctgtagctggaaaagacggaagtcctttctatttcccaaacaggaatgccactagacaatgtgtatcaattttctttgtgagaagggtattttttacccagcctctacatccaactagatgatatatacaatctttttaacttagaatatagcctatcaaacagaaaacttagcccttaaataacctaatctgaaattcgctcctatagagattggacattgtatattataaggtagttggagtgttgtcggtggaaccggctcactggccgccggcaaggcggcaacactgccgtcaaggactccaggacccgttcagtttatcgccgcttgcaatcttaccaaattttaataacgcaacaaactcaacacacttcaatcattattatcttattaaattttgatatttctaaaagcttcctctcttaaaactctatcaaatcaaagccaacactatcaaaatttgaaaatgccaatatgtgctaaaatgtgacattaccaaaatttaatatggttgatttcggcaacgaagtgaacaagccccccagtctccgggctaccaaatggcatagcccttcttcatctacacgagtggaataagttcactttttttactctcttaactagtggtcgaaactgattcgtatccctaaaccacaatactggatatctcaaccttcccaactattaaaaccggaacagtttgatttcctcggtggttttggaggttcacgtggtattataattaaaaaaatttacgtgggacccatttatcattcacaccaaattattatatgacccacttatatgtggggcctacatgtcattctctctccttcccttcttcctcctcttccctctctctcatctccccccccccccccttcccattcggccttcctcgttgctcctcctttccccccaccctctgtctctctctccacctcttgctctatttgtagccgcgacgatgccgatgccaacaagctcaagcaggggagggcggtcggcggtttcgacggaacaggacctgggtgttggcgtggaccgagacagagccatctccaaccgaggaggccgaacggctacgatgcttgaggaggccattgccgccacctgggtcatgaccgtagcgaatcgcgtgcctcgaattgggaagggaaaatgagtgacgtcgtactcgcagtcgaggctctcgacggggcacacgtcgacaccgacgagggccacctaggaggtggtgttgaattgggagcggccggtgaggaggaacctccaccgccatccctgcacctctttgtcaccctcgtcgttctcgtgtgctaggtcctggaagaacgagaagccggaggagaggagtggagcttgatgtcaccctctggatccacctcaccatcatccccgcatgaatggtcccttggctccatcacctcagccactcagctccactgccgccgccgccaccgctggcgctccacaaacacgaacaagaaggggagaacagctctgccattgctcattggccttgtagcagtggtcgtagccattggagatcaccccggtgactgcgaggcaaggaggataagcagcaacacaggggccgccatagccaacgaggccatcgctctcgctagggcctacatccgcgagccttcgcgaggccgagtcactgccaccggttccgaggcaccctggtgggagctcgccgccgctgccgctcccctcgtcttcctgtcgccatcaccgccgctgccctcgtcctcccgacgccatcgccgttgtgcagaagaaggcggaaggggagagactcagcgagataagagggagagagagagagagagagagaaaagagggagaagggaataagatagaggatgacagatgagtcccacatgctggctcggtgtttagactaggtcaacgagccacgtcagcgaaagccaccctcaaaaccaccgaggaagttattttgtaccggttttaacagttggatgttcaagatatatggtattgcgattgaggggtacatattagattagacatatatttgagggattcaaagtgaacttatttctacacgagtagttcggtaattctggttcgacatgtgatcgattcgggatgtgcctcagttgggcctctagccctccacggaaataggccgaactaggcagcagtacgtagagcttaaagggaaaaaaagtacatacaaggtccctcatcttatcatcagattacaaaatcatccccaccgcaaaatcagatgtatgccatcattttgggtcctcaggcggttttgtccaacgtggtggctgatttatcgcggacccatatggccccgcatttaagggtgaccacgttgtcaccccttctctttcccatattctctcccttccacctctctctcactcttctcataatctgggctggcggggcgagtcgggaaaggaggtctgtcggcgtctgccgtgaggcaccgccgtagcgaccagctatggagggcggcgggtggcaggagtggagctaggagacggcggccggcgggagaggacagccaccatggcctgctgcgggggtgaaggcgagcactgcggcggtgggtcgccacccgtggacgatgcccgtggggaggacctgaactcgctctgagtcgtggctccttagggcggtgacgtcccgcacgaggtcggtggtgggcagcatccttgatgtggcatcgatggaagtgaacaccttgaggaggaagacaagagaggggaggcgcaagatcatggacaagctccgctgccgctcttccctgtcggctgcgccgcgcgcctccagtctccccagctgtcgtccgtcttcgctaccgagcgtcgtcgccgctcttctccgcttcagctgctggtcgcgccgcgcgcctctgattctccccggctgccacccatcttcgccactgaatgctaccgccgctcttctcccccatcggctgccgatcatgccgcgtgccttcagttctcccccggtcgctgcccgtttttgcctcgaactcgacagactcgaaccccggcgccccgacctgctcccacattgcctgttgtcggccgttggaccttgtcctctcccacttcaccccgccggcctcctccccacccgctagctgccttgcccagacgaggaggagaatgagtgagagaggaggaagggagagaaggggggaaagagagagggtgataacgtgatcacccttatttttggggcccacgctaactcaaccatcacgttgaacaaaactagggtcaaaaccgtctgagaacctaaagtgatctggttttataagctgagggatgacatgtatctagttttacggttgtgggatgattttgtcaccaatgacaagaggacgaactatgtactttttccgagcttaaattggcctgtaacgacttcggccatggacaagtcggcccagtgctttatctaaattctaggagcaaaaaagttcactttacgtccatatggcgtctacatagcactaaaagctcgtagatggtttttggctacggaacaccggctttgtaagtttgagtgacgtgttatatactccagtatagtattgcagtttaaggataatttgaactcgacgagtcgacgttaagatgagggacctcaagtgaacttgtacctatatattttctcgatcggtataccggcccaagtggcttccgatgacggctataaataggaaccaattactgggcctctttctccagtagcgcagaaggccctctccctcatctcgaggcgggaaccgctcccgaatattctagaagcttcgggaagggcgtcccccgcgcgtcgcctctctgctctcctctccaccctctcttcatggttgcgtcggcggcggcgggggcgagcggcgagccccagaagaagctcccctcctggccctcgatggtccgcgacttcgccaccgacgagtcccacggcggtaagctagttccgacctgcctcgccgcggggccgccgctgagctaggctgctccagtgtttcgcgtcatcggctaggctgatccgtggcctccgtgcagagcgcggcatgtccgtcctgaagctgcggctcgacggcgtgcgctctgcctacgacgcggccgcggcggagctcgagaccgcgaagcgcgcgcgggaggacgcggagcaggagctcggcgggaaccaggtgcaggtcgccatcgccgtggtgtccatccacgggctcgaggtctctacctctcttcctcatctctcctcgattacggccagtttcgcctgattcgattgggtttatttcgtttcggtgcgtttaggcgacgatctcgcacctccaggaggaaatatcgcaggtgcgctctgatctggacgcgcttaaggtcagtaaattttggggtttcatctgcggtttgcagtaatattcgctgttcgatttttttttgtttaaatgtgacgcgctgatttgcttatgtttctgtaacattgcaattgggaaatggtgctgcgctcttggtgtttgatataatgtctccaaaagggcaagggagacattgagaggtgagtacgggagttttgttgattgccctgctgctggtctattgaatgcattttggtgaatacttggttgcaaacagctaagacatgcaacttgctccttgcagggatgagttcatcagccagatggatcagttaaacacaaagataaggtaagcaatgtttgtcctgccgttgaatctgtgaggattttcgcatgttgtatagttgcacattggatttgctacaacagatgctgcatctcttgcttctttgcttggagccagcttgatactctaaaaacatatatgttagtctgtattaaaaccttagtttagggcttggataagggtatcaatggatgtattgtctcgatctcgaaattcctgatatgcatgaactaaggatcataagggaatgaaaatgcttcaggtttttgttactgggggactcgtggtaataacacctactttcagaattcagatgtttctttttttttcttttttggcatggttagcactcattagtatggaggttgactacctatatggaaggatactaccaagttggttttggtgcttccaaacaattcaacagtcagtagcactgattatttgcttttttatgtccatttgcatttgctttgctaggtgaaaattttcttataagaccttcttgttgattatcaaaaggtaaacaatattcgtcttgtgcaggaagttccagcagatggtttctgtagaattaaatggtaagaagtgctctgagctgtcatcaggagaaggtaagcaaggaagtcacgatgcatacataatgatgtcccagaattgtgtttgaagttgcatacataagtttgttactgagatgttcacctttccaggccaacaggtcacggattggagtgaggtcattgagttagaaggtagtttcgaagagttgaatggaaatgtgagcaatgctgattctgagaggtctctctttgaagaacaatatgaaaaagacgatcatgataaggttcatctctatttcccccaaatgctgcatcatatctcaaagaacactttgtacatgcaaataatgattatgaataaccacatctggcatttgaaaacatggagctaaaaatacttactactttctggggtatgcatctgctgataaatcgctataacatgggtttttagaacatttggactctcatcatctgcttgttggcttatcaaccgcagccaaaatttgaagtttgaaacttaattttagagttgatattggggttttttcattgtagtttatttttcagccttggcttattgagatggagggttttagtagttctttatctcgcactaatcaagaagctagtgcttaaggagttatgttttttgcattggtaaaaaaactgagtatttttggcttggttgcaggtgacaggcaaagaatgtcacagaaaaggctttaccttcctccgttccacaggcaagtttgagagcagcgatgaaggctctacttttagcgatgatgagaccattttagagttactgccgttaggaccatccacttcacgcattttggtggcatccacttctgtcaacaatggccaaaatatatatgcctctgaccagccactatctacattacctccacttcctgatttggagataccccaaagaaagggtcccttgtgtattgatggcgatgccaatgaaagtgacaatgatgatacagctacaaccagcagtcaggggtcctacattgagcttcataccattcaggatgagtatgtgataggaggtccttcttgggaagcaatgattgcgccaattactgggctcgctctagaggaggaggaggagttgatgatagagggtcaaatcttactggccaatgatcagaaagcgaaccgcctcatcactttgtttgatgaggaggaaagagccatggttcgaatgctagctgctcttggacagccattactgacaatggggacgtttccaacatcaaggagtttcctactcaaccttcccctgatatttgtttgcaaggagaaggacacagaatgctccatctgcaaaagcacgcttgctacaaaatatagatgtcatgtgcacgcctcccttgtcaacacgtattccatatgcaatgcatactgaagtggctcttggcacaacatacctgtccagtttgccgatatgaactcccagtaaaagacattcaggggtaacaaaaggtatgattactctcctctgcattcatcaacttcaagaaagaaagataggttcccaatccacacattagacatgaaatgtctcatacagaagtgatgctctagtgctagtggtaaaatcatttgttcttgttgtgttttaattcaaactgcattaggtacctatgctgtgtaggaagccaatggttattgtgatccttagtgaaaaaacataatggtgctgccagaaactgttacactttcattatcatggtactagtccagattgtattatttgctccgcatagcagctatttggggtgaaatgcttaggaaaaataagatggcatgattactttgacacttgtggcagatgaattatgctctacacaaaggatggaaaagtaacagagtattagagtccattcccatgagctaaaaatgaagcgggaaaagtgatgccagtactcttcctgatgtcccataagtccaaattactttcttcaccttctgaaatgattattgacttgccatgtaggtactcttcttttgaattgtgatactcccttgctaatcctaggatgtttatgtcttcttttgtagggttttacacatcagtaggcaactactttgttcctgtagtcttattatatgtacttgtctatattgtaggtttgctgattgaacagaaagaagtatcatgtactaagtaagccgaccagtgctaatccaggagaatgcactatctgatgataactggacatgccaatagagtgctgaactgctgatcaactactgcttttcttgtccagttttttctgatgaaactgcgatctagtattttctttgtttggtttaccgtgtaaacatattgattatcttccttgatcatgtcttcatgatatacattgcaacatggcctacttatgacctcctgggcattggcatgaaactttgaaagttcatgcattttgtttcccttagtatcagcaagattatggtccaaaaattacctctggagaattggcatcctcatatttagcttatatagtggcattcgtttatttttgagtcgaatagcattatgaatatatttgtttcttacttgtctcagttttacactgaagacgtgtacctcatgttacccgtctcgcacaccggacgttgtgacagcgacctgcatcttaagccatctatgaaaagaaataaagaatcaaccttaaattcatctatgaaatcagcgagatagcaaaaactggaagtatttgaaataattgagtcttgccttgatacggagttgttgatttcgcaggttcgtcatcgtcaatggccatgtgatcttggcccagcacctcctccttttcctcctattcatctgctaccagcacatcctcctataccgatttgttggcttgtcgcacttcccctactaccacctctttcgccgctacgtcggagcatgtcttgtgcatatggcaaggagcaagaagtcgtggcgcaggccttcttgttgctgctcacagcggtggacttggtgctgctcggtcctccaatcctcgttgaagtcagcacaggcctggatctccatcccggctcagcatggccaaatccggcttctctagcggcgatgctgagagaggactcagaggaagaggaggcgggcgcgagcgcacgtcggcgagagtgagggggacgggaggggattcagcagcggtggccgacggcgacgggaatcgccatcgcggagtagccgggaagggaggtggctcattatatgaggggcgcaagggtttggagagactgcgcgagtgcgaggtagggacgcagggtgtgggccggtgtggcccgatccaagccgtttcgcaagtggaccggttcgcaagtgtaaccggtgcatttaaaaaaaaaggaataagttcaccggagattactcaagttaccagcaagatttttttaagtcctttaaccataaaatcagaaatcttcacccctaaactatacaaaacggtctaatttaggtcccatgatagtatatatgcctggtttcgctgatgtggcatcatagttagcaaaaataataaaataaaaatgcggggcccacatgtcagtgagagaaaataatttgggccccgcttctccattttcctttatttttctcttctcttctcaacttctcacgcgcaggcgggcagatgcgggtgtgcggccgacggcggagcgggcgcggcggcgagcgcagcgggcgctgcggcgcgcggggaagaagcgggagagggggagtggaggcggccggcgccagagaaggggagagagtcggccggcgtgaccgcctctccccatccggagatgcggcggagctgccccaatggtggagcctctatagtctctcccctccaccacccgccgcgatgtcttccgctgctccgccgctgccgcgctcaccggcggcgacgcccgactcgacggcgtcaactgcccggacgcgcgtggtccgtgcgccctcacgaccgccgcgggcgccacgccgccggagtgggcggagcgccgccccgccgtgtccgtggactacgaccggggccagcgcgaggcccgcgccgaggtggagggcgtgggcgccgtggcgttccccgcgcgccaccgcctgcgcgtggaggggagccggtggcagcgggactggaaggtgttggaggccgccgcgcgcgtgctcgcgatcccgcgcgccgaggccggcgctgtcgacgccgtgctcaactgctgggccggccgcttcgcccgcggcaacttccctctcctcatccgcgtaagggcatcatcccacgctctgaagtatttcatgaattgaattgctgtgatatacatcgatgtggttgccatggttgcgttcttatgatttgccatcacgcaagttatcgattgcttgaaattacgaaaagcgtcaacaattctatcaatctagctgtgttgttcattcaacagccgactccgctctcagccgctgccgcggcgactgctgtatctctccccactgcgccggaagccgcgcccgctccgccgtcaccgcacacccacgtctacccgcgtgtgagaagttgagaagagaagagaaaaagaaaagaaaaaaagagatgtgggcccacatcattttctctcactgacatgtactgacatgtgggccctcacatatttattctattatttttttctaactaggataccacgtcagcaaaaccaaaaccagacatatatactgccttaggacctaaattagacggttttgtatagtataggggtgaaattttctaattttgtggttaagggacctcaaaaaacctcgctgttaagttgagggacctccggtgaatttattccccaaaaaaaacaccacggacggaaaattagcgcagcgattagctcgtatggatgaaaaattagtgcggattaacagtcgaaaaattttgtgacgattggaaagttgcagattttttaattagttaagattattactagcaaagatgtccgtgcgttacaacatatgaaattaaatttattttctatgtgtactttgtgttgtgcaccaaaaaataagtagggccatgtttagatccgaaatatttcttcaaacttccaacttttccatcacatcaaaactttcctacacacacaaacttccaacttttccgtcacatcatttcaatttcagccacactttcaattttagcgtgaactaaacacaccctaggttcaatagggcaaacctcaaccatggcggtgccgcggcggagggagcaaaaggaatactaatgagtgggtacgcacacccctattcagatcgggggctgccttgcttggccctactaagcacaccagcttgcttggccctactaagcacaccagctccccatccaaaaccatcctcattcattcttgagtaaatttcacaaaactacatgttttatggttcaagttgtagaaaaccacatacattttgacacttgccacttaagtacatatattttgggagtttagtttcacaaaaccacactatcgatgaatggattcacccgtgatatgatgtg

SEQ ID NO: 9432 - DNA, 44558 bp, Oryza sativa
caaaatcccttatattatgggacggagtacaaaaatgactatgcaatagaattgtacatactgcttgcatttcttgtgtgtatctgctggtcatctcagtgaactttgccaaaacctgtgaatctcggaatatgaaaaatgttgacagctgacgcccagtgcatagaaagaatgtgagggaaaacaaggggaaaggcagcaaccacatacttctctgtactcggtctcaaatttggatagctctgctcgttttgtgagtatctttgcctcaacactctggagcttctccttttcagcagggaaagattcaccacatacaacctctatagtatagttcacacttctgaagaaattgtcacctgagtgaagcgtagagtttaaggggattcgtactgtcttaagtaattgacactgcaccaacaaacaaagtgattaccatagacagcaaagaagtgtgtgcctggttttagttcatttatatcacatggttggaagctgtccaatcttttaaagaaggcactatcaggatcctttgcagcagctgcctgaaattaaaaggaacttgtgagaaatgaatcacagagaagcacttggaggattcaacaacgatgacacatatgtaaactcaccaggttgttttgttcaaaacgatacacaggaaagccaagaaaatacatcccagcagaagtaaccttcccagtctttacactgtcttcctgcgaaaggttgtgcagatggaacaagagaaaacaaacttaagccacttgcatattgcatgaagcaaaggttgtcaaagcaaaaacatattcaccggtttgctcattacatggtgttacagtttaatagcgaattcaatagacaagagtataggactactcaaacttgtttgtgaatctgcaggactgacaactatgcagcattttatattgctacatagttgaaactatgataattttgcagataataagctaacttttaagtcatttttgcacacacaatgtttaaatagcgagaccaatttcttagtaatggatagtttagatagggattgcgcgcaaccccttgaggtaggcagggttttaatctctatccaaaacctctacatgctcagatgtaaagctgattaaatttatgtgcagaagaacaggattctggcactcttacctgcaaagcaaggctcaggccaccattttcttcaagctcaaagtaaagcaactgaaattgtatgcaagaataacaatgttaagggtctaagtaaaggaaaaggacattaaaccaagagaattttatgtattcaatcaatagtattgaataaatgttttacatgctaagcattgtgtgactcaactttatcaaagccatgagataacaggataaacaaaagctgacataattattacagaaacacatgtggatgatgcatgttgtattccatcatttaaactgccagatcaaaataatttcattatcagagccctctcaaagaacccttccaaaagtgaatacaacaaaacaatatttttttgtaccataggtgtgattattctatatatgcagcacagccagtacttattgatcacacagaacatgcatttaaaggacaggttaccattgtttattactccctccgtttcatattataagtcatttgacttttttcctagtcaagtttgactaagttcatagaaaaaattagcaacattcaaaataccaaactagtttcacaaaatctaacattgaatatattttgataatatgtttattttgtgttgaatatactaatatatttttctataaacttggtcaaacttgattagaaaaaaagtcaaacgacttataatatgaaacagagggagtactatatgtcaaaagtaaatcatctaaatttcaccaactgaagggcaaattttctcattgtcaaacaaggatagcttcactacgcaggataaatgtacacaacttgaacaagtctagatcaaaataaattaaaacagaactgacaacaccagaaccgcatgaaatgtacttacgaaacacaggttacatgataaaacatttgctaacaaaaaccaaccttaaatttgcttctatcagttgatttcacacgacaaactaaccccattttagcttccttttctgttatgtcaacagaataaaaatgagctgattgcttttccacctggccacatgcagctttcaattatttagttgctaacatcaagaaaagaagcattggatgatggacagctagttgccattacctaccttcctgtgaacagagtttccaagctggagctgagaaaccataaccgatccattcaatgcctcctctaaaactgttgctgatacggttgtctttatcggcacaccaagtttgctgcacatacgtacgcacagttaagaagaaaaaaaaagcagcataacaagctagtagcaaacagtaaaagaaatataacatcagtaaaatgtttttacctgaaaagagcagcaaacacggtgttcacggtattgagactcgataggtccagctccaattcctggctatcggcttcgatggcctgaacaaattgcaccagttgccataacatggtagattaaaaattaccagttcatgcaagaactaacctcaaatcctgatgtgtcgtactgccgcctcttatcgggatctgacaggatgttgtaggagaatgtgacttcctggaacatgtctgatgcaacaggatcatcgccattcttgtccgggtggtacctgcctcaatttgcaaggaaaacttctgaaaccattgcaacattgatagcaaagcaaaaaaagaagaaccaatctccacacaagaatggctagcaagattaaatgcgcccccaaatccctccaaaagttcactaaacagtaaataagctcctataatttatcttatctcgcacgaattcccgcgagacgcgttcatctaggactaggatgccagaaggatcgaatgagggggccgaatctgagggtgaggcggggagtgctcacttgagcgccatgcggcggaaggcgctcttgatctcctggtcggtggcgttgcgccccacgccgagcacctcgtacgggtccctcctctgcgccgccgtggcggccgggtcccccttctccgacttgaacgacccgaacctcgaacccgccatggcctccgcctcctccctgacctctcctccgccgccgcgtcaacccctcccggctcttcacagcagcaacagcaacagccgcgtcgcgctcggatctcgcgccgagcggtggggggcggcagtggctgctgcgctgttgcggccggggcagtaggcgcaggctcaccgccccctcatccccgtcgcggcgaagacctccgccccttctggctcgcgccgtagcagcggaggcggaggcggagtggaaggcaaggggaagccgcgcccgcgcggcggtggcgtgaggtggcggcgcgacgcgacgcggcggcgagcgaggccggcgaaaatgggaggagggaggcgtgggagtgaggtggtggtggtggggggaagaggtggcatagtaggtgtacctcgtggtggggccgtggggcccgcagctcagtgggtgttggtgtagtgtgggccccgtcagttgtagccattcgctgtacacgtgacagcggttggcctggccttggccttgtggccttgtgggggcacgcctgtcagtgatagcggccattattctctactagagtatatatttttctctttgaaacattagagcaagtttaatagtatagccaactactaactctaattcatctataaccaatctaatagctcattcatacaatagttatatactccctctatctcaaaatgtttgacgccgttgacttttttaaatatgtttgaccgttcgtcttattcaaaaaatttaagtaattattaattcttttcctatcatttgatttattgttaaatatatttttatgtttacatatagttttacatatttcacataagtttttgaataagacgaacggtcaaacatattttaaaaagtcaacgacgttaaacatttagggaaggaggtagtactacactattaatatctggtcccacatgtcatatacatactatgtcttggagtccgtgctatatttggctacaaatctatagcccactgcttttctctcttcttatttatctctttataatatgtttgtagctagcttgtagcctgctattgtacctgctcttaggtacatctaggagtactccatatctttgatgttagtgatagcagctattagcctaataatctctctttttttttttctttttaactgttttgaaaagcaaagtcgttctctttcctctcctttaaagaaaggtttcaaaaaaactcaagtaaactgatccataaaaaaaccacccaaaaaacttatgatcccgttatagcatacttgtagtgatcctccaccatcacataaaaacatttttggtctcataaaatccgtaaaccttgataaacagatttctttaaaagccaaccatcgtaaaaagaccgaacaacccaccattgcaactcatgcttcatctctcctggagttgaagcccaaccaaacagtttcagctccacataaactaggagcgaagttggatggaacactatcacaaaatgaactagagaagtggagctaggtttagattgctccataactctactccagacccaacttctatagctaaatttagaagttggagctctaccaaacagagccctataactacatactctctttgttttatattataaattagtttgattaaatacaaaatattttaataatatgtttgttttgtgttagaaatgctatctttttttatgaatttgaaacttaaataaattgaacttgagaaaaggtgaaagtgactcgtaatatgatgaaacagaggaagcatttatgcgaagtgagcgttccgattagatttcttgtggtgaaaccaacccactcagattcaacttagacacaggtgctcggctattttgcggtaggcgacgtatccgtcgataacaaggcacccgtggtgactttgtaaatctcaagatatatcggttcagtcttctggctatgctcataggggtaggatgtgcgtgtgtgtattcataggaggtgagtgtacgcgtgttgtaagcgtcttcgattgcatattgttttaaaaaaaacggaggaggtatgtatgaagtttcagttgccctctcgcccctggcatgtggggcccgtgtttttgattgatgagccgggcccaatgaggctgttgccgaccggagtgactccttttgttgcatttgcacggttgctcacgcctttagactttatcaaatgatgatacttaataagcaaacataagtagtgaacgcttacatgttcttgtagtttaaaactgtcatgatctgttaaagtttatgttttaggctgcagcttatatagacagagacaatgtaatagtaccgttgttaggtaacatcatcacggttttctttatgcgaggataacaccaaaagctttagacctaacctaaccacttccgtcaaagaaatgacaccaccccataaatttctttgggcttgagctaaataaattagcccagtgaataggcttcagatcacaccactgattctcgaaaaaccgctgagtagcagaagtgagatttttttagaaaaaactccgagaaaatggtcaatttatcatattattttcattttaattacgctctagcctacttacttagcgggtcaaccgatcaatttccctaaagttaacgatttcttaggtttgggacttttgagctaaacagattttaagcatttggggattattcttagaatctgtttggaatgcattttttgctacggcttataagcgaagatacgttgcaacctccatgaattctattcttatatattatgttcatgtaataaaatcagctgtgttgctatatatttttgtgtacatgtgtactcactaactttagttttgtgctttacaatttcattttcactgaattagatggatagtataaatatatgataaaatgtttcttcgaaagaaaatccaatttcaccttgtcgcatcgcattattttcttgctgtctatactcattacatagagatgacattaacaccatcaatttaaaatcctagatctgaccctcgtagtttatactttataggcctacccctccgtctcaaaataattcaaaggttgagttattttggaacgaagagagtacacgagtatgactggtcgatccaaatacttcaaaactataagttaagacacgtgatctaggatttgaggcaacgaaaactaattttaggatatgacttatacttttacgtttaacattttcaaaagtcatggctgaaaaaagaaaaacactaaagttaattctaaaattaaaatttggctatggatcattagagcttaagctatattgacaggcgcgatgttactacagctcctttagttgatgacatgatcaatatttgaagctaagaccatagctaatcatgatctatttcctcgatttgtactgttaaggtgcagaaaaacgtgcatacaacattagaccactatagcattatttactgtagctacatatattgccgatcgaacggtgtacgtgcaccccaatgcacgggcgatgcgatttactgtagctgcatctattgctgatcgaaaggtgtacgtgcatcctaatgcacggacactgtaaaacctccgtagatagttgctacggcagaggatccatttccaattgatcaaggatatatgacagttgtttaaaaaaagatatatgatggatgcaggtcctctagaatgctagatacatatgagcctcataaatcctcgagcctatatatacaagtgagcactactacatactccctccatcccaaaaaaagataaaccttgagtttccgtgtccaactttaactgtccgtcttatatgaaatttttttataattcgtatttttattgttgttagatgataaaaatgattaagggcccctttgaatcgcatggtagaaaaaacggaggaataggaaaaacacaggattctgacaggaattgaagtgtaaaacagaggattgcaaaacacaagaaaaacacaagaatggtcgtttgattggagcacaagaaaaacacaggaatcggatgagagagatagactcaaaggaaatttttcaagaggttggagctcttgctaaatttcctccaaaatccacatgcaatgtgccattccataggaatttcataggatttggaaagcttcaatcctttgaatcaaagggccaaataggaaaatttactataggatttgaatcctatgaaatttctacataaatcttttgattcaaaagggccctaatactttgtgcgtgacttgtctttttaatttttttaataattttttcaaataagacagatggtcaaacgttgagcacggaaaccagggtttatcttttttttggacggagggagtatgcaatactgcattaaataatactgtagaggatctagattgatattgtatttaacagtgccctgatgatgcccattaagtaggctcagtaagtcgctataaaacccacttaataatgtagttatatttataactctatttttactagtcaatcaaaaataaactactatttctgatgaaatttttttgacatttataataaaattcgatcatctatacccacaactagcgtatagggtcggcaaaaagtgcgagaagactttaccttttttttaagccacacaggcaagtcctcacacaagataaatacgagaattaaatacccttattatggaatatttcatcgctctatctctatgatatattaattaatagtaataacttctcttagaggctttaaaaatatatattaacttttttttaaaaaaaatccgttgcaatgcataggtattatgctagtacttttaaaattcagacaattaataatttcccaaatgcttagttctaaaacaaaacaaagggtatacgtagatttgctaaaaagtgctttcatgatcataaaacttagattttataaagttctacaaattgatggttggaatcttaaaagtttaaacagatcttttcctaaacattgaatatttatgacaagagggagtagtatgctagtttttttttttcagccagtggtacagcccacttgtatctctgttagcgttaagacagatcaataactgtaaaaggcacttgactttcactccagatgttcccattaagacaagcctctcaggttaacttgacagagtgcattgcaacctaaccaaagatcaaatcaaatgattcgcagtactaaacttcgtgtaaagcaagaagcaaactgcccagctgctccatcacatcacatggcagcacattgctctactccaaagcatacggtaccaaatgtgcatcaaggtccagtacgttgtcaatcaagattttcaaaagcgactacagttaagtttagtactgaaacctggttgcacaattgcccgtcccattggggcaggtggggtggcgagactcagatgggattgcactgatggtgaccgagaacatatgctgaatctaagtgacataccagaatctttagctcaccgtcagccactgcttgcctggaaatcacaagcctccttgtcaggcacaagacatcatgtgcaccagaaaagtcgaggatacctggtgcatacaattggttttggttgtggtctgttggtgcctttttctctgtttagcgcactttagagcaaaaatgttaggattcctttggtcagtgtaatcaatgagatatgtatcgattaagtcgatattcccccagtgttttgcttctcatccaaagttccaaactaaattccctagctagtgtcacttacatggtagaaatgagttcatatcatacaactgaagcctggaagctctctagtctctactgataaaacaagaaaccgaacctgaggtttccatcagatgagacatttcagcgcataaatccttttaccattagcattgttgggaggttatgacaccaccttcagaaaatatcaataaccacaaacaattcctacatttgcaaaagattatgtcatgaatgattgggtggagactggaacagcgattaggtatcatattttacatcattcagagtgcttttgccagtaagaaagtagctgcaagcaaggtcatatgattaacttacaatatcccaacacaataaagagggcatgattcccataggcaaataacacagtagaattttcattgaataaatttcatgacaccagaataaaacagcattgtaaaaactcagcatgttacccatgaagtataactctctttatttttgacataccaactataactctcttttaaacataggtacttccttaataagcaagaagcaagtaatagttgacctctctaggataaattttgggcctatattatgcactttaagatgtgcagcagaagtgtagtgcttacgaaaattctaaagttgagaaaccagctcatgatctaactttcgaataataaaacagctagttgaagaacatttactggagagcacaatatagttggcacgcagcatatacatatcatttcgaaatgggaccaagtagcttaccttggctattggcctattgcttcatcttttcttcagtgcaacaataacttgctagggggcacatagaatttgaaccggtggttttctggcctcctaactttttggaacatgattgacagagctttccatgagttacaaatagacaattcagatcaaattttagatcatcaggaattttgctgttcagatgaagatatgccctctctctgctagctgttgcaggaacccaaccaatagcgtttgtaatacggagtacctattatagaaatgtatgttattacatatacgccatacacactaaactgacttcttggtatggacaagaaccacataaagttacacatacatgagtatctactggaaaatcatccttctgaagatagaacatcagcacacacgccacctgtcataacatgcataattgcatatattagaaagatcatcagctatatgcacacttactcaagcagccaatatagtattaagcaagcaatcaaagagcgtaaaaagatattataaacattcacaagtaaggtcccttctttgatttgggaatgctgtttgaattccactgtcaatcataattgcaaaagtttccattgacaactccagccatgattgtaactaccacccttagtagaaggaaaatagttggacaattgcactccgaatacaagaatctagaagaagctccatgccattgcacggaggctaccaggcacctgtttctgttagccattcattgcaaagcaaaactggttgttggtgactaacacccatccataatcacacagcaatatttaagtataaccgacacaagcatatgatttcagtcacaagggcatactttctctaatttccttttcatacaacttagtaccaacactactgttagccaaaatactttgcaggcttttgcggaaacttgagttcaggctgtattaacttacatggcaacaagaaaagcaacttgctttgcttttgatcattatctaccatcatgcaaactacaactacttctcactagtcacattttatcaattcctcatccttcacaacaaaatcaatactagcattctctacattacgatgaaatccaacaggacgaaaaccaaattcgctgaagaaacaggagaagagagagatggaactcacagtctttggcccgatccctttgaaccgagatagctcagtcttcacctcatccacggacagatcccgcaaatactcgaggcaaatcttgcctcgcctctcccggacgcccctcagcatcgcccttatcctcgccgccttcgtcgccgcaagccccccgcaccggatggcgtcctccagcctcttcccctcctcctcatccaccacctccaaaaacgaaaacgaatcgcgcatcagaggacacgagggagcttctagaagcttcctggatgcggccaccaaacctggtcccaggtggggaacgcggccttgagggcggcgaaggcgcggcgcgagatggcgtcggtggtgttctgagagaggagggtcgtgacgaggccgtcgaggacggtgggcggcggagacggatcgccatccgtgtcctcctccgggtccggggatgtgtcgaggccgaggcggcggcggcggcggcggaagggcgcgaactcgtcggggaagccgtggaaggcgaggagggcgtcgcggacggcgaggcattgggcgggggaaggggaggggtggtcgtggtacggctccggcgagggcggaggcttccgcttgggcttccgggtcatctcgctggcctgcgcggcttggccggcggcgccgtggaggtggcggttgccggcgacgaggtgtggtgtgggcgtgtggccgtcaataggtgaacaaatgggccgaacgtcatggcccggcccagccacgattaggcatggctcctgtagcgggccgtaccgtgcaggcccatgtgctaaggcgtcggcccaagcacggtccatggaaaatacgggcagtgccggcacgggcccaaatatgacatgtgggccggtataggcccattatcacgtttggcccacagaatttgaatacgaggccgaaaaaagagaaataagataaaaaggaaaattaaaagaaaaaaaaagaaaggacctgtttactttgatgaaaaaaaccttaccaaaatttgccaaaaattttggcaggatttcttatatagttaccaaatttggtagcaaactaaatgtatccactattttggcaactttattaaaatttggtaaggttgaaaatgtcatcaaagtgaacaggcctaaaattatggggaaaaactagaaaaaatgacaaaaatagtgggaaaaagaaaagaacatatggaaaatttgggaaaatgagagaaaatagacaaaatatattttaaaaataggaaaaatggaaaaaacagatgaaaaattatggggaaaatttggtggggcgatcgaccatgcgatttttttcatttttaaatttatttttttaatatttacagaaatattatatcggcgaaaagatttacaaaaatagacactaatgctctccatttgggtggcaagctgacgtggcacacggacgcatgacggtctttttagggggctgcgaattttgggcgtggcccccttaccgccctctgtttgggcggcaagaggcctccgtgcaaaattcgcaagggcggcaaaggtctcatatgcaaaaagaaccatccaattgcttttttggcagcgcaaaaattgcatttagccccttaccgtccttacagagggctgcaaagagtctaaatgcaaaatgcgcacacgacaccgttacgacgccgtgtgccacgtcagcttgccacccaaatggagggcggaagggtctatttttgtaaatcaatccgccgatataatatttctgtaaatattaaacaaataaatttaaaaatgaaaaaattccgaccatgctcgtacttgggccgtagcgtgctagcccaatggaaatcgtgtcatcctgtgccagcccatggactcaagcgtcgctccaagcacgacacggctaaatgggtcgtgccggaacaacccacgagtggccgtgcttgggccgactatagtgctgtcttgtcaggccggtatgcctcggcccggtccatatggccacctagccgtgttggtggttggagtgggcaggtttgaggtgaggacgtcgaagagattgaagaaatgggccttgccgtgcttatgggccatgctgaaaagatgatcttggaccaaaacatgaagaatctctttttaaggcttgatcatgctttgtaatggtacatgcccttcccttataattaaagaatagttggttggacagattaggaataaagcacggcctacacctatataattggggattgactggatgggtggattgagaagaaagtaacaatactgcgatggttaagcccaataaaaaggaggacacggtaagaagggaacaaaagcaggaagataaatgtagttccccctgctttgagaaaagagaaaaattattgtacgggataccgtccgaacggaatagtttaatgaagtattctatgacttcctcgatacggacataagtcaacctgatttcgtgcacaatcatacctccagcgacacgcggacatgagcagctaagtgtgttgcaggcctgcaatcctcatgagtactcgtgggcacgtgacacgagcagacatgtcacaccagtatctgagttggtgacaatacaatatgataaagctaggcaaatcagtgtatttatgggtgcatgttcacactgagaagacatgggactttaatagtatttttttaatcgttcgtctctttggaaattgtgctgttctcattccatgaattgtacaagaccatatcccgtttggacagaaatatgtatcagttcttgatatcttttaggtatcatgacctaatatctaactggtatcaggtgatacctctcaagtattacttgatacttggtagaaatcgcgtggtacctaattggaatcatccgatacctgatgagtatcaccgtttggatagaaatatgtatcgggtagtcctaataccagtttctgatacctgataagtatcaccatttggacggaaatatgtatcctgtcttgatacctaaccggtattaggtgatacctatcaggtatcgagtgatacctcgcaagtattatatgatactcggtagaaatagcgtgatacctgattggaatcgtctgatacctaataagtatcaccgtttggataaaaacatgtatcaggttctgatatttttcaagtatcatgtcctgatacctaaccggtatcaggtgatatctatcaagtggtacctcacaagtattacctgatacctggtagaaatcgcgtgaaacctgattggaatcgtctgatacatgataaatatcaccggtgatatctcacaagtatcatatgatacctattagaaatcgtctcaatctagttagtactagtagaatagcgtggtaataaaatagttgatgatgcactacacatgcttgttctgacctacaaactcaaggagaagcgctagatacacgtgggggccaaccattaattcctatgtgcagatttttgtgaaagccatgcatattgatacgtcaggctagccgagtccatctttgatccttatccatatcttgctcggggaggtggaggtgtcatttaattatcctgttcggacggaatgccgtgcactagactccctcttgagaaaaccaaactacccattcaggcaggcttcgcatcctctgccgttccaactggaacggcagagagctacagtgccatgcctttgggggcatttatacccgttggatcaagttttggatgcaagagtttaaacactacagtaacgatgaaaataattaatatatatttttcactgtagctacagtattttccactgtagagactgcacggcactgtagcttccctcacgtttaactgtgcgcctttgccgttctccccccaacggcagaggatgggaacccatttaggcaagactagattgcggtcgacatcttttgcttcaaactttattttggaccattgaaaaaaaagtatattttggaccattctttacttaatattttcatttttagaatttatcattattgtactttagacggaccatctcaactcttttatcaatcggcatccaacatcttctccacgtgggcataaggcacacatgggagagttccttggtgtgcaagagctgctgtgtttgaggttcttgatgtgttagagttggagaaaaataaaagttagggtggtccaaagtataattgagtctgcactctggaccatctgagccgaagacggaaggtatgaaccattgaaagcaccgtcggcccttgccacgaaccaaccctgatttccactcttgggccgcttagtaatgctcaattgcttttgagcacgcctaaccggctatgattatatatttttcaactagtgcttgtctaaactcaaaagatcactcattagaagattaatagtgttgagaaaaagtccattttactcctttagactatctccttgaagaacttaacctcctaaataatttctcagcttattttacaccgagaattattgaaaatggttcacttacttcgtaatagtatttcctgttgtattcttcaactccaaacttcaacttcctcattttccgttagcacatttttcaaattgttaaatgatgtgtattttaaaaaatagtttctatataaaagttgttttcaaaaaagcaactaaatctatttttcaaatttataatagttaatacttaattaatcatgtgctaatgaggtttctcgttttgcaatgaaatttagcaggaggattgatagatgtgttataacttacctctcaacaaattttctttagaaatgctttatcattgtttatatatgttgaaagcgtctgagactggtttaaacatcgagatttccgaatagtcatgataacttttgaaactattttggtattctgatatggtgttatttatggctctataaaatttcagcttaaaatatcactcgcataaagagaaacaaagaggagaactgttattaaagtaaagtgaacatttttaatagtttagtggtaaaatgagaaaaaaatatatttttagtggttaaatgattcaatgaaatagtttggagaagtaaaataattttttttattagtgtttcttgaatattcgacttcttttttacgttgaatgtaagacatgatttgatcacgtcaatatggattatcaaaaaaaagaaaaactatagctatgaatttaggagattcgaaattgttgtagctaggtcgacatggcgctcgagaactttgttcatgaagctatatctagctagccttgcacctttaatttctcggtactgaccaattcatttcttgcctttccagcgcattcaaaaaccagaaggatagtactgatactgatgctggagtattatttgaacctttcccgcagctcaacccattctcctttctcatctcgaaaacaaaaagacagggcaaaaaggaaaagcgatgaatctacaggttgaactttgccgtgcttttgctcctctcttctctttcatggagtaaataaagcactgaagaattttgaactctgaactatgctaaacaaaatgttctttctcatctctgaataaagcagtgaagtttgtacaaaaatcagaaatctgtctgattacacactggctaggatcattagctgccccattcttggcatcgtccgcagcagcatcagatacgtaattccagctggtagcaacctacaggctcatgagctgtaccagaaattctctctcgagggagagaggagcagcaaactaaattggaacacgaaagtcaagaaattcttataaacaacagtgctccattcagacagcaaattagttgagcttaataagttagcgttatcttaatcactgggacacatcccgtattttccgtatcagtctggcatcatctcgtccagcagataagaaaaacgccattgacattctctatgttgacccaagtattgggaggaagctatgaagccaattattgcagttcttctagctaatagctatacatgggtatttctgcatacataatatgtttttgtacatgtgcatttctgaagttcttcgttgtagattcagtattgcaaaatcttagtacatgtgtaatttttgcatacataatatgatttgtgttggtaagttgcttcatatttttcttgaagctttgtgtgtgtgtgtgtgtgtgtgtgtgttggatttaccccaaatttgacgttgattcaatagtactgtatgttctttaaatattgtcagttattcttgagaaaagaaaacactctccttaaacatagacagctccaaggtacaactaactgataaaatgctatttaatcggcatcatcagagagagccaacacatagatctcgccacgataagttgccggatcaaaacttcaaaagaacattatatttttatgagccagcaaggaacagaattcagaatctgtctgttgatcataaacaaatcgagagagatcagagcagtaccaattcctatttcctaagccacaaatcccaaattattttaaccaaagagcagccaactcagcacatcttttgtcaacgagaagcctattagccttgtcttatccgtcattagaaaaaaaaagttccatcatgctgttctaaacaacgatttgctctcttctctgtgccgtaccaccattagctgctcgatcgagacaagtgtaaaacgcacactaataattctacatgacctcctaacaaccgtgtgtttgtgcagaaatgatcaaacaatatcacacgattcaactctctccatgtggcaggatgactggatccaacctgataggtgacagcagcaaccgttaattggtgaggtcagtgctgattgctgaacaaatcgtactgtaaaataattttccgagaacagctgtttcagaacttcagagatcttcaggccagtaggtaggccaatctctttcctccacagatcatgccacaagttgtctcttactagtagtaaacattgttcagagatctttaattaatctctcatcctggtgcagttaatagtcatttccatgccttaattacgaggggagctatcaaggaaagaggcgtgacactgacactagcacagacaatgacactgaagccaggctgaggcacagttactgaatgggatccggattccctatcttaagttacacaacttttacatagcaaagtatagagaaaattttcctgggtacccgtgaaacttcacctaatcccttttatgcccctgagatttgttcattccctatcatacccttaaatttcagtttggatcccttttataccccttccattagttgaccgttagttgacagttaaatttatattataaagcccattttgccttttgatataagaaaatataaatttatgaagtatattgatggagggtataaatttattgtatgcgactattatatgcataagtttattttgtgagatattatttaacaaaagtaatattttagtttcgcatcgcaaagggaaaacaaaataatttttatctatgataaaatctattttagataaaacaaaaaaataatattctttaccattgaaaacggtatatataacatattttgttatactagtacggatttttaaaagataaatcttgttatgcgagataaaagttatttttgttaaataatatctcacaaataaactcataaatataatagccgcatacaataaatttatacactctatcaatatacctcataaatttatattttattgataccaaaaggtaaaatggactttatgatatgaatttaatggtcaactaacaatcaactgacgggaggggtatagaagggatccaaactgaaatttagggacatggaagggaatgagcaaatctcataggtatagaagtgattgggcgaactttccgagatacacagagaattttctccaaagtatacctacatgtcaatagctatatgttcacctatctaagatcacgttctatatcatactttcctaacttttccaaacttgtttttcgtgtgtatgcttctcaaacatttaaacaatacatttttaaaacttcttttataagaaagttgcttaaaaggtcatatcaaccattttctaattttaactaatacttaattaattatgcgttaatccgctgctccatttttcttgcgggaagaaaatgtttctaaccttttcaaaagaacaaaaccttaagcaaagcgagcctaactcaactgattagattccttgtgatgaaacttgctcactcgggtatataccaaacacgggtgcccacccatgttcaagtagacttgacataagtgctcacatttacaactagtttttttttcacgacgtactcgttgacatcaagacatataaagtgactttattaatctcaagatatgccgcctaattttatgagcacatactattgtactacgttttttttaaaaaaacacagccttagggcgaaggatcttgttccgacttaatgatgtggtagcgccaaaagattaccttagaggctagtagtatatagatgtgtcgatcttgccttacaaaagatcactgcaaagcagatcgccgtgcgcctgtgtgtgctttgcttgcctggattctttgcctgtaacctgatcctgtcgcaaagacacagcttaagtagttaagtgtaagcatactttgcagttttgagccatcactccactcgcaaaaagtggccaaaaggagatcgagaaatttaaaaaaggcaaagctagtttaaaatcgaagggaattgtttgaccgattttgtttggatcatatggattctttgatgcttttctcccaggacgtgccttccatgccataagctcagcctcagctgtcgctaaattctatcgctatcaaagagctcgtgcacaacaattcgtttacggacagaagcaactgctagtttttatttctattttttaatttttgcccagctgctagtagaatatatatggaataatggaggttttcagtttccagttatgaaaaaaaaaactttacgtcataatacgaacaaggcctagctgttgcattatgttactggaaggtatttttggaagttgcaacaagtcacgatatcacataaatttgcatgttcccttatcttagatgaaatttaccatttgctagtgaaccaaaattctgtctaaaacaaagtgaacgtaacttgattggttagcctcgttatggtgtgcaacttagggcctgtatagatccactggcaaaatttttcaccctgtcacatcgaatgtttgatacatgtatggagtattaaatataaacgaaaaataactaattacacagcctgcgtgtaaattgtgagacgaatcttttaagcctaattgctacatgatttgacagtataatactaccgtaaccatttgctaatgatggattaattatgcttaataaattcgtctcgcagttcataggcgaaatctgtaatttattttattattagtctacgcttaatactttaaatatgtgtccgtctattcgatacgacaagctaaattttttttacccctaatctaaacaccgccttattatccccctttgagttttcaacccatcataatcgtatgggtgatttgcgcgtgcgaatatgagcgtaatttttttgggactgtatttaaaaaggattttttttgttaaaaagcatttttgtaagaattttttttgttactagaagtattccagctaaaaaagtcatcgtctcccaaatggcgcgtcttgaaacgctgtagcgattggcgttggcgaccaccacaagtagccgtcgctacaaaccacggtgcgcagcgcatccaagcaaacaaaccaatcacacgagacgcagccgacgaacgcgtccatggccaccgcctggccacggtggcggccgtcctcgccgccgatgccgtcctcgtcgtcgtcgtcgccgtcgtcgtcgttcacggcggacccgccggcggagttcctctgcccgatctccgggacgctgatggcggacccggtggtcgtcccgccggggcagacgttcgagcgcgcctgcatccaggcgtgcgccgcgctcgccttctccccgccggccgtcgccgccgacctctcctccctcccgccctccgcctcctcccctctcgtcctcgtccccaacgtcgcgctccgcaccgccatactcaactggtgcgaccgcctctccctcccctaccccgcccctctctcccccgacaccgcgcgcgacgtcgtccgccgtctcatgccctcgccaccgcctcccccgccgaggtcgcaggcgccgccgcccccgccgccggcctcctccgtccggacgaggagctactacagcgacgacctcgtgcagcagcagcaggaggcgaggcgggagggtgggtctacggaggagaggatcatggccatgctcggcgctggccccgcggagcaggaggcggcgatggcgttgctgcggaagatggcgcgggagaacagggagatgcggagggagctctgcacgccgcggctcctcgccgcgctccgcccgatgctgctgtccggggacgccggggtccaggtcaacgcggcggcggcgctggtcaacctgtcgctggaggcggagaacaaggtgcggatcgtgcggtccggggcggtgtcgccgctggtggaggtgctccgcagcggccacccggaggcgcgggatcacgccgcgggcgccgtatacagcctcgccgtggaggacgagaaccgcgcggccatcggcgtgctcggcgcgatcccgccgctcctggagctcttcgcgtgcgccggcgccgcccacctcgcccgccgcgaggccggcatggcgctgtaccacgtctccctctccgggatgaaccggtccaagatcgcgcgcacgccgggggtggtgcggacgctgctcgccgcggcggaggcggcgagggacgaccgcgccaacgaggccgacgccgccgccctccgcaggatcgccgtgatgatcctcgcgaacctcgccggctgcccggacgggaggaccgcgctgatggacggcggcgcggtggccgccgtggtgaggctgatgagcagcggctccgccgcgccggggagcgcggaggaggagtactgcatctcgtcgctgtacgggatgagccgggggagcctgaggttccgagggctcgcgcgcgccgccggcgtcgaggccgcgctcacgccggtggccgagggcgccggcggcgtgggccgggacatggcgcggcggacgctccgggcgatgcgcggggaggacgacgaggcggcggtcacggccacggggctgctcggccggcagtgggacgacgggagcgtcgtgtcggaggggctcgtgtcgatccggcggccgccgccgcgccggagcagctacggcgccggggcgtccgggtcaaacaccacgcagttctgaaaagtcaaagtcttcgcttctcttcttttatttctttcttttttatttctttttttttttgctggctcttgttgaagtatttggaactgtatttgccataggccccaaaaaatctggtggttaactacttctgatgaatggtgttggtgtaattggatggtggattcttttgttggaattaagctgtaatttaattggatctttgcacatgttaaattctttatgactgaatagtggaacctagaactgtgacacctatccaaattaggtctgtacattaatccatcggttctcttagaaggtatgtatgtatgtatgtgttactgggatttctgagttctttttcctgttcttgtgaaatatttgggatgtcggtgttctttttttctaaaaataatatttggaagttgtagcatgtaaaaattctcagaatgcatctacttgtttagcttccatgattgagtttgattagcacgagatggtttcatctacggtttacgattccgagatggccttccgtttcgggatctggcggaattacggttttcgcgaaattcggtgtaaagccggtagattctgaataaatttcataaaccaaaatttgaatacaaattctctgagtttacggataagcttgcgaaaaccggtcggctttgacgaaattccgagtgaaatcatcgaaatttcaatcggtaactagaaaaagaggtaaactgaaagtgttcccctctttttaattcattattattttatttcccattataaatttcactaaatacatggaatacatcattttttaaaataatatatcccaataggttctatgaatatcatactatttataagattttatttattttttcctttttatcaattcaaatttgaatttgatgaaacttatcaaaatctcagacggcttctactttcgagcctcgtcgaaatttcgaaatttcgcggaattcgaccggttttcgtcgaaattgtgaaccctggtttcagctgaagttcggaaacaagtatcatctcagcatttcatggttgtcaccaactacaaattaaattttacattagaaaccataatatttctcggtatcttctcaaccaatgcaaactcaattaatgctgtgtttagttccatcaaatatatggacacacatttaaagtgttaaatgtaatctaataataaaacaaattacataaaccgtatgtaaactgcgagacaaatttattaagcctaattaatatgtcattagcaaatatttactgtatcaccacattatcatatcatggtgcaattagacttaaaagattcgtctcgcaatttacacgcaaattgtgtaattagtttttttttcaatatttaatactctgtacatgtgttcaaacatttgatgtgacggggaaaaaaatttgccagtggatctaaacaccctataacaaatagtatgcgacagtgcaaaacttttgatatgtcgggtgtgttcttaaggtaaggttgggaaccttccgtcctagcatgaaaaacgaaacagtagattagtgcatgattaattaagttgttaactaaaattttaaaaataaattaatataatttttaaagaaactttcatataaattttttaacgaaaaacacaccgtttagcaattcggaaagcgtgcgtgtaaaaaatgagaaggtaaagttgggaaccttaagagacgaacacggttctagaactcttttcattggataaactttgacaaacaaactgtttaaagcgctgttaccaaagctagtcctcattttgaatgcatcattcttttcccaaattacatgtaaataaaacagagttcatgtggaaccctataaaatccttatattccaaaagcctagaagtagaatttaaggcaataccattccttcttccttcgactcttcacttctccagaagaggtcaactcttggcactctggcaatgtcttcaccacatctcagctcatcgaaccgttccacacaacagctacttgcgtaaatcccccatttgacataagcaaagactataaatccagcacgtaactgcgcgtaatcaacagcataataataaattaattgtaaccagttgtaggcattcataatcctaattggctcggataatgaagtatgacccattgagttacacattttaccttggttttttagcacattttttaatactaaactatacattttgtgagaaaattttctatataaaaattgttttaaaatattatataaattcattggtcaagtttaaaataattaaacctcaacatcagtgactcttattttatgcgttggtacttaatcttccgtccgtcataggttcgaatgtggcctatacattttcattgatccatgagatcttccatttcttatgaagttaaattaagggtgaatagccaattcaattttgaacttttgctcacggatcaaattagttcatggtgttttgtattgtccaaacaaatctctaaagattgtcatgtgactaaatatagccattggacacacttgacatgtcacatcattcatgcatgtacagtcaatatttaagggcctatttggactgatgttattttcaatcatatcattttttttataaagttaccaaaaaatgcctatatttagtttgttgccaaacttaatttggtaaacacgtaagaaatcatgacaaaattttggtaatattggcaacttgccaaaatgttatcagtaggtttattttggctacaatctgaacaaaccctaaatatccattttacccttacattttcttttaaaaaagagaaaaaaaagaaaaaacatgaagaaagcaatcataaaacaaaagaaaaataccacattctttagttaccaatgcaacatcttttttccaatggccaaatgcctttcttttactaattctttttatttatttcctacggagaatgtaagggtagctagatggatgtttcaaatgttgaatttgcatgcacgggtgatgcggcatgtagacgttgtatccaaggactatattaaataacataataaagtttagggacttatttggataatacgaaataccaaagactttatggatccttaagcgaaagtttaaggatcatgttgtttgttcacactttaattaataacactcattatttaatcaataaaaacaagaacaacaacaaccaaaaaaaaatcatcttgtaaaaagaaaatttccaaggctaccattcaaccagctgtccagattcaacttaaccctgtcctgtgagacgctctctaaccgccaaaacgaccagaccagtgtgtgcgcctcgccgttgacttgaccacgtgccatggcgggcgccgccgccgccgccgccgccaccccgccggaattcgtgtgcccgatctccggcgagctcatggccgacccggtgatcgtccccagcggcgagaccttcgagcgcggctgcgtcgaggcctgcgtggcgctgggcttcaccccggcggcgctgccactgtccgtggacctcgccgcctcgccgccaccggcgctcatcccgaacgccaacctcaggaaggccatctcctcctactgcgaccgcgtcggcttgccgcgtccgctcgccgtctcgccggaggaggcgaggggcattgtccgccacctcatggcgatgcgggagcctggtcgcgccgggggagtcaacggcgagcggttcgagtcgtcgtcgtcgtcctcgccggagttcgcggcgttggggttgaccttggaggaggctgttctggtgaggctgctcgacgacgagccgagccggcaggagggcgcgctggaggcgctgaagcagacgctgcgcggcggcgagaacggggtgaggcgcgcgctctgcacgccgcggctgctcgacgggctgcgccgcctgatggggtccggccacgagggcgtcagggtcagcgccgccgcgtgcgtggtcaacctctcgctggagccggcgaaccgggtgcagctggtgcgcgcggagctcgtgccggtgctcgtcgggctgctcgccgcggcgtccccggagctccgcgaccacgccgccggcgcggtgtacagcctctcgatcgaggagaggaaccggatcccgatcggcgtgctcggcgccgtcccgccgctgctgcgcctcctcgcgagcgccgccgacggcgaccgcgcgcggcgcgacgctggcatggcgctgtactacctctccctcgacgagatgaaccggtcgaggctcgcgaggtcggccggcgcggtggcggccctcgtcggcgccgcgggggacgccgcgctgcgccgcccggcgctgatggtcatggccaacctcgccggctgcggcgaggggagggaggcgctcatcgacggcggcgcggtggcggcggtggcggggctcatgcgccgcgccaccgtggcgccggggtccacggaggaggagtactgcctctcggcgctgcacgggatgagccgcggcaacgtccggttcggcgggctggcgcgcgccgcgggcgccggcgaggtgctccggcgcgtcgcggagggccccggcggcggggtgcggcgggacgtggcgtggcggacgctgcgcgccgtgggcggggtggccgccgccgccaccggcgagtctctgtacggcggcgaggacgccgccgccgccgcgccgtggatggacgacgtgagcgtcatgtcggaggccatggcgatgccgcagttcccgagacggctggtggagcacgcgcacgcgcacggggcgccgccgcggtcgaacaccacggcgctcgacaggctcaggcaagcgcccaacggctgacgtgtgggtcccagtgtcagtttcgtaccgtgctcgaacggtttgatctttttctcattttgcttaagaaatggtttgcttaaatttgtatatagtgtaaggaaattagattatttggtgatagtattgttgattccatatttcttgctaagcttgtatatacacatttccgttatgtgtgagaacaatttcttcgtatttatttacactgtatcatataccaatattgtcaggcatgtcccaaagtactggaatagacatattacatgtttcttttgctagtactatcttatcagatcaatggtcattgttggaataacaaattcagatcaattagagaagctcagtttccataaacaaacataataacgtttttattcaagatgaacaagatgtgttcacagtatgtaaatatgtacatagcatatataattaatttactgtttatctttacaacatacatataaacgtggtgcgtcgcttaggatgacttcagcaaggcccggttcctgcataaatcataattatgttaaaaaatggtttcttggcaatagatcagatgcacattgtaagttcatatctgcaagtttgttgtatactcacttctcatattcaaggtattcagtgggggatataggcttaggacccccaaaccaatcaatcaaaaatatgtttttgatttccaatttgaagatttggaaatgatgattctttggccaacctatcaaacagccatacatgaatgttgtcataaaataatcaccagttaatctcacattagtaaaagacacaaagaaatacttggatttaccctccatttcaggatgtttagtaaaaagtgcttctttggccaaatctgcttcagatgattgagggtcaatcaacttcaactgaaaacatgcaattcactggttccattacaacttagtaagtcaagaaatgatccaactatatcacatctatgtatggttcttatggctgagattaaatgaagtgcctatagcccctgctacttgcctacttcattgatctcacatgtcacaacagttttataaactataatttcttgatgaaatatcatctacataactttataaaccatgatttcttgaccatctgctgttttcttgctcacagtgaatccatgatagataatttgagaggggacggacacagttaggaacgtgggggaaaaaactataagacaatggagtatagttgttttgtctctcgatcatggttatcatattgtctactgagggtatctccacaacaactggaagactaggcgataacttggtcaccagtccacctagttgtgaagaaaacttgcaaagaacatgtaaaaattgagcctacaactacaatgccacaagctaaaccatccacaaggctccaaagttccaaaagcctgagctctcctgctgaagtctctcaacctctcatccccatgccaagaaattgaggcccaaaactataaagttgaaggcagacaaaacagtgataatgtttggttacgactcaagtccagcagtaagtattcactctacagcaatttataacttcaagctgaattaagtatgaattaataaaaagaaattaactactgtacattcttagaccagtcagcaccaagaaaaatagatataagaagataaccagatcagtcactaccaaagcaaaatagaaatagatagataaacagcaagtgaataatcatggtaccatggatgcaatttgtctgtacctttccagtaagagtaagttttgcacaagttgggttttcaggatcaatcttcccacatgtcccaagagggaactcgctaagggtaaaggaggtcctttcatcctccaatgcatctctcgcagtgggatctagcgttgtcagatagaagtaggggattccatggctctcacctggcactccatcactatatgaaactacattgctgtatgtacaggaagcagggaactaagttcagcaatcagaaagggtttgtaaccatgtgcgttggttgttttcaataccaaaacaagaaatattacccaaaaggagctccacttagatcacttgatattgtgctgcaaaaagaaattgcatatgtgagtgaacaatcagtggacatctagcagatacattattaaaagaaagtcaaaacaatatacaatagtgttttaaatagccaactgcactcgcgtaagtattttttgacagtgactgctacgctattgtagtatcatgtaaaaaccagcgaaggcagctatgacaactctgctaaatccactaaatgctgtaccgctactcaatcaattagtttttatcaatagttttattttgcctgcttaatttgaaatttgttttcttagaaatcaaagactatttagaatcttgaatatccttgttttcacctgaacaagtactaaaatattagttaagaaactttcatactttttatgacttttacaattaatttcaagtaatacatgacacatatgagtaacttatgctctaaataatatggggggaaaaagctatattgaccttgatgctaaaaccatagcttttcattactagataaaaatctgtctggtatatttgacctaatgatgtatgcagacattaaaacgtggccagaggtttccaacttcacaccaatttgaagaatattgtctatatttatttattttctttgcgaggaattttgatggaactgtaagttttcgttatccaattggcacagtaggacggcaatttagcaaaacacctattcaattgtaaatcatgacactgaatgtcacacaagtaagggaagagcaccaacaatttctcaatactaagcagcctcaggcgattagattactagccactaccaacacttggccgcgctaagaacccccaatttcgatcgagccacccattgtcatctcctaaagaaccgaggcatcaaccaatcagtccccccaaacagtaggggatcacgagcaagaagaaggcaaaggaattgggagggggacaacctgaggacgccccacgtgttctgggcggcgagccacctcgcggtggcggcggcctcggtgggggcgggcttgccgccggcggcggcgacgatggggcgggcggcgagggccggcagcggagggcggaaggcgaggaggagcgcggcgccgacggcgacgacgaggaggagggcggggggaagcatcaccggttttcttggtttggtttgtgtgctccgctcgatgggagactggaggaatcggaggatttttcccttcttcgtcaattgtgaattgtctcttccaaattttcttggttcttccggcggatagggttgttgtcgtctgaagcggcccggccggcgataggaacgtctcatagagatggaggagctgataagggtacagagaatcggagagagaaagactgattgatttgcaagcagtgtctttttgcttttggactttatagataaataaacatttcgaaaatagttgtatgtattttagaaacggacttgataaaaagatgtcgacactttttttggctgatctcagtcggttttgctatccgtctgatcgctaaacgtacgtataatatttacaagaaaaaccctccctcattttcagttacttttgaatggctcggattgatttaagattcatgcaactatagtgttttcaccttatactcttcttgacagaatgctcgttcactggatgtcgatgtcgcaacgtccgcctcccccgccctcaccggctggctagaaggcgccaacggcaccggcaagccccttcccctttcctcttctcctccttaagctagcggcagtaaagtgccccgtcccgccgtctttcctatctccgacagttccctatcattggttcccccaccatcgactatcgccttctaaccactcgcttcgctctggccctaccaccaacaccgacccaccgtgctcctccatccttgtggcttcggcaccaccgccgacgtctcaccacctgcccgtgtccactactcactatcgagccgctacctctcacggccatccctttaagcccggcgatctctccttctttctcatcccacccctaccccaacccaagacctcgtcactcgctagagcttcatcggagctagaggagaaggagttgggcacacgaatctccaagcaaatcggttggttcaaaatatatgagaaatatccctcgattttccgttaaataccatcggttggttcaaaatatatgagaaatatctctcgatttttcgttaaatgccatttagcaattacgtgtttagaaaacagttaataaccctaggccttgtaacacttgggcatagcccaagattgggaaattaaagaccactatggacggaaagattgtggtaaattactcatgtatattaagcctactggaatatatcatttaccattgtgttagagagagaaatgtataatatttgcccatctcgtctgttatccgtttttgctatctcttctctcgtgtaagtgaaccatacctcctaattacattgaatcagagtaactgatgtatcaacaacatgttagtgagagcaaaacctttatgcaaagattagcggcaatgttggcggcatgataaaaatccaatgatttgatgaattctgtgagcaaaacacggtcgcatgtgcccatatggcaactaggctcctagtgtttgtccggatggatagccgggcaataagaggacattcttcacaactttcgatccatgtcttgctccatctagatcaagtggtggttcccatgctcttgaggaatggtgtagagtatcatgacgaagcttatcttccttggtgctaggaagatggaacatattacgaagctccagagtccggcaagatatatcaccgcatatcctattcttcatcgagtcacaacattggcaaatccaagcatgggagttcaaatctaatggcggggggctcatgatgaacagatcgaatgaacaccaaagagctcgaagccaagtagatcttgggacggtacaacttaccagcatctggcatacttcctccatgatcaccctgcccaccatcatgtgtagatgaaaaggaaagattggggaaagagagaaaatggaagaggaatatggggtttgtttgtagcaaaatatttcgatacaaatatctctctctaactcaatagaaaataatattttaatgggctcagtatgcacccaacaaattttcattatctttcagcaaatccaaaattttgcaatgtctaccggcaaaagccatgtcctgtaacaaatttttactatactaaagttcattgtaatgtttttgaatatgcataggcatattccacagaccggcctatagcttggctcaaagctaagggctcttctaagttctaaccctataggcttcttgttggtctttgcatgcttcaattcatttgatgagtggattatagtggtatctttggtaccgtatcatctgaccacattcagttcctaccgcctatggaagggttccagaaacccaaaactttagacttcagtccaactctctagctgctccaaaagccactcccatttcagctaaggagtactcttatagatttagggggtggttagatgcaggggtgtaaaattttagcgtgtcacctcatgtattatatagggtgtcgcaaagggtgttcgggcactaataaaaaaactaattacagaatccgtcagtaaaccgcgagacgaattaattattaagcctaaataatctgtcattagcaaatatttaccgtagcaccacgttgttaaatcatagagtaaataggcttaaaagattcgtttcgcaaattagtcacaatctgtgtaattagttattttttagcctatatttaatacttcatgcaggtgttcaaatgttcgatatgacagggtgaaaaattttggggtgggatctaaacagggcctcaagtctaggtataaccatataagctagtccttgtttagttccaaactttttcttcaaacttccaactttttcatcacatcaaaacttttctacacacacaaactttcaacttttccattacatcgttctaatttcaaacaaattttcaattttggcgtgaactaaacacaccctagtccattcaagctgaccctaacctagctaaatcttcatttaattagatgtaagaaataagcgaatacacacctttgtacacacacatcgtacttgctttgatcgagggtgtaaaatgtattttttttcgttgtgcatgatcaactgattgttgccgctgatgagatgaggacgatctgtttgttgcaggtgaacgtcttctgcatcaagaagggaggacactgctttttttcccccgaaacttgttagtagctttcttggcaccttcatatcattcttgttttcctttgagttgatcattgtaatattttgattcttccttcacggaacatcattcaattctttttgatgattctgaatatgtttgccagaatgtataagttctattatgcatttccttttgtgatttctgtgaggttgtgacaagcacggtgggcgagctgttgacatccgccagtgtgccatttctttcttttatgtctcaataatccacatctataacctatcggtttataacttgtaaacggaatatttccccctaatatttcacatctataatagtttataattgtgaacctattataaaaccaacaccgaaatagacattggcaatcaaacgcaaaaatacactaagatccaaacgtggtggcgacatcgtgccatgatatttaactaaagttcagctggaacctatatccccgagacactaattataggcgctcctccctaatccaacataattacacatataagggtatcaacaaccattaactggcaattatactgtttgacttacaacactattggtcaatcattccctcatttgctacagtcgtcatgcggttataacaagtgtctctctatttaaagagagtttaggaagagtattactctacttctattagaatacaatacaactttaatcctaatttgtaaccgactttatatatatatttgacacaaactttaacaaaaccgttagagatcaatggatctgtaacgggtcatgaaccattatggatgatatatcccatgccagtgacacaaatactgtaatgggtaaaaggaaccattattgatgatgcttttcacctattagtgataaggtactctgtagtagtgcctagtaggagagctttctatagcatgaaaaacaaattctgttacaaaggactacagctacagttcgatagcaaagcagcgtattacagaaccacgactgataaaagcaacagcagtagccgagaaaagctaagagattttcacaaaacctcaactggggtacaaagcaattaggtcaccatgttggatcacacacccgtgccagctgcaaaattctatactactaggagtgacattttcaatctccacaaagaaaaatgcgagaacaacttcaaggacagagaacacggtcatgagaaaaccgagggatacataaacaagaaagatagctgcagctattactttcagtatgtcctgccagaaatgcagatgattgcccctccacaactgcattggaagccgccaacatatcgggattgctaagattgacaaaacgaaaatcacccgaccaaacatcagaagaaatacgaacacaccgacggtaatactgaaaataagatcgtcccagctgttgccagagtccaatgttagatcagttgttaccaccagaaatgtaagaaccatgcccacaactgctaggaaaaccagtccagcagacaaagaaagataacggcggcggcgccttgtcaggcctccatctccaccaagagcaagagaagatacagaagagatgatacaagaaggagcagaagaggaagaggtgctggagcctgacgacaaggaagcagatgcccaggaacaaggaggaaaaccagacttcaagaccaagaagaagcaagtaccagtccagcttgggccaagagcaaggaggcccaatccacgctacaagggtgaccaatgggtccagtaaacaaccagctggcatgagctgtctgagagagagagagatcagccgaaactatgtaatataaacgcaaacgaagaacaagtagaaggcggctaagaactggaatatgcgcggtggcgtaggcggcggcggctcgatccttcggggttgagaaatcttgtatgtgcaattcgtgattaattccagttcctgagagataatcgttgggagttcctaacaatctggtatcagagcgcaaatttgagccactcttcctacaatctctcggttcggctgtaaaattccagttcaaggattggaatccgtctcttcggaggtggaatttccgcgaaaaggcaacttgccttgactggttagctgaatttggagcgggaatttgaggggcaagtgagagagtgtgtagcgccatggatatagaaggaaagttcgatgtactcctgaagaccatagctgagaatgagaagaagaggatggcggcggaagatcggacccgagaagatctgatggaactcaaggcgatggtggaggggcgccttccccaggtagagaagcgggtggaggatctgaactctgccctgggaaagctgaactccaaggtcgagcatttggagaagcagctgccgcgcgtgatgaacacgaacgaagaggtggcggctgcgtccgcagggttcaggactccggcttctgcccagggtacgcatgaatctcctcctgactccgctgctcctttcagctttgattcgtctgcgcaacacagtactttctctgcaatgtccactggagtttgtggtagtgttcctccgatgacttgtccgcagttcaacggtgataatccccagatgtggcgagcaaattgtgaagtttattttgacatctatggagttttaccgcagaattgggtaaaagtggctactctgaatttttgtggtaatgcggcattctggcttcaatctgtgaggaatcaactgattggtattacttggtctgatttgtgcgagaaggtgtgtgcaagattttcgcgtgatagacaacaggccttaatccgacagtggattcatctgaaacaagggggatcagttggagagtatgtagagcgttttgattgtgtaatgcattagttactggcttatgagcaagctgttccgccgatttacttcgttacaaaattcatggaaggtcttagagatgatattagatccatggttctgatgcaaaggcctcaagacttggacactgcgtgttctttagctctacttcaggaagaaactgctgctgaatcaaaaccaaatagtttcaagagatctgatagtggaacttatttgaaatccccacccagaagtgctactcctcccatttctcctaactcatacagatccagtcccagccaatcccctgaagacaagagaaacattgaatcacctagagtgagagaagataggatatcagccctgaaagcttacagaagatctaagggattgtgttttacctgtggagagagatggagtagagatcacaagtgtgctactacaatacagttacatgtggttgaggaactattggaagcaattcaggctgatcctgagattatttcaaatcaaagcagtgttcctgagggagatgaagatacacttatgtccatatcttcacaagcattacatggttctgaatcttctaagtctatcaagttaagaggatgggtgcaaaacagagaacttttaatgcttgtggattctggcagcacacactcttttattgatgagcaaaaaggtcaacacatgagaggcttgcaagctcttcagtctcctttgaaagtgcaagtagcagatggtggccagattccttgttccaggattataccacagtgtagctggtggactcagggacacagttttaagactgatttcagacttttacctttgggttcatatgatgtgatattgggcatggattggttggagcagcatagtcctatgcaaatcaattggtcccataaatggttagaattctagtataaccagcagctcaccaggttacagggactgattcctcagttggatcagtgtgatactatatctgtccaccaattgcaaggtatggctaaaactgattcaatagaatgtatggtgcaactcattcaaactgctgaacaagaaactagtgaagtgcctgctgaggttcagcccctgctacaagaatttcaagacctcttcactgaacccactggcttacctcctaaaagaacttgtgaccatcacataccacttattccaggagctaaaccagtgaacttaagaccatacaggtacaaacctgcacttaaaaatgagattgaacgacaggtggcggagatgctgaaatcaggagtgatccaacctagtcagagccccttttcatcacctgctctcttagttaagaagaaagatggctcctggcgcttatgcattgactacaggcagctgaatgctgtcacagtgaagagtaaataccctgtcccaattattgaggaattactggatgaactggctggctccaaatggttttccaaattggacttaagagcagggtatcatcagataaggatggctgagggggaagaatttaaaacagcgtttcaaacacactcaggtcattatgaatttaaagtcatgtcatttggactaacaggagctcctgccacatttttgggtgcaatgaatacaaccttggccactgtattgaggaaatttgtgctggtattctttgatgacatcctcatctacagtccaaccctcacagcacatctggagcatttgagacaagtacttcagctgctatctgaacacaactggaaggtgaaattgtccaaatgttcttttgcacaacaagagatatcctatctaggtcacatcattggttctgagggggtttccactgatcctaagaagatacaagatgtggttaactgggctgtacccaatactgtcaaaaaactaaggggatttctggggttagcaggatactacagaaaatttgtgaagggatttggagagattagcaaatccctcactcaattgctaaggaagggggttccatttcagtggactcaggacactgacaatgctttccaacatctcaagaaggctctggtatctgctcctgttctagctctccctgactttacaaaacagtttaccctggaaacagatgccagtgagtttggcattggtgctgttctatcacaggacaatcatcctatagcatttctcagcagggctctgggtcccaagtctaaggggttatctacttatgagaaggaatatatggccatactgctagctgtggaccactggagaccttatttgcagcatgcagaatttctcattctcacagatcatcatagcctcaagcacttgtctgagcaaagattacacacaccttggcaacaaaaagcttataccaagctgttgggactgcagtacaaaatatgttacaggaaaggaattcacaactcggctgctgatgccctttctcaaaaggaagacactgttaaagctgaactagttgctatatctgaaggagtaccactttggatgcaggatgtcattcaaagttatgagactgattccaactccacacaattactagcagaactgtctatcaatcccaatgccagacctcattttacactgaagcaaggcatattaatgtacaagggcaggatctgggttggccagaatggtgacctccaatccaaaattattgatgctctacactctgcacccattggtggtcactcaggattccctgttacttacagaagaattaaagcgctttttgcttgggctggcatgaaaagaatgatacagaccagagtgaacacctgtcaggtatgcattcaggccaaaccagacagagccaaatacccaggtttgctacaacccctgcctgttcctgcagcagcttggcatactatctctatggatttcattgagggtttacccaggtcccatcattttaattgcatcctagtggtggtcgacaagttttctaaatatgctcacttcgttcctctttcacacccattttctgccgcaactgttgctcttgaattcttgaaacatgtttacaagttgcatgggttacccaacattatcatttcagatagagatcgagtctttaccagtaacttctgggagcaactttttgcgaggtctggaacaaaactgcatatgagctccgcgtatcatcctcaatcagatggccaaacagaaagggtgaaccaatgccttgaaatttatctgagatgctttgtccatgccactccgactaagtggtcccaatggttatacttggcagaattctggtataacacttcttatcattccacattgaacaagtccccatttgaagtcctgtatggctataaacctagtcactttggcatcagcctcaatgactgtgccataccagatgtgtctcaatggttgcagcagcgcaaatttatgcaacacctgcttcaacaacatctgaacagagctcagcaacaaatgaaacacttggcagataagaagaggagtttcagggaatttcaagttggtgattgggtttacctcaaacttcaaccttatgtccaaacatcagtttctactagagccaaccacaagttatcttttcgttattttggaccttttcaaatctctgccagagtgggctcagtagcttataaactgcaactacctgcttcctgtcacatacatccagtattccatgtctcacaattgaaagcagcccagggattctctcatccagtgcactctaatcaacctcctgatctgaatcattttcagattcctcaccagtttattgattatagagtgactaaaagaggtaacactcccattactcaattgctaactcaatggacaggttgtgatgcttctgcagctacatgggaggacatggaggacttgcagtcaagatttcctcaggcaccggcttgggggcaagccggtttccaagaatgggggcttgtcaggcctccatctccaccaagagcaagagaagatacagaagagatgatacaagaaggagcagaagaggaagaggtgctggagcctgacgacaaggaagcagatgcccaggaacaaggaggaaaaccagacttcaagaccaagaagaagcaagtaccagtccagcttgggccaagagcaaggaggcccaatccacgctacaagggtgaccaatgggtccagtaaacaaccagctggcatgagctgtctgagagagagagagatcagccgaaactatgtaatataaacgcaaacgaagaacaagtagaaggcggctaagaactggaatatgcgcggtggcgtaggcggcggcggctcgatccttcggggttgagaaatcttgtatgcgcaattcgtgattaattccagttcctgagagataatcgttgggagttcctaacacgcctatttgttagactgtcatgcacaagcagacatgtcgcaaatgtggagcaatagaacgacatgctatttgcagccacgtagctcgagaattcagcatattctttgagcaatggcatgccagcatcctcaccgtctgcaatgtatcccccaggaggagtgaaagcagcagcaaatgaacctgctgcgattagtacggagatacataagatactttgggacacattggtgtaaacgcttgattcctccttgtcttccaagaacctcttatcagctcgatttaggaatctgctggtataagcattacaagcttgtaggcacatggtgatgctggtactagagagctgcacagaattcagaagagaacaaaaattaacacaaaattaaggtgatacagaatgttgaaagagcagaatgcatgacataggaaacgtacccatgataatgaataataacgagtgctcttgttgaaggcaacatctagaggtgttgatcccccatggttaataatgctgagattcactctagtattcatcataagacaggagatgataattgcattgccatgctttacagctagatggagcggtgtgtttccttcacaatctcctgcattcaacaacctcgtgaactttgggtttctgcatatgtaccacaccaccattaaccttccatattcaacagcgcagtgtaaaacatttctctgtttgttgtcaagcaactcatcacagtttaaacacatttccatcaacatacgggtaacactggccttgccggctatagcagcaacatgcacaggaaataggccatcattatctggaatgtatgcagctgaactgttgtccagtagaagttcgaccaatccagtttccccagttaatacagcatagtgaagggcagttcttccatcgatgtcaaccttttcggcaagtgttggctcccagcgcctcagggactcgctcatttctctagtggaaaaagaagtaatataggttatcagttcactaactaaagctgtgttcgggagttagggttgggaaccctcactccccagcacggaaaacggagcagtgattagcgcgcgattaattaagtatttgttaatttttttttcaaaaatagattaatatgattttttttaagcaactttcgtatagaaactttttgcaaaaaatataccgtttagcagtttgaaaagcgtgcgcgcggaaaacgagggtgggagttgtgaacccctgctaaagaatgcagcctaagacaagtaaaaacacaatcaattttctgtatctccagatatgcaaaaacatatatacatagttattttgtactactccactacttaggacatatacgatgaccattattagtacgctcttagccttgcaaattatgaatatttgccgacatggaagagataaaaaagagtagatatagaacatcgttgctatgattaacaacggctcaacattgattcttaccctctataaagtgagaacatggcataacggtgaagaaaaggaataaatagtattaaatagtattttttaagttgatggttagagcctttatcgtcttaacagtataaacggtccgtaaataatatttgtattgtctaagagctcatactagactctaccactgaagcatatcccaactttcgcaaaagcttctccaccagggagatggagttgagaacggcaaaagttatggattgtaaggaacatggacgatttctagttacctttaccgatgtagaccgcagcgtgcaacgcggtttttccatctggccccgcgtagcttgctggcgacctcacaccgtcagaagattttccgatcaatatgccaaccatatctggccggttggacacaaccgccaagtacagcggtggccagtccgctatcgctcgacatcagcttctgcaagaccggtgcgtagccgttcctgaccgcctcatgcatcgcggtcgctccacctgaattccatgccctcagcacagaacgttcaggttcttgcatggctgaagcagcacggacaaggtaatcgaccacatcggcatggccagccctcgcggcacagatcagaggtgtgtccagctgattgttcctcgacttgatgagcgagatgtcgtgagtacatatcatcacgacgagcttcaggtgcccacggctggctgcgatatggagcacagagctgccctctgctgtgacaccttttaggcagcagctctgatcaacgtcaccttgctcagctgttgctgttggccatatgcctagagcctgcgctaagaggtctgcatcgccggtggcaacagctttgagcaatttgtgttccattgtgtgtgaagtgtgcctccctgccatggttcttgcttggctcacagaacaagcgaggcacggggaagtcaagtcagctcttgcaggtaagttccagcccatatataatacagggtcccctgctatcctatcaactgtttctctgttcagacaatatctatgtactagtggagaaagaaaagtattagcttagtcacttgcattcgtaccttggaacctttcctatgaacctcctgttttgttagtattataatcatcatcatttttttaaatgtaacaggaagggttgacccctactgattatattatggtcagagaaaaggactatattatggttaaagaaaaggatatttatgtacaaattaatttgctaggcttcagttgcctgattttagttatctgttcaatcaatgcaaagcagccgtccgttctcgatcctatggttggtgcttcatctttgggcaggtctaatgcatgggtcgcacgggacccacgcgaatgcggctaggcacacatgcacgagggtctaagggggaatccaaatcccaaaaaggcactctagaatgaggttcaaaacacaatctacctttatattttttacatctttaaatgtgttttctgaataatctgaagcgtatatctttttaacaaatcatgaagagaacaacccatcctcctacaataatgatcagctccttgagtactgataccatgctttatccaatcaaatcatactttcatgaaaacgtgaatatatttttttaaagaaaaactaaaattgttagtgatagaataacacatgatattgtaattaacatgcaacaactaatgtgatggctcctatgagaaaactcatctaaaagaagggttataaacaatcacgatgatagttattaaagacatatcttcccattgattacataaaaaataatgatggtaaaagagaacgtagtaatatttctactaatcgacagatcagttggcaaactgcagaagcactaaaaaatttgctcactttagatgccattaactggacctgttcagctcctatatggactggatgcaattggactttgtagttccatttagttttatttctgaacatcatcctcagaatagccatcaaccagtaacagtaaccatcaccgtgcaagcttgagcaccgacgttgtgccctagcactggagtactgaccccttcatctataagaaaagtatcttatcaggtcaaatgtgcaatgaaaatgctagattagaggaatgcacaggcaagagcaccttccctataactttgttgcagaagggcgtattgttgttgctggtacaagaccaaattctgcaacagcagatccagcggtggctgcttctcaattggcattcacctctgtcagtgctgccatcatgatcgtcagagagatcgcccctgagcaccagtgggcatttcctgtgaggataatgagagggaagggagtgaccgcggagcgttcaatgcatatatccgtttgcaaactgaagtatcttctgaagaatttcatcccccgtggcttcttctgaagccaatatactctcagtagcttattct

SEQ ID NO: 9433 - DNA, 47932 bp, Oryza sativa
ctaaaatcccttatattatgggacggagggagtattctactattttcttagtccacatggtctttttgtagatcgataatcttctgaaggaaaggaatgaaatccatgcgtcctataccaacaattcaccactgaagaggagttcaagcaggagtaaagctaaatcgccttcaaaattttccaaaggtgaggaggaaaacagtcagagaaaggaaaagaaagtgaaagaccaacccacgggtggatgcagaagtgcagatgaagattcaaacgaaaagaaaaccaaagagcggttcccaaagaagaaatggttaaacattcctttcaaaattgacaggagaaagccatgctgagtgatgtaatatattcttcgctgtgctatttttagtattttcttatgaagtatcctcagtatacttatctttcacctttggtttttgcaggtaattccctgcatcatactgtttaaccaaaatacagagcattttggccctgaccattcataacagaacccctccctggtttattctagaaagattgggtgcaggcctgagatggttggagaaatatttttttcgatccccttgaagctccttttggtcagtggccactcatcgaactgtatcaaaataattaagagaccgagctcgtgatgtgatcgtgagatagaagcatccatagcttgtcatatgtgcagccaccattgtccaattatgattcttttcatcgtatattcgtatgtttagttttgtttcgattccctttgtaagcagttgtaaatataggttcttttcaccatatgcttgctgtacataatgtaccttcttccctcgtctggattcctgatgtgtaagaaagacaaaccatttacccagttttggatttgtcattcatgtgtagtttgttgatgcatgctaagctggagcaaagtattcttgcatcgaactaagttgccgtttttgcaaaattctgaagctatggaatgttgccatgagccataggagatgccaactccatggaatctctcttttaacaagcaattcacatctcaagttgtcaacgattttgctagcactgaatagcgtcctttgagatcctcaggcaaaatttattcgttccaaaaggacccaaaatgtaattgatcatgtgatcgccgtcagcccaaagcatgtaataattacaaaatggattaaaacgagggcccaaaatgttattgatcatgtgatcgccgtcagcccaaagcatgcaataattacaaaatggattaaaacgaggtaacatactattatatgattaattaagtatattagattaaaaattgaaaaatacattaatggttttttaaagcaacttttctatattttttttaaaaaaaacatattgttttagtagttcggaaaacgttcgcgcgaaaaacgagggagtagaaattgggaagaggaattatcgaacgcaactaactcttgtttttattgaattactacctccgttccatattacttgtctttttgagtttttgtttgtcaatgtttgatcattcgtcttattcaaaaaattttggaattattatttattttgtttatcatttgctttattatcaaaagtactttacatatgacttatctttttttatatttacactaatttttttaaataaaacgaatggtcaaacgttgcaaataaaaagtcaaaaacgtaagctattatgggacggagggagtataagataatttcaaattattccatatttccattggacaataaaatccccttttcattttcgaagtaaaaaccgctcctcatcaacaacgaagaaccaataaaaatcgacgattttcgatcaatgtcgtacagaacccggttaatatcgatcggtttttacgaaccaagacctaacggtttaacgaaaatcgatcggctttatgaactctgttgacaccaagtcctgagaccattccctaccactctctttccctccatttgctctcctccaagaagctctcccgccatctaatccttcctccatccatggcgagatctcagatacctgaaggtaagctagctagcaaaaggtaggtgtagcatcgcacgctgccaagaaaccgaccatggacactcacctcgtcgtcgtcctggcattgctcgccgccgccgccgcggcggaggccaagatgtcggcggactactacagcaagacgtgcccgcgcgcggaccggatcatcgccgacgtgctggcgcagaagcagatctccaaccctacgacggcggcgggcgtcctccgcctcttcttccacgactgcttcgtcggcggctgcgacgcgtccgtgctggtcgcgtccaccgccgcggcgcgctccgagcgcgacgccgacgtgaacctgtcgctcccgggtgacgccttcgacgccctggcgcgcgccaaggcggcgctggaggtggagtgcccgggcgtcgtctcctgcgccgacctcctcgccgtcgcggcgcgcgacctcgtcaccatgacgggggggccctactacccgctccgcctcggccgcaaggacgggctctcctcctcgccgtcggcgcccgacgccgagatcccgcacgccaacctcaccgtctcccgcctcgtcgccgtgttcgccgccaagggcttcaccgtccaggacctcgtcgcgctctccggcgcacacaccctcggcttctcccattgcaaggagttcgccgcccgcatctacggcggcggcggtggcggcgccgacccgaccatgaacccggcgctcgcgaagcggctgcaggaggcgtgcagggactaccggaggggcccgaccatcgcggcgttcaacgacgtgatgacgccggggaggttcgacaacatgtacttcgtcaacctccggcgaggcctcggcctcctcgccaccgaccaggagctctacggcgacgcgcggacgcggccgcacgtggagcggtacgccgccaacgagacggcgttcttcgccgacttcgcgcgcgccgcccggaggctcagccaccacggcgtcaagaacggcgccaacggcgaggtgcgccgccggtgcgacgcctacaacggcggcccgcgcggctgatcgcggcgcgcacggtggcggcggcggcggcggcggtgcctcgaagcattgatagtctaatcttagattagtgcaggaagataacacggagaaattcaaattagtaggtataaaaagaaaatatcttgctgttcagagaggaaaaaaaaggggaaataatcaactttcacaagtgaaatcatttcgtagtcatatactttaggctgtgttctaacgattatcaaggcacgaacaaataaattaaatactactccctctgtttcacaatgtaaaactttctagcattgtgtctagattcattaatatctatgtgaatatagacaatgctagaaagtcttatattgtgaaacggatgaagtagtatcaaggtaaaagtaactatttaaaaccgttctctaacaaatgttgattgtcgacgaagaaagttccacttcctgctacagtattcgtatgtatagagttggaacaatcggttagtatgaaatgcaaatgaagatgtagctagagacaggaagaaaaacttttatacagttttaatcctcgtaaatggtatgccatggccagattgggggcggcgtgaacttgcctgatctgtgggtgatgtggctaggcttggcagctagagggacaacgcgatggtctggtgacgatgttgtgcaggtgggttgtgtggtgttggatgaaaattgttggtgaaagccttggctagcctttggctagcttgacaacgacgaaacccttaggtgttgtttccctccttggaggcgtcgttttggcgtcatttctcctccactatcaagaaccttgcctgtgcaacaatggtcgttggtagactccagtgtcgaaactccataggcttagctgtttggcaaggcattcaccttctggcttttgtcttggttgtggtgagcatccaactttcttcgtttcggctaggtgaagtcgaagctacttcgttgtggtgcaacaaagctcggcaacgataacacgttgtagtctctaggggtgctggtgttagctgtttgcaagaagtgtttgcaagaagtggtgcttggttggcttgggttgatgtccaaagcaagcagttggtgttgttttgttcgttttggcgatacctttggcaatgatgatgtaacagctgtgaagttggagctgctatgtcgctaggcgacaagctcggcaatgataacacttgtctcgtgaagtcgaagactttgtgcggccttacgataagctcttcttcgatgattgttttgggctccgtttttgtcttttttttcttagtcttggtagcttagatagttagaatgtgcttgtgatatgcatgatgtgattgtggaaagagagatggatagtgttggggcaccctaggtaatatactatccaatatccaacgtgatcaccaaatgtatttttatcctacttatccaaatacatgtgatggtcacgttggacactggacggtatattacctagggtgcccgcagatagaatattttttgagggcagatagaatattcatatagcaataaacgagcatacaacgctgaaaagatatctatcagtactttatggctcagtgcagtctatatgaagtgggatccacctttgtcgatttcaatacaaatagaccctttaggggataaatgctactagtgtaattatactaggtcggggggagtgatttgtgaacacacttggtatacattgagggggaaagaaaactctaactctaacctattatactctctccgtccctaaatataaggaattttggtgggatgtgacacatttctagtacaacgaatctagacaagatttattgtactaggatatgtcacatcccaccaaaatccattatatttagggacagaggttttatccagattcgttgtactagaatgcgtcacatccaccaaaatccattatatttagagacagagggagtattagggtctgtttcgcacagctccagctccagctccacccctcctggagctggagctcagccaaacagtttcagctccaccaaaactgggagtggagctgggtggagctctctcataaaatgaactagagttgtggaactgggtttaggtagctccacatctccactccagaccaaactcctggagctaaatttaggagttggagctataccaaataggcccttagtttaagagaagtgatctcatcatctcatcaggattgttggtggctatcttctaggattcttccaaatgtcaactcatggtttatgttggatgacttttgcttcgagaggaaagagtggttaatacaaagagtgccctccatacgcaaaatttgtaaatctatagattaaattggttcctctcaaataaatatcgttttaacgaatcaaaaatcaagataaaaaaaggttgaattggccagccaggctaaaaactggataaaccaaaatactaaaaaaaaaaccaaaaaaacctgacatgatccacaaccttaccttcccccctctccgactctccccttcctcgtctccatctcgacaccacccctcccgcctcccatggagtcctccctcctcctcaagcccttcgtcctcctcccctccgccccgcgccgccgccaccatcaccacctctccctccccacgccgccgcatcggcgcctcccctcctcctcgtcctcgtcccgccacgcatcgcccgcgtcctactcgttcgccgtgacccgcgccgcgcgcgagctgttcgacggcagcgcggacaggccccccgggggggtcggccgcgggggcgcgcgccggagggagtaccgcgtggagcagggggaggcaccaccggcggcggcggcggcggcggcggtcaggggcgtctcgccgtacgtcgtcccggccgcggcggtcctcgccctgagctttggtacggcctttgccttgtttcctcctcctcctcctccccctcccccgccgcggcgcatccttttgcttcgccaattcgactcccattgatccaacatgcgtggggagctctgttccctgcacattagatggcatcgtttcacaggacttggtagaatatatctgaatatgtgcacaattaccacagttgcaagctcatgcgaatttctcaagggcttgtaacatttatatctcgcggatatactagtacaccgttagatgctatatattttctccatttcatattataagccgctttcacttttttctagtcatttttttaagtttgattaaatttatggaacaaaattatcaacatctagataataaattagtttcattaaaactaacatttaatatgttttgataatatgtttattttgtgttaataatgttgctatatatttttttaaaactttatcaaacttaaaaatgtttgattacaaaagaagtcgaagcaacttataatatgaaataatgaaacagagggattattatgccgaacttttcatatttttatcacgttatgttacagagcatgtaattttttctgcggtgtgtggaatcaatactaactctctgtttcagaggacagtcatatggagggtggttcagaatttgcttcccgggaagacaaaggaccagagttctggagaatctaccccttctgggatcatgtggtcctttgccgctggttccaatttgtcaacatctgcaagctttaatgctgaaaaggaatcaaggaagaatttaaataagttctataaggaaatcaggactctgaaaaatgttaacatggcaggtaactagagtctatgtgtacttaagttaaaatatttgaaagaaaatgctgaaaccaagctctgagccttcagatttgtgttgcatattgtacacttaaaactttacttactcggcaggtcgtcaatttggggatgagggtctgttttttctagcagaaagcttagcctataacaaggtcagatatccgatatatcatatattgttttggttgcaatccatatatgagcatgagtacatgcttactttcttaccgatttttccttactaatatactagctcttttgaatactttttgaaaacgagttgttctctgtattcacagagtgcagaagaggtagacttttctggcaatgggataacagctgtggggatagaagcctttgatggcattcttcagataaatacagccttaaaatctctcaacttatctggaaatgccattggagacgaaggagctaaggtcttctcaatcttattgcctcttcgtatcattttgtttttgtagattgttggtgtgatgtatactatgcagacaatgttctcttcttaatttcattttctgaagtctgaactcatatgattacataaccatgttattacttaccttttaacttgttatcaaaaggttggctgtttcacattagcaccttttacgagttgcattgttattgtttgcctttatgcctaactggagtttgtacactgtgatagtttatcgattattcaaatactcatcttgctgatattatcattcattgggagcaaatatgatagaacctacccagcatgatatgtatagatgtaaacttaactttaactaagtcctcctgactgaatgtaacactcatgaatacttacagtgtctttcagatatattggtagagaatgtaggtatccagaagctcctattgaacagtacaaatattggagacgaggtttgtatctctccctccttccctctctctgtctctcttgcactctttgtgtgttgtttcatgcgcgtgcactgcaatgtaacatgatattttcttttcagggggcaaaagcaatttcggatatgttgaaaaagaacaagacgatacgtactttacaactcagcaacaacacaatagaatacagcgtatgtatatgtatccacttcatcgaagacatgcacttgaatcacaaatagaaaagaaaaactaaccatatgattgtttattgaaggattgctatttactatatctcctttttcttggagcagggttttgcaagtattgcagaagcactccttgagaataatgtgctacggagcttatttgtcaagttagttgctcacaacccagtggctttatatgtgatatatgatgagtgtgcatatgaagttgtgctgagatactgcggtagtgattacattggtagttcattttctggaactaactgacatgtactttgtctatttactctagtggcaactatggtggtcctcttggtgcatccagcctagcaaaaggaattctagggaacaaaactttgagggtacaactccacacatacttgatgaaatacttcagtgtagtttgattgttcgaatgtttggtaaagttgcaaatcttgtgagcaaaccagatgccattctatctttttgtttttattttatattagggacatacaatatttatattggattactgatggggtaagtacttttttgtatgaatgatatcacatgcaaccaaatttctctcctacttctttctgatggtttcgtactatattgactttcttctcaaatttaaagttgaaatgctgagtggatgtttaaaaaacgtgagcacttaaaaatgtgacattctcaatattaaaggatgcatggcacaagatggttagaccttctctttttcttttttacgatgcataagattgttagactagcttttgcacttataatcatagatacctacaagcaaaaaaggaacccatataatagatacatgcatctccaaaggcatgtgaagctacatgtactatcctataccctttcaaagtgcgttgaatttaaagtttgcagcaatcatggggagcagtgcacagttgtgattgtccatgtactgcacccgcatttttgtgctgaactctctatgttgtgtaagaaattggatcaaattgccagcaatacacaacacgtgcatcttaaaggccagttaattaaattttactcaatttaaggaaaattgtactcctattggaatatgaaatttttgtcacatactccctccgtcccataaaaaaccaatatagtattggatgtgacacatcctagtactacgaatccggacatacctctgtccagattcattgtactataatatgtcacatccagtcttagattcactttttttgggacggagggagtattggttagctgatatccttaaactccttcaacaccaataccatgtattactaaaagcaaacaatgtgttaagaatccatgcaagttacaaccttttgttcaatagtaaactaggaaatttttccatgagctattgttttaccatttttctcaattttcttttcgaatgtatggtattttgttcctgtcttacttaattagtcaggtgcacattcattataccataataactagattgttgattgttttaaacctttgttaggaacttcatttgcatggcaatggttttgggaatgagggagtacgtgcattgatgtcagcgttgtctgctcacaaaggtattttctgcactaaacaaatcaactagtagcttcttacgggattagtttacccctattttggccttcttggatgaactacagggaagatcactgttttggatattggtaacaacaacattacctctgaaggttctcttcatgttgctgagttcatcaaaaggacaaagtctttactatggctcagtctatacatgaacgatataagtgatgaggtagtacttctgttatcatttacctgttctgttttatgccagtgactgaaattttctgattgctacatataataggacatgatcaagctagagaaatttgcttatcaaacacccgcaagattttattaagcatttaatgatgcttatgccaaaccaatatataatttctgctattatggaactatgagctaaatagagtactgctttagaacttaggctgttagttacttaggtttaaacttcttgcctaaatcctgtttcttgtaaaattgacatatacatgatgctccagttcttattttatactttataattcgatgctacccccatcactctttaactccatagtacatcaaagagcgggagatttacttgttttcttaattcatatacatggtttttcacatgtgatccaacgtatcaaatgggtacacatttatgtaattatgtttactttgtttggcatttttagagaaggaaggtgattttgtttggttttgtaacataaattaatatgaatgtcaccagggagctgaaaaggttgcagatgctctgaaacagaataaaacaatttctactgtagacttggtaagcacctatttgactattaataacacccaagagtttcatatactaccctctgttttgtaaattattattataatatcaccatataatctcagaacaaagtttcaggtttctcctctttatatctttgttcttttataaagagtagttcagttgattgtgtgttctaccgtctacagttcacccactgacccagtcctacttcaataaatcttttgtggctagatatatgtagacaagtatatggttgtttgcatgattctcttaaagaaactgcattatttgcacatctgtatatttatgtgattgatcgtctccatgtagtaaactataaattttctagatttgatgttaattattgtcttcattgtaatattagatattataatacttattcggatcagttgcaacgtgcgggactgccatgctagtatctcttaatccatggactattgaattccccataaccttcagggttgcttttctaatgttgtaaagtgagtgtagaacctatacaacaaaccttattcagaatagaggaactttggagggaaaaaaggaactgtattctttagatgtcccagcattccaaatattcttgtaaacaggtatacacatgctctaggtcttaagccttttaaatttgcagggtggtaataacattcactctaaaggggtaagtgcaatagctgaaactctgaaggataattcagtggtgacaacagtaagtcatcttattctgacttttttagtctgcacaagaaggtagtgctgtacttgcactaattctgaatgttgtctgtagttggagttgagctataatccgattgggccagagggggtaaaggctctttgtgatgttctcaagttcaatgggaaaatccaaacccttaaacttggttggtgccaggtaatcttcataactgaatggaatcgcggatgcagatttaagttatatcctcttcagcctggttacatattttgcagataggtgtatcaggtgcagaatttgttgctgattgtttgaagtacaacacaacattatctacattggatttgagggcaaatggacttggagatgatgtatgcacaatcttcgttgaattttatttataacttgcgctttgattcatacccatgccttctgatccttctctttttgaagggtgctatctgcttggctcgaagtttcaagatcatcaatgaatctttgacttcacttgacctgggctttaatgagattagagtaagtaaacactaaatgcagtgtctttttctttttgtattttctattggtgggtctatgcagatctccaccatgttcaataccctttatgctcctaacaggatgatggagcatttgcattggcacaagcacttaaagctaatgaagatcttgcagtcacatcattaaatcttgcaaacaacttcttcactaaatttggacaggtcagttgccgtaccagttggctattcatggtgtcatttgagttatgttttattcatgctggttgagtcaatgcaggttgctctgtctgaggcacgggatcatgtatatgagatgagcgaaaaggaaatagacattttcttttaggtgttcttgtttatttttgcaaagtagcttcgaaaaaatggcctaaaccatgacttctgcttggaagggatactttctgcataattagccacacaatcatggttgttttggcactacttgaagaaacgaaagaagaacatggggaagagcaatagagcatgatttatgcttgtcatagaaaattttggtaaactagttaactctgtaggttagtcattgaactgtccatatgcattttttctggaagcattgatctcaaattgatcattcatattggttgaaatagaccatatgatgaacattatatattatattataatggcttcactctttgcatgtctggattttgagcagtaagtgctcttatgctagttttttactttttaagtgtcattggttgtcctttattgtactttgtgcatacgatagcttgtctgttttagaactaggagagagtattgtagtacttgagttcctgtcttcccggtataaccgcgttcatgcccaaggattttgttttgtgctcgtcttgtgttctttaaacctgttgactcatgccatatccatgtgcacatgtgatgatcttcaattatgcagacctcacatctgtcggtgttgggcacactgtccacaacaatagcatgctttgaatgtcacacaaagaatacacgttatgatccaaatttgcaagatcatccatgtagaatgggattgactgagttcatgtttaattgttataattccatggaaatatgctaatcccttgctgggcattccttggatgatttccttaatgcagatgcttctttctcaaatgaggaagcatataagattaggaagcaccatgcttcatgctgcattactatataattttccatcatatatttcttagatatgtcgagtgccaatcatatgtttaattgttgatggcacagacacacttgccttcatcgatgctctctgagtttgacatctttttacattatgtattaaagctatgcaaattattttgggagaacaattttatatgcgccggtcttcttatttgatcagttttctgtatttgatatgcaaaccaaatttactcctatcgatgttgcgtggttgtatgtttaatttcttaaatggcaaagtaccaattgtgacatataatgattcttgcaatctactacaataatttatcgtgttgtcagtgatcttgttcaacatatgtaataaagcactgtttaagactactacttgggatattctagagtgtgtcgttcatcgacagttcgacacaaattaaactaaaaatgggagatgtcgatgccattggttactaggctagtcctcagattgaattggttgtcgtttgtgtcaggcgatatttgttgtagttggacggaatttgttcagctagtaatcctgccgtggtcaaaaccctaattctgaacaaaatctttcattggaactagcattagttgcaaaggaatgttttggtttggttggtgacatcacgaaattggtgtctttcaccgtgcctattctctggaatcttgtcagcaaccaatttccccatatcatttctgtcatttctctaaatcaagtgcaataatttggttaatattggaagtgtttcaaggaactgaagacacaagccaaactctagctaaactttgccggactaatactatatccgtaaaccactatcactagcatacgaattctcaaatctcaagcccttaatacatatgccagtcctcacaggagacaaccaaataacaataatgaaaccaatgaactagcaccaaatacatgctagttgtaattttcagtgtatggaaatttattccaatgtatgatgagtggtggaatgttccacgatcagtcgatcactatatatatatatatatatatatatatatacacacacacacatgtgtgaagaaaaacatttgtatatatattgtggaaatttattccgataaaaccatttttttttctaaaagaccacatcagtgatgggtgaagggtggtaattaaaagatgcacgttacaaataagccccatccgtatcgggtgagaatactacttgacacggcccgtaaaagatgacctagttatttgtgtcggttaatttctttcctgtgacctatcaaagatgaagtcattagggcaagtactataatgttccatatgttgcccttaaaaataccatattggatagagtgatgaggtggaggagagaagtgaggagagagaagatgagccatccctaagtcaagaggcaacatctacacaaatttcaagaagagtgtgagagtattagaaatatttgtatttgtgtaccaaatacgatatattgtatgtgttgcatcttaattcatgagtgaataaaatagataaatttggagatggtagtcacatctaccatagcacttgcccttaggaacaggtgatagaacaaaggcaatgtttttgctaatcaagtaagctgatgtacacacaacgctaatcaagttggcttctgttcgaactccatgagaagctctcagggccaggcaggcaggcagataaaacgtacactccacagctcacaccttcccaaatcaatccgtttcatgcatcatcatcctcctgtcgatcgaaaaatctccatctgatgatcattgctactatatatcaaatctagctcggatcagatcatcatcaagacacatcaacactatataacggactgctagctagctagctagctaggtgagctacgtacacaagaacttctccattgcaataatcaatcgagttaattaattagttagtactagcaaacattggctaaagtatatatatggttttccaagtgcagccgccatggctgctcctcctccacctcatcgccatcgccgtcctcctcctggccgtggatagtgtgccgccggcgccggcgccgccgccggcggtggcgacggtgttcgacgacaactacgtggcaacatatggtggagacggctaccacctggtcaaccagggcacgcagattagcctcaccctggacaagagctctggtatacacacagatagattatatatatgacactgttagattcagcatttagatcagcttgatcatagtttttgcttcttttctctctctattttatgcttaactagcttgatgtgatcatgcaaattaattatcatgcatgcaggtgctggattcaggtccaagttgatgtacggctcagggttcttccacatgaggatcaaggttcctgccggctacactgccggcgttgtgacagcctactatgtgagtgctaaactgctaaatcaacttcacttaattatataagtgttaattcctatcacatgttctttaatattgactaaaaactaagcaccagtaattaactgaatgtaacaattaatttaatttatttctgaaattgcacgggtagctggcgtcagagccagactgggacgtgcaggacgaggtggacttcgagttccttggcgacaaggatggcaaccccatcacccttcaaaccaacgtcttcgtcggcggccacggcgaccgcgagcagcgcctccgcctctggttcgaccccgctgccgacttccatgactactccatcctctggaaccccttccacctcgtgtaagctcagttcaatgtcaccatgacggccgtatacacttttgttttaaaacaaatagtagaaatagttacatcttccgtctctaccaacaaacacttgcacatacaataagcgatgggataaatccagtgttttaaatagcgggctataacatttagcagttgacccttctcaagcagctctagacggagatttaaaacctggataaatctaactcctacaaaatgaccacctgaattctgtagaagctaagacaaatcacatgtacaagccatcgatttgattaattatttggcaggatattcgtggacgagacgccggtgagggtgctgaagaacctgacgagccggggcccggagttcgagttcccggcgaagcctatgcggccgcgggggagcgtgtgggacgcctccgactgggcgacggacggcggccggaccaaggtcgactgggcccgcgcgccattcaccgcggccttccagggcttcgccgtcgacgcctgcgccgccgccgccggcggcggcgtcagctcggacgactgcgggtcgccggacacgtggtggtggaacggcggcgagtacaggaggctgacggcggcgcagcaggcggcgtacgatggcgtgagggggaacctgacctatgactactgcaccgacaatagcaagaagcgcccagtgccgccacccgagtgcagcttcacctaagctaactgtgaataaattcactgcacaaaattagcagaattaattgcgaggatgaaaggtgcagcagtatactggtatatgttagcaattaagccccgtgttcatccattggaattcggaaaggttgtgattacagatagccattccgatataaatatggtgtgttcttgacttaaggccctgtttagtttcgaaacgaaaatttttcacctgtcacattaaatatttggatacatgtatttaatgtttggatacatgtatagagtattaaatatagtaaaaaaactaattacacaaattacgtgtaaattgcaagacgaatcttttaaacctaattacgccatgatttgataatgtggtgttatagtaaacatttgctaatgaaggattaattaggcttaatagattcatctcgcagtttccaagcaaaatcgtttcgttattagtctacgtttaatacttcaaatgattgtccatatatctgatgtgacacagcctaaaattttcgttcgcgaactacacaagcccttactagtacaattttgcaaccaaaatttttttctatacctatatgttgtagtcacattttagtaatgctgtgtttagttcacactgaagtttggaagtttggttgaaattggtacgatgtgatagaaaagttatgtgtgtataaaaggtttgatgtgatgaaaagttggaagtttgaaaaaaaactttgaaactaaatagggcctaagtctgagttacaggacacgttaaaaaaaaagaagaagcaggaggttgtagaggtcacaccaatgggttagaaggaggatggaattcaagttgccgattgccactgcagtgcaaggctgctcattgacaccgacagtgccctgtgcgtccgtgtgtccctcaggcagagaggcccagacaccactgccattgttgggccgtttctcgcatccaaaacctatactatttcggccgggccgtcgcccccgcccccattagtccattccacctcccgccacggcacgcagccaaagctctcgttctcctcctcgctgctgtgcccgccgagcgaacgatcccgggacaccacaccacaccatcatttgcacgggatatccgatcgatttgagtcgtactccagtggcgagcacgtacgtacgctttccgcggccgtgtgcccgcccgtgcgtgcacgaagctagctagcgccatgattcgcgaccaggagtccgcccgcaaaagagaggcccccggcccggcagaatgtgcgcggtgcccggctggccgtgtgcgccgcaacgaaaggttttgccagcggaaaagaaccaaccgctttacagccaacagaaaaaaccggccgcactccatcgcatttttcttttgcccgaaagctcgccccgttgtctagtttgatacgagtactcgaatagctcgccagcccagccacctctcgccgtgcgggcgtgcggcaccgcacccatacgacggtagcgatcaggttcacagttttcttcgactccaaactttaactttcttattttccattagtatattttttttaaattgttaaatgatgtgtgtttttttttaaaaaaaattctacatagaagttatttttaaaaaaattaaataaatctattttttaaatttataatagttaatatttgattaatcatttgctagtgagttttcttgtttcgcgtgcaccggaaatctttcttcaaactcatctatcgaaccaagcctgagtgagatccgatttggatttcgtgaaaaccggattaaaaatacaaaccactctttttttttccgttaagttcaaaaatccatagtgaattttaaacttttgataaaatttgccggattttatcggtttgttaataggttccacgaaatctgatgatacagcttgtgagtggattttgatccgatataggggctgatcttttgtgctgctttgcagcaagctatggctgtggctgtgttgtatcggaaaaaatttgtaaatatactttttttttcaataatttaccattatatatatgcatggaaagaaattgtaaaaatatacctatctcgcgacggtcccacaggacggtagtgctgcaccacgacggtcccacggatccaaaatgcgggaccgcgacggtcccgcgcgaccaaaacacggcaccgcggctagagcgattttattatccgatcggcactgtttagtactgttttaaacactgtttagcactgtttattacagtcccgcagacccattgtgcggaaccggcatgcaaacagtgccaaatagtaacattgccagatagtgtgtgaacagtataaaacagtgcgtgaacagtgtcaacgcattgataaaaatcgctgctatggcggtgccgcgttttggtcacgtgtgaccgtgacggtcccgcgttttagatttacgggaccgtcgctcccgtgtttttagagctgcgggaccgttgtaggatgggtatatttttataaatccttacaatacagatatataaacgtaaattattgaaaaaaataagtatattagtaatttttttcgtgttgtatctacagtagtagacattatattaggtttgctgcagctgttgcgatcaactctatagcctcatcttttcgcccatacttatcatttaaaatttaaattttcaactttaaatttaaaagttaattttggattttttttatcatagtttattttttagtcttacttttagatcattaagaacacgtatatatataagtttttttatttatatacgtgacaaacgattggggctgaattgggaaccctggtgggcgacagcgccctacgggctccgccagaaacggacggcgctcgcggcgccgctcggcgtcgggagggatgacatcgacggcgccggacggtggggccacaccctgttgcactttcggcgaatcggccataataagcccaatccgcaatccccgatcaaccgtggtaggctacccctttgcatgacaggtgggcccttcaaccaagaggcggggtctgtcagtggaacttgtagggtaggtacatgcatggtgagtacgaaaaaagcggaggagatatgcaccggcaagagttggctgcgacgggctggatcggatttggagaggggaaagaaggaaaagaaagaaatcgtcgccgggggccacttcggtggggaaagtcggggggtgaaatggtacggtcacggagatgttgcacacacagacacactcttgtttgttatttttgacatgtgggtgcacgatagtgtagggtctgcgtgtcatgctcgtgtttgggtgggctctggataatggaatggtaaaggtgcaaataaatgctcccttagtaggcaatgataatgctgagagtacatgttttatgtaccaaatgtctaataatccattttcttaaacggttaaatgaatattagtagatgctatcttacggtctaactttattgacatgacaggttcctatttaaccttgtgttcgtgtgatgcaacatttacggagccatccagcgaaacagcttatttgcaaatggaaaataattcgtgaataaaacttttatatacgtgttcttatcaatctaaaagcaacagctaaaaaataaatttcgatgaaaaaacctcaaaatcagctccaaatttaagattgaaaatttaaattttaacttataagcataagtataagcgaaaagaagatgccttatttgcatatgtgttcttgtctaacgatcaataattttacgtttgacaaaaaaaatactttcttttacgttgggaaagttgtttttttctattcacgcaagtgatcatactgcttgaaatgtaagagaaataaaagaacaacttgttaaaaaataattataaaacagtctagaagtatagtaacaatgaatgaaaaacactaccaacacatataacgctatggatcattgatgagcacggacaaccgtttatactagcgcgtaccatctataactgataaagcataaaatgcattggacaattcacatgtattcatctatgggttttccattctgttcaaaatcacacagacaatattaggtcaaagtttaaaggctagtagagagaggcgatccttcgcttaacttcatgtgtagttagtgtcactaacatagcacatcatactatgcatgtctctagtagggcagtcgcagtctcgcagataattatggccccgttaatatggggaataggtcgagcttattaaccgcacgtaaaattgatctaaaaaataatttgtaaataaaacttttataaacgtgttcttagcgatttaaaagtaaagattaaaaaataaaattcgagtaaaataaaccttaaaatcaatttaaattaaatttaaggttaaaaatttaaattttactagctgataagtaagcggaaagatgaggctcttattcctttttttctcgtcggagtgcccgtagcatttccccttccctcctttttgagcgcacgccgcacccactcccccgtctcctctgcgctgccgttccccgttattcgccaacgcttccctccacccgccccctccccaagctgagctgtgctgccgctgctttcgccttcactaatcatcatcgcctcctcctcctccttctcctcttccccaccaccttcctccccacacacacacaacctcgcgcgcgcgcggcgagaacgagaagcatccagggcggcgcggaggcggaggcggaggcggaggtggagggggggggggggggaagccgggatggcggcggcggcgtggggcggcacgacgcagaagtgcgactcgtgcgggaggacggtctaccccgtcgaggagctcgccgccgacggccgcgtctaccaccgcccgtgcttccgctgcacccactgcaaggccaccctccaggtcccccgtcccctactctgctcgatccatccattaattaccagattttttttttgtactggctttatgccttgtttttgttaatctgggtcgatgctattattgcgagtactatcggcttcctgaaatcatatccatcttggaatgctttagttgttgttgctgtactgtatggcctgcttttttctttttctttttttcttttctcgagaccagtcgaagatgggagttaggttgcatgctcatttcaataatcaagttgcgactgtgattgactaactggataaccaatcactttgctatccgtttatgtgataacgaacccacgaagcatcagtaaatttgcctaaccacggtttatttgtttaatccatcttcgacgcaatttcttggcgtcttagtaaatatcccaattatttttcttgttattgtggcatgagggatggactggaatggatagggtagcaaataaatgtttgttttttttggtacaactgttgtctgttcatcatattcctgaactgactggttcacctattaaatatagtgctggctgatttgctaggttggtattatgctgttggtgagtgccgtatgattagcctgccttttgaaagtaataacatggaattaatcatgctgtcctcaatgcatcatggatgtaaatgcagctagcatgtttttttcttggttttggtatatttctgttgagaataataatgatcacactaaatctttatgcctcatcatactagctagaactacacctatcttgttctgtttgcaactaagctacatatatgaaaccagctaatatttttttattatcttttacagtttagtaactattcttctgtcgaaggtgtcctatattgcaaacctcactatgaccagatattgaaatcaaccggcagtttggagaaaagttttgaaggtactgaagagaaaactaaatccactgggcttgatgccttaattattgctagtgtctttacctcgaaattgttgctattgtctcatgatttttaggcctgccctaaattttgactatattatgccagggacatcaaaatcagctaaagcagaaaaatcgaatggaaacaaggtatcgtaatatatttctaagatatgctcttttatgtttttgaagcacgtccctagtatctaaattgtttggcagctttgatgtagaggacataacattcatgtccacttcctcttttatgttatccaaactgcaggggcaaccgaacagattctctagcatgtttgttggcacacaagacaagtgcgtagtttgtaacaagactgtgtaccctcttgaaaaggtcagtattatactactgtattatttaatcttcccctgttcaacttcaataaatgttataaaccaacagctgttctcctgttcagggaattaatcatgtaagcgctcttctatttatgatatggttgacaattgagcattgtagttggcctcatcatcttatgtgctccatcacaagactaattcagtggcaactgctaatgcgataaatcttatcgtgcttgttattagaatatatccacaataattagaattactacatctgataaagttttccagttgtaattaagtatcaataattttcttctcacaagcaaaaagagtggcaagctaagccaaatggagacttctataccctttcctaaaatactgaattgctgtcaaattttcacaatgttgtagaatcagttcattgacctattttttgacaatatttaagaacacatttattacatgccaatatgctatatttttagcaatatttgggcgttatatacttttttccctcatactactgcattagtcattttctgtggctaacttatgtaagctatagaagaatgcaatgttaggataaccgataagaaatgattaattcaattaatattttgcaggttaatcttaacgggagctcatatcataaatcatgcttccgttgcacccatggaggctgtactcttagcccatccaacaatgtcacacatgaaggcaaactttattgcaagacccatcactctcaattatttatggttaagggaaacttcagcaattttgaggatagtactccaaatgcaaaagtggatatcgagaagcaaccagaacatgaagatgctaccaagaatccaggaggcccaggtcaaggtgatgggctcactgagaaacctttagaaagtgaactcactcctgagaaaccgtcacaagacgatattgtggctgaaaagcaatcacaaagtagcgttgatgtcccaaaacaatcagaaagcagcacaacagttcagaggtcagaagaaggggaaagggttaccaagggtgagtcaaatagtcatgtagtcagcaagaagccattggaaagcagtgtagaaaagccattccagagcagtgcagttaacttacagccatcaggaagtagtgcagccgtaagaaaaccatggcagcgcaatcttcccacagataagccattgctgagtaacacaaccactgaaaagtcaactccaagcagtgctgccattgaggaatcattgccaagtaatggggttgatgcaaaacagccagaaagcagcactgccagcacagtggtaaaaaggccatggcaacggagggtagctacggagaatctaccgcagagcatttcgccatcagataagccatcatcaaccagtgcagatgatgtgaagccatcagaaaacagcaaattgatcagaaaaccatggcaacgtgctgtggctgctgaggcgcagatacagaacagtggaccaactgagaagtcatcattgacaaatgatacaaagccatcagaaagcaccacatcaattaaaaggccatgggagcacaaagtggtcaatgagaagccactgcagaacaatatagacacggagaagccactgcagaacaatacagacactgagaagtcatctagcagtgctatcgatgtgaagctggcagaaaccagtacaacacccactgtgccacaggaacacagtggaatcacggagaaaccttcacagaccagtgcagatgatgtaaagccatcagagagcactgcagcagtggttaaaaagcaatggcaacgtaacatcggattccagaaacagccccagagcagtgtaactgatgcaaagacacctgaaagcaggggaatgggcaaaagattgtggcagcgcaatgttccaactgaaaagcaatcgcaaagcggtgcgtcggttgtgacaccatcacaagttagtgtggctagcaccaacccgctccaaagcagcgtggttgtgaaaaagccatggcaaagaagcgtgtctagagaaaaagagccagagaaggatatatctagcaacaaaccgttacaaaaccgtgtacttgctgaagaagcagagaaaaccaatgtgactgctgataacaaatcacagatcattcaagataaaaagaacaatggtgctaccacagagaattcatcacaaataagtgaaagtgccaaaaaactaccacttactgcaaataaatcgcaagctgatacttccacagaaaaattgtcagaaagtgacatacttgctgtagcatcatctcagatcactgaaccatctaagaagccatcagaaaacactgctgaaaatgagaagccatcacagactgatattgctactgacgagctacccctgacccaaagtgtagaagccatgtcagaaccatctccaagtgatgcagctcatcaggaaatctccgagagggagatactgacagataaattaccagaaagtaccatggctgttgagaagctatctcaaactgctactctaaccgaaaagccatctaaagaagatgctgcagagaagctaccgcaaaccaatgaaccttctgagcagccacacgagagtgaagagactgctgagaagccacttcaaaatgaagctaatgctgaaagcacaacaaaacaaagtgatctcagtcttgagaagccacctcaggttgatgccaatgttgggaatcctaccgagcctgaaagtgatgccacttctggtgtgaactcatcagatgctcaaatcaggccaactgctgagcagttagtaggacctcaaggcattgtatctgccgagaagacatctgaccagatattagaagctaacaccgatccagctgctgaccagtcatcagagtcccaagatgttgcacctgctaaagttgcaacggagcaaccattagaaaatcaaaaggctgcagcttcagagcagccattggaacctcaacacgaagcatatgaagagaatccacaagagcataatagtgatgcaactgccaaggagtcatcagaacctgaaagagatactgcttctgatcagttggctgagcagccatcagaatctcgaactgcaggtgagaaggcaacactgcgtgaaagtgatgtggttaccgaggatccagcagaacctcaaattgatgcagctgctgaaaggtcagctgaggtgttatcagaatctcaaactggagttgagacaccagtgctgcatcaaagtgatagaactaacgaggttccatcagaacctcaaactgatgaagcttctgacaagtcaactgagcagccattggagcctgaaaatgatgcatctgtcgaggatgagaagccaccggaaatcgaaagtgatgatgtgcatgataaaccatcagaaagcaccccagatactgaaaccctgcctcataacactccaaagagtagcataagcattagcgaagctgcagacggcaacgtttctgaggaggcaccacctcagagcagtgcatccatagaaacgccatcagaaagtgccatagctgtcgaggaaccaaaacacgacgacgaggccagcataaagccatccgaagacagcagtgctcttgaggagccgccgcaggacgatagcgccagcgtggagccatcagagaacactataactcttgagaaggcatcagaggaagatgagggaagtgtaaagccatcagaaggcaatgatgctcttgagaaaacattggaggaggatgaggcgagtgccaagctaccagaagacagtacgacctttgagaagccatcggagaaagatgatgctggcaccaagcagacagaggaccctgtaactcttgagaaggaaccagaggaagacaagggaagtgtggagccaacacaggacaatgctggtcttgagaaaccgttggaggaagacgaggcgagtgcgaagccatcagaggacagtgtggttcttgataagccatcagtggaagatgatgacagcgccaagccatcagaggatagcatggaccttgaaaagccagaggctcacaaaccatcagaggaagaagatggcgcgaccaagtcatcaccggaggatgctgccgttgaggaggcgccattgcaaggtgacacagaaacagccactgacaaaccctcactagaagcagacaccacagaaactgcctgagctggttacagttagttagcaacagtacacagtttttaacccagatgggtggatactactgttgatactttggtttgccattttgcttgttttcttgttttgtacaatgcttgagttgtaaaatttgagggaaaacagaaaaggaactataggtattgatttgatttgctcacaagcaataagcccctcccaatattaggaggagagcagcattgaggatttgagctttacatacttacaatatagattttgcgtgtggcttgattaatttgttgtacatcggatgatgtaaatgatatttatgcaaattactgtgtgcttttgctcatttgtctctgataatctgtggagctgttcttgattgtgccttgtggcttgtggtttgaatttcaattcatccacaaatttcagaaataatttcttggacaacctgtcaggccttctttgaaatgggaaaaatttaaaaggtttttaaaataactgaactagtagattctacgaaaatccagtaaattctaaattttagggttttaaaggaaccctgatgaagaagaaattctaaaacctccccaaaacccctgtggctctgaactctgaagtcagcgaggaagggagaaggcgggagttctccatggctccgaagcggaagccgccggcgagggcggcggcggcgaagttggaccccgacggcatgttccgcggcgtctccgccttcgtcgtcccccacgccgtccagtctcgccgcctcgaggtcgcggctccaccgagcaatccatcccaacccccaccaactctctctcctgtgcttagggtttcctggctttcgtcgtcggtgcaggtgtggaagcagaggctggcgcagatggggggacgcgtccaggagaagctcgccgccaagggcggcggcggcgcggtcacccacgtcctggccgccgacgccaaggcgctgctccgggagctcgacgccgcctggctccaccgctttcgcggggtaatcggcttggctccctagcttgaaaccctaatctcctctcggcaagcttggtgtgccttgctaccatctgcattttcacagcccaaatctactgctagtagtagtactacattgagttatagagatttcataacatggaaagatttctgctaacatcaagtgattgtgtttctttctataaggactggatttttgttgcagagagatctcggctaacatcaagtgattgtatttactactataagaactgattttttttttgattgcagagcgtggtgtcattcgagtggctggaggagtgcctcaaatccggggagaggctaccggagcacaagtttgctatcaactacgaagaggaatttaagccgaagaaggaaggtggtgctgcaggttcaggtgtgttgcagtctgcaaagaggagcaaaatatcatcagacggtcctgagaatcggaaggaaactgctgggggtaatcgagaatctcgagatgcaattgcacatccaaatgaagattcggatgttgtaaaggggcctagcacgtgtacaagtagccaaagtgcctctggagattctaaggaaaccatagcttctcaaaatgcattcaaagctgaggtataagcatggtcttataaattatagtacaaactaactgggctctaaagtctgggttatgttgttttgctgcacttatcctctttggtttgctcaaattcgtacaagctccattctgaacatatgtaaacaaaaaagaggaaacactttttagcttctcctttttgtaattagcttactctaagctctaagttacatctacactgacttcaacatgactagacttgagactgtttttcttctgctataaaaatgtacgcagttgcctttatctgttcaaaaatgaaaacactgctgtagcaactttaagacctttggtggtcagctgtatatctattttgcaccctcaatggtgatatattgctctgtaccatacaacatataactcctgaaccctgaggatttatatttcctagtgttgattcattgcttatataactaggaagcctcttctggagaatcctcaacgtatgctcctccagacttgaacaggaacataactgagatttttggaaagctgatcaatatatatagaggtaaggacattgtacagaaatcttctcattcttcttattcattgtattaacatttcatatactttctctacaaataacatttccttccctttcacttgaagccctgggagatgaccgaagatcatttagctattacaaggctattccagtgattgagaaattgccattcaaaatagaaagcgctgatcaagttaaagacctccctgctattgggaaatcattgaaagaccatgtatgttaatccttttctaccattaattcatattaattggtgatttacaagtcaacatatatatttttggcctttgtacaagttcatgattctatttttttatccactatggtctatgggtgatgtagtaactgtgtcataactctgttttcttaaaaatatgttggtcttctattttgttttgctgttgagggctgaaaatttattcacaccttcattgagcaaacaggttctaaaagtaccacagaagttccaaggaaaatatgaattcatacattcatcgttctacatgtaatatctcaggtgtttgattgtctaactacccttgtatatgcagattaatgagatagtaaatacaggaaagctttccaagctagagcactttgagaatgatgagaaggtaacttggttttcagtgaacaggagtagctcttaagcattatccagccatactccctgatatttactgatttgcatatcaccttaaaggttcgaactgtcagcctatttggcgaagtttggggtgttggtcctgcaactgctctcaagttatatgataaaggacatcgtacactggatgaccttcaaaaagacgattcacttacaagtgctcagaggattggcctgaagttctttgacgatatcaaacaaagaataccccgacatgaggtatgtattctgtaagcccattgaattgttttcttttcctattattactagctattcgaagtacaatctaacattacacgtattttactctcctgttatctaggttagtgagatggagaagcttttgcaagaagttgggactgatatcttgcctggggtaagttccatatagtatttaaaggaaccatttgtctccattacatataactacacaagccattcaaaaactaatactgaagcatcagttccatgttcaatttgtctcaacatatgcggtggttattgtttcctgtagcagctagttgcttacacctattttttgtagttccctattagtctgaacctgactacttattttgtttggagaactagatgggttggttcatcaccattcctccagtcatcctctgaaagtacacatccagtacaaaaatgaggaatggggtcatcctatcgagatcctaggccgatttgattcttgaaaacaaatagctcatatatttaagattttagtagaacaataatttcccttaagtgattattgggttgttatacatgatcttttttatttggaggtgataattgtatgtgggggatcatacagacgtggaaaatcttcttgtggtgacatggatattattatcactcatcctgatggtgaaaggtatacttcaaaactttcaaaaattgttggttattgagtatgccacgtgatttttatttaagtatgatgagaaattacccatctgctgtgcgttcagtgtattctattgaattcaacactgaaccttggcaccacaccaaacagccatttagttattttacagtcatggaaagttattttctggcaacttgtaggtttggtttatcaatttgtcatctatcataagcataattattcattatgaccaagtttctattatgcggtctgcacacaacacatttttatataagaacatcaatgattaatcatctggacattgtaaaagggaccatacatttttctccagtcatgtaggctttttaccaaaatttgttcagcgcttgaagggcatcaattttttgagggaggatcttattttcagcatacacagcattgaggtaagttcttggccactactttcagagattttgagaagagtgattataaacaaatgggaaagatcacatttggtccctccacttctgcttggatttaatttatactctgaacatcaataccgcttagagcacatgtttcaaccataaaaactgttcaaataacatcccgagtatattttttatggtgattttgggtgacaaggtatcctatttacttatgggttgatatgctttaataatttaccaaagaaaatttttgttctggttttttccccaaatgaggtggtgtggataccatgattgaaaaggcagccacgtaatccagaaacactcaagaacttctatgaatgtaatttacactgctttgatagtcaatggatgaaagcaaaacaatattaaagttctggatgtaagctagaatgctagatccgagcaagagttaaaggaccaaaagtggactttttcctaaacaaattgagaaaaaaaaagataagatcatataaaagtgggctaaatgttcatatttcaaagtgctatcacacaatattggttttgtagctattaagaatatattttatgagaaagaatgaatgatcagtttttaatcttgaaggctttttaagatcaaaatatatcttataaaaatcgatggaagtagtacctttttaacatcttgagaaattgtgtaagaagatttgaacgaactggcattgctcatctcaatgcagggaactgattgtggagttgacacatattttggtctttgcacatatcctgggcgtgagctgcgccatcgcatcgacctcaaggtataatattattccagcaggagtaatttggttcatgtcatcttcatttgacaggatttgtttcttattgattaaaactaaacaaatttcaatgttccttttgctgtttgcatctccagtgtcttcaatagtcttggtcttatgttcgtgacacatcaacaaagcactgctttgttctttgtccttttatttatggcattggcatgaatgtgattataaacttacaatccttcatcttggtaaataaaacaacatttatagtgatttccccatcgactatgccatgcaatatatgctgcataacattcatgtaccaactcatgctgataaaatggtgacaattcgatgttagaaggtatacccaaggaacagacatgcatttgggctgcttgcttggactggcaatgatgttctgaatcgacggtatgcatttgagctctttagtcatacacgttatcatgatcaggaatgcaagaccacagcttttttttacaagtttcgtaattgaaacatgcagattaagaatactagcagattccaaaggctacattcttgacgacactggtttgtatcttgctacaccgggcagtggtggaaagcgtgtatgtacatgtgatttttcattccaaatccatacaagttgtttgctttgctccattcattgtgagtttttgcaggggggaagatcagatgctataattaattgtgacaccgagaaggatgtgttcgatacacttggattcccctggttggaacctcacgaacgtaatctctagcctttgtcgaaacccttctgtagaaaatgcagtttgctagagctatataccttttgtatttcccctactttctattgccagtaggctggctgtttccaaacctgtctgtagaaattaggaaaaatgtagatgtagtttgctagatttttatagttttgttttctcgtactgcagaaaagcagagttgtttttgtctttgacacttgccgcaatggtcaaactctcttttgctggcatgtactaactgcagacaacagtatatatataactctgttgtaaatccatttcttatgacctctcagacatcacaatggtttgcaaagatcataagcagagtttgcaccgcagttgtgtctatttttcagtcaaatcaagattatttctaaattcaacaatgcaaggcctcacaaactatcaagcaaccatgcatgataacacaacggcaaaaaaagaagtgatgttaaaccatatcccatcggggcaacaatgaacacaaaacatacaagaattcaggcataatgtggttcatcttgaatgttcttgtgaaatttgacaggtcaaaaggcatttcttaacctgttacactgagataataatcacaatcctaaaactctcctttctcttgacattgcctatccaagttccgcatgcagactaatgataatgctgcatcccggacactagtagtggtgtcaaatttgtaggcataaacactcaaaagtcaagaaaaccctttagtccataagtagtaccctacatggatgtgatcatgtgaagattatttacatctctctgtgcctaaacctacaactggaactaagaagtggaactagggcagcaaaaactgtgatcatcagaagctattgctgggaccacctccaagcatctcctccctgtcgatgaagcgctcaagaagctccttgttcttggtaacgatgcattcatcatccttgccaaaccaatcgtagcgattctttgcaatgtaatcgtagattgcatcccgcagtggggcggggatgatcagcagggagctcaaagctgagtagggaagaggcaggtacgatgcaactttcaaagcagctgcaaccaaaacatggaagatttagtaccctgattaccacaggaaataagggtgggcaaatatgacatgattaaacagcaaaaagtacataaagaattgctgtttattttttttccctaaatgagtatcattaaaaggatccttcagttagtactttcgatcttccagttagtgctgctatatggacagtacaaccatatctataatctatgtattctgccagattaattggtgtctcagggaatgattgagctacattatgaaaggaactgtggcctctagaaatttgtacttttttgcaggagcacagcaatggctatcattgcaataacttggttgaacaaatgcatgatccaaaaaaaaaatactagagtgtaaagcatgttgctctcatgcattactggtaaataagggggcacacctatctatcacaaacctagcaaatgttgaatcctgcatttgacacaactcataaacaccagaaagaagttcagaggtgatcccattcagaaaatcaaagccataaccacagacactagatggtactgaaaatcacccaaagcatttatcaagtggcctctaaactccaatgccctccatgatggcattcttgcagaaaatgacaaagaaatccactgcatttcccaacgaattttgcctcatgccatgcaaaattgctacaaattcaaacaaggtatgcaaatccagcgagtacagggtactaactatcactcactggtatccatccaccaatggttgcaaatttttctaccactcttagatccccagcattgctaatctactagtccgttgatacagagcaagtttaatagtatagcccactactagctctaaatcatctatagccaatgtaatagccaattcatacaatagttgcttattacactattaatatctggtcccacctgtcatacacacattacgttttggagttcgtgctgtagctggttacagatctatagcccgctgttcttctctatcttcatttatctctttaaaatatatttatagctggcatatagtatgctattgtacctgctctaacaagtagccaacatgttcttggaaagatcacaacattgccccgatttccgaatcatcagagatgcaatgctaacctgtggatccctcgtagtaggcctcaggcccctcgatgaagaggactcgccgcagcacgtcctccctgtccatcccgaccagtctcaggtacggctccgcggccttggactgcacgcagcagaacctgatcttggcgtgcttgtccgccttgatcacccacttcacccctgcaatgcaaagccccaaaccgcatttcgatcacaaccaaatgcccccaattcgtcgccgattcgaggtagaaatgagtccccccacaattgggggcctgtacatgtgctcaccgcggtggcagaggtggcagacgccgtcgtagatgagcacgcgcggctgcaggacggtgggcgcagtggccgcgatggagacggtggcggcggcggaggcggaggacgcggtgcgcggcgggggctcctcgtcgccgacgacgacgaggtcggcggccgcgcggggcgcgtagccgcggaggcccgcggcagcgaggagggggcggacgcggccggcgagggttcgggtgagcattctctctctctctccgccggcggcggcggcgcggcgaggcggtggttctacacacaacacgcgggtgttggtttccttttgcttgaccgctcactctctccaatttattttggacattaaaagggccttctggcttggagggtaagtaaaaaaaaagttttatttttccatttgtgcttgtgtagttgccaaagattatgtgtgcttatttttaaagaattatgctcatctgcaaaaaaaatggtgcattttaattaaaccctaataaaattgatttgctattacaacaactataaaaaaggggttcaatttactccatcacggtattttctctccatatgtaagttgtatttcacactgaaatttgattggatgatagatgggtaacaatttacaacttatgtcttattatccttttagaatattttttataggtgtttacataggttggaaatacctaagattaattttgaactttgagattttaaagttcaagtaaacgatcatgaaaaaagttgcaaatattatttgaactttgatagtggtgtctctatggtttaaaaaatttcaggtataaagagaaagaaaaagaagaaaaaaatgctattagtgagtacagtgaatcattttcaatagtttagagacaaaatgaaccaaaaagtacttaggggtaaattagaaaaatattttagtggttaagtgatccaaatgaaatacttcgagcgagtaagattgattttttctcctttttgttttccaaaatagatatcataaccaatttagtgggattttccttggtcttaccactcggccctgcacctttagaattctaaaaggcacatttttttttgtcaaaatttgaataataaaacttaattttagagttaatttaaagatttttcatcgtattttttaaacattaacgtttaagttgttattagttttaaccgtaaattatttttaatcgataatatgttgtttggcgcattatccgtaattggccaaccgatgaaagcctgagaatgaaagtatatactaacatttatattaaaattatttttcattgctttcatcactaatgcttcgttcgttttttattaacttttgcaactccattcaccgtgagcatgctttctaaacatcaattgaatggtgcttttttttacagaattattttatatataagtttttttaaataattcaaataaaaccatttttttaattttgtaatagttaaaacttaattaatcactactccctctgtttcatattataagtcgcttttgatttattttctcatttcgtaagtttaaccaagtttatagaaaaatatagtaatattttcaacccaaaagttttatatgatcacaatatatttacattcaatgttacatttattgaaagtaaatttaaagttatagatattgttaattttttttgaacctaaaaaagtttaattatacaaaagacaaatcaacttataatacgaaacgaaagtagctaataacatgtctcagtttcatgtgcaagaaaacagctcagtacaaccgagtatatgtcccttttcaagtcacattcaaaatattgtaaaatattggggattctaaaaagttaaaaggcagttcagattgtaatcaaattaaaccttatcaaattttgtcattggcaacttagtaatattgccaagttttaacatgatttcttatgtatttattaaagtttggaactccctccgtcccattttatgtgcaaccatgattttccgcgctcaactttgaccgtccgttttatttgattttttttcaaaaaaattttaaaacataagtcacgagtaaagtactatttatgttttattatcacataacaacaaaaatactaattataaaaaaattcaaataagacggacaatcaagtttgtgcggggaaacttatggttacatttaaaatgggacggaaggagtaaaaactaagggcttatttggttctctaccctacctatttattggtagtgccaaaatctaggcaaattttggcactaccaattttttggtagggaaaagttaattagactacttttggtttaataccaatatggagccaaattttagtagtatggtgaagaatattctagaatatgtccaaattgagtatgggcactatcaattgtttggcttcaaaccaaactagcatatttactatttaaattaccaaaattttggtagggcacagttttagcttcaatccaaaacggtcctaaatagatgcacatctttaacgacatttcttaaaaaaaattggtatagtttaaaatgacatcaatctgaacaatccatagaaacatcactagcctaatgctgtatagagaccatgatccatggagtagttttttctgaaaaaaaaatgtttttttcatttttttatcacatctccttccagattttgttcctttccaaacggtgaaacggtagaacccaaaacctcaactccaggagcttccagctccagctcacccctcctctttcacgataagaggcacccagacgaacacctaagctacgcgcgcgatgctcccatgggcgccgccgccggcgacggcggccaccacctccccggcctcgtcggctccgctcctccgcgccatgccccggcgcgcgcgctctccgcgcctcccaccgcccccgcaccacccttcccctcctccgccgccgcttctctcggttggccccggggcggcgccgcgcgccgcgcgcccttcccacggcgacgtgttctgggaggagccggacgacggcggctccgggagcgacgacgaggatggggatggggcagaggccgaggccgagcggcaggaggccaccgggcggaggagcagcttctcctcgttcccttccccctcgctgttctccaggctcggcgccgcgcggcggcaagagcagcgagaagaagaggagcttcgaggaggtattggttcatctgctgcatgcgctagacaaatcaaattttcttttttcatttttcagtttcttgatcagctgaattgaaatgcttcatgttctacacttaattctgtcgaatttttctgtctagaaatcgagcttctcttgacgcctgaagaaatggctatcctggatcagaacgagaccccggatatcaccaaaatatcatcagtaagtgtcactctgtaaatgtctgacagatattatattttggtgtgtcataaatttgttacattgctacagaatcttgattaaggaaatgtgcacaccattgatattttaactgttcccaattcctgaaattggactgttttgtgcagccgaaatggcatccacttcatagttacgcattggcgctgcagatacctctcatggacagcctgctcgatagtggtgtcgatatcaatttacttgacaaagtatgttctttctacataacatgttgaggaagcatgtttcatgctcatgattttctattttggtgcctgtgaaaaaccccatcttggattatgcctgtgaaaagcttttgcgcattcacgaaaaagaaaaccgtgttaattttgggagtgctgatgatacaggatggtttcaccccacttcacaaggctgtcataggcaaaaaggaggccgtcattagccatctcctgcgaagaggggcaaatcctcatgtcagagatagggtaaccttgcaaggctgcaatctctttctatgaattatgtgttccataataacattagtatgtggaatatagtaaactttgtgatgttagcgcctatcacattgatctggtttctctctctagcaacataagtacataacaatttccactccagtttgagatattttttatgtcatgttggcccttgaattaaatctgtctgatttgcaggatggagccacaccattacattatgcagttcaagttggtgccctgcaaactgtgaagttactgattaagaatagggttgatgtcaatgttgctgataatgtaatgtgctatggtgcttttttttttcttattagttcaacccttttcagtgccattgatttttcttttattttgtctcgtttcatgcaggatggctggacaccgttgcatttagctatacagagtagaaatagagatatagcaaagatattgcttgtcaatggtgcagataagacgagaagaaccaaggtatgttatgcccctatggtttactgggtttttttttccggaattgcattatcccaaaaaattagacctataacagctgcctcttgtgcactcagagccttgattttatttggcaaattggcatacattttcatgtcatttttagccgcttcacagaaattgacttctatggcattgtcatctcaaatgctcgtatttccatggacatcagctttgtattacagtctataggccaatactgctttctgatctcagatttggttacaggatggaaggactgccttggatataagcttgtgttttggaagagatttcaagtcttatgatttggcaaagcttgtcaaacttgttccggcaaatagaaaaatgtgactcagctctgtcacaagaatcagagaaaaaaaaaagatttagatgttagcaactgttgatttgggtcattcctcctattgtttttaatgggatgattcctccaatttgctatagttgcttgttcaatccatttttagaacctgtttattttagagaagttgtctaatcctgattcatgatcaacttatgtaaaggggttcgaaaaagctaatgccacaatggaagaaatagccaaatttagatgatctttttcttatttgcaaaccgaggttcctcagaggcgttattttaaacgtttgatgtgttaccgttcggctatgtgaatacaaagctggctaagcaaacaggacacctccataaaatgatctcactgagattgcataacagtcgttttgtaattggattaataaaagaagtaaggatcaccacatacataagcgagcgttaattataaatatatttttttcatatcgaagccaagttttaaacctcagatgatttcatttggcgtttagaaagagttgagaaatgcacctgtctaggcaatgaaacagaatgggattgcacataaacctcaaattttctgaacatgcaattatcacacgactagctacagtaagggcgcatgtttctacagctacagataagacacatgtttctacagtaattcatggggtttggcaacatgtcactgcaaacttccaaacagagcatgtaaggtagacaaacatttcacacatcattactatggtatgagtaactagtacaccttaaacagcaaaattcatgcaacataaatttgtagagatgacacaaaatccatacaataggtgcaatggcactgcaggctagtaaattcaagagttgcctactcttgcaaggagatgcgtctaaagatggcctggaaagtctgacctccatttcttgcaaccttctgaccttcttcagtggcggtagacagtagcttgacaactgggtctgcttttgtctcttcctctgggatagcttcgaacagcgggtgtttctccaggcatgaccgcatccattctccgagctcctccacatctgtgattgtatatatgattcctcccacttccatcacataagcatactcatctagcagctgcatgctgatcaccctccgccggtggttcttctccttgaagtgaggatcagggaacaggaagaacattttcgaaagctgagccttcctgaaatagtttggaatgtatttcatcgaattggtgcgcacgacagatatgttgtcgtactttcccggattcgatgctcttaaagccaaaatccgctctttgacatactcagtcacctgaaaaatatagacaacgaagaaaaaaatgaatcaaaagtaaatacgtactagctttgaaaagaaaaaacttccagttcttttgttaagtagaaatacatgtctattgcataatataataccatcacaaactaaactatgcaacttttgtctagtagaaatccatatttactatagaatctaaattggaaggcaacccaaattcccaatatttggtacactaaacattcatgaagtaaaagccatgcgcgatctaatcattctacaaaggaaagctcaaatggtctctatgagtaatgtaacactgaattcttcagtgtcaccttgtgctgttatccattcacacatgaatgtatctctactgcccaatcaaagtttagggggaaattctaacaaaccttgtccctgagctccatgccgatcatgagggtgtccgggaagagcgtagagaggccgacgagcagcccgccgaacccacacccaacgtccgcgaagcggatccgtggcaccgccgcgtcgccctggcgggcctcgccctcgccggaggggaagtaccgcgggtagtgctgcgagaggtctacctcgtcgggcgatatcgggatcgggaagtgcgagtcgctgagcgggttgctgtgcgcgcgcgcccggtagaaccgcttccgcgggagcttcccctgcccgccaccgccaccgccgttcgcgccgtcgccgctcgccatcgcgccgccgtccccgcctgcagctgcttcttggtctgggagaggcattacgccgaacacccggtgagcatgtcactcgacgcgagcggtgttgtgggagagggaagcgggagaggggtggggagggagtacgaaccggagagagagagagccctcgcgagtcgggagagcgggggattcgccggaccggtcggcggcggcggcgtcgtgggcggaagctggcttggcagcgagtctcgagccgcgcgggttagggcttggatgttggagagggaaatggaacgaggcgggggaaatggattgggccgcgcgagttggtttaggccctaagctgcagcccagcagcgacgagatgggccaagtgccgcgaaggccccgagcacaccgggtgttcggcgtaaggaaaaagttcagctgaggtcccttatgccttatcttgttatcgtttttaaaattattatccctgaatagcagatataacacatcccgaattttacaaaaccggatcacattggatcccgaggcagtattgcttctggttttgtacaaataggaagtactccctgtgtgtttttcttggttttgtcctttatcaaactatgcaaattttaccaaatctattaaaactgcgataatattacaatatcaaattattttatttaattctaccattcaatataattttttagaatatttttgtttagtaaacttgattagagtcgacttgataatgtttgatttatgacaaaaccagaacacctgatattttaaaacggagatagtatatcactacgttagtcatcataaatacgtctgtaatgtcgcatgatttttttattatatcttggttgatgttaaaagtgataatcagaatgagttttgcaagagcacaaaaaagtggaattggtgaaaaattgcggctgcatgcgaagctatatagatgtagcagcatgcaagttgtctacttgtctgcgtataaatctaccgcttcaaatcaaataatgatgctcgtcatagtattatcatttcttcagaagaatatcttcggctattactccctccgtttctaaatatttggcaccattaactttttagtacatatttaaccattcgtcttatctatatgtatacatatacgtacatttaaaaatgaatcaaatgataggaaaagaattaataattactaattttttttaataagatgaatagtcaaacatattttaaaaagtcaatagcgttaaatatttagaaacaacggagggagtattattcacaggagcatatctctggccacatatatttctttacaggctttagcagtgaagattaatgcatggctagctagctagctactccctccatccataaatataaaggattttggttggatgtgatatatcataatacaacgaatctagacaggagcggttggatgtgacatattctaatacagctcctgtccaaattcattgtatcaggatatgccacattcaagcaaaattgcttatatttagagagagacatagggagtagttcgttggctctgcagactgcagcagtgtcagctcgtgatatactcctccccagtgtgttgaatattggggctgtcagtaaaaacttgagcacagaaaagggaccttactaaaaatggagcatacaacggtaaagttcacccgttgtggaaagttcccaaacgttgtttccataggagtcgggccgtgtttcaacaccgctgataattcaagtttagccagtcaatttcgtccttttaataaaaccagtaatcatgcacgtgcaatacatgttctttccatcataacatgtttcgactaaattttacaatttatcagcatgagcccttaaaaatattggcggttcatcttgagaaataaagcaacacttcaatgtgtaaaaatacccactattatacactggaatccatgtagctaagaaataaatctatttaaacagaagtgaaacaagcatcatttctattttcatgcaaacataaatgaacaaacaaccaattcgtgcacataggaatccatgtagaatattaattgagaaaacacactcattcttacaatctaatttgaagaggaggtatatattataaatccacactcacattattatcctttcatcacaacaataccatatagatacacccccaagtgttgcacataattttgttaaaacttgagtgccccgggccatacctggaggaccacctcaacaaatccacaatggatttagccatgcagaatcgatcatccaaaaacaaattcctaatacatgaataaagataggtcacaagttttagctgagaaaaatatcacacatatacaattgtacaaataaaaagttatatctgcaatcgtaccagcagacctgtaaaggcacctcaactctaatgctaacatatttgtttccatttggcagtggaactgatcatctgcacagtcagaagaaaaagaacataacagtagatttgtcaggatcaatggacgtgcaaaaattcaccgtataaatgttcaatgggtgaattaacaatgaaaactttgatgtcaggtcacaactctaggatcccacttacagaacaaccaagatttttcaagaaatttatttctgcttcaatctgcagtttccgtttaaccaatcatgaggcaagtatgccaaaattttagtggtttttcctaacaatattgcctataaactataattacttcactaatcctgaacctatttcgataaaagaaaacctagaaaatccactttgcagtttgcaccacgtcgagcattctcattctcattgaaacaaaataatagatatttttgtgtcattccaccaatcatatagatcatctcctccaaaactaatttgtgaactatgggaatttgtccatacatattttagatcattaaagcatctgatagtacatcacattgtattcctaattctgtaagcaagatatttgcacgcaggatgtttttttagagaaaaggtcgaagaacgaccctgcttatatagaaagcaaatttgtcttgctggggattccagcttacatcaatgtgcatacatcgaccaaaagaggcccctccggcctagagaaacaaccaatttttagacagcagggacaacacaagacccataagtgaagatacagcaggcgcatcgattcaaaaagctttccaaaacacctccacaaagtaacagacagcaaaaaaaactctaactaacccaccccagttctgatattttgcagtccagcacagcattccttcagtcttcttgtcagcaactccagttcatcagtctccacacctttgaaaagtggtttccactgcttgtctttgcactcaggatgttgataaaatacaaattaattagcctcattttgttggtaaagggatgatgcgagtactattgcaactgcctcctagcatcctttccattttgttttcctggccctttagctcattttcacttctagaaaattataattggtaccctttatatttagtctaaatcaagactaattacctcgtctgaatagaagccaaagcatgtgtaggcaccaattgttcataatttactttccaacttccttaaatcctaattaaaaaaagtgatcatgatataccggtaatcacatgacctgtagcagacaacgtggtatgttcaatttataaaagagcgtatgctataaaatttatgtgtattgctcatgtatcaacccaacgaattcattgtaatctagtaattcaggttcagatgaaagatcaacatattggctattcacttaataaaatagcatcaatatgaataccaggtataggtacataccaagaaaatgttcaggtttgctctgttattccaatttcttacagattttcctacaaaattaaaagaaactgcagtatttagcaccaaacacagccaatgattatgcattaaggaaaaactacataatttacaaatctaacctgaagtagttaatgtaaatcttcattggtcatgagagcaacatcatatttcaaatagcaaacaccatgttcaaaactattatacataaaaatattggtaattggtgcagcccactaattttaggatgattttttaaaaaattacctcaacacaattagaagaaggatcgatgtagactattgtagggtttacgcaaatacatggggtgcttgactgctcgatccagcggttgtggcatggcggttgtgggtaggataatggcattgatgttgtctcggtagcgaccggggcgcagtacaacggagtacttgaatatgttaaaatagctcttcaatttggtgctaatataaacagactcatcaaaattccccaaatctacctcttgaaatgttgatgctttcccttccttttcaatccatcttcccaattcccaaatccacaaatcaggtattacaatttgcaaatcacaaataagtatatgagaagagaaaacaggatcccaagcccagctagcaaatgctggccgactgatgcggtcctgtttgctgcttactagggaggcagctgattgctcctcggcgcccacccacgtgctggctttctgcccgcacaacacagttgcattgcgctcttgtggcgccgccgccttggcctctggtagtcaggcctcggcccaccaccaccgccaccgcctttcgtaacgcatgccgcccgtgcccgatcaccggcgccgcctccctcaatctcatacgctcgcggcggtagtggcggctagggacgacctcggctccggcggggacagcgatggagggcagtggcggctggggacaacctcggctacgtcagggggcagcggtggagtgcggtggcgggtggcggtggctacggccgggggcgaccacggctcggtcttcggtgggggtagctgtggagtgcggcaacagcggcgacagccgggggagacctcggttccggcggggcagcgatggagtgcggcggcggcaacacggctggggacgacctaggcttcgacaggagtagtggaggaatgcggcagcaacggggacaagcaaggaggagcgaggagcgcggaggcggagtcttcgcgcgagctaaaatcatgatggatggatagggtgaaatcacggtcgctgtgggaagggtgaaatcgccggtgaacggtgcggattagggattaggcgatgcggatgcggatgaacggtagggattgattcgggtgatttggcctgtaggattggagggggacaactcctcctttttatattagtatagatatgatgttgtaagtttaaccaccagccaaacaacgttcttttgctgagttgggatcctctcctgtaatgcatgtgcagtaagtgccaatgacatgtgggcccggtataggtgggacccacatgcatgtcagtgacacgtactgcaggtgcagtacagcagtggatttgcgtcctcttttgctaggttctcaacttctgcactccatcgtttttagcttcccgagctgttaaacatattttgcaaaaattttctatagaaaaattactgtaaaaatttataataatctattttaaaaacttttatttactagtacttaattaatcatgtactaattcattactctatttacgtgtcggtgtgaaatgttcccaacacagcctgacgaacgacacatcatcctcatctctaggtagcgctagctgcgcctctcgcagattcactacaaatgaagacttaccggcaccggccgcgggttttttgtcatggttgtacaatggcactgcttttatcatcatgctatgcacactactacatgaaagatttttctggacgccgaacccttttgtttccaggcggaccatatgtggaaccgcacaggaaaatggggggaccggcgctaggccatcgctcacacagaaaaatcaattttcatgtgcgggtccacatatggtccgcctggaaacaaaggggttcggcgtccagaaaaatctttcatgtagtagtgtgcatagcatgatgataaaagcagtgccattgtacaaccatgacaaaaaacccgcggccggtgccggtaagtcttcatttgtagtgaatctgcgagaggcgcagctagcgctacctagagatgaggatgatgtgtcgttcgtcaggctgt

SEQ ID NO: 9434 - DNA, 3107 bp, Oryza sativa
  unsure (1)..(3107): unsure at all n locations
attagtctcacacctctcacataattatgaatgtaanacctgataataatttgctagcctcctggttgaagattagatctgtacagccgggtatggttgtccagaatggttgggcctgtcaagcatgggtgtgctgttcagtgttattanaatttctgattaattactccactgttttacttctcttaaatgttttgctgaatgctgcttttgcaaatgagcctatattaggccatcctttggtattcttgtgcacttgcatatttgctgtgtggcttgctgagtatgtcatatgctcaccttgcaataatcaatcaacctcagttgaagaaaaaggatccagaaggagaagacgtttggcttataccccagttgagctgcctgtgggagtggagccggagcttcgctagattttattttccgctgcagttttcttcttggtgaggactaagtgcctcttaagtaagtatttatcgttttagttaatttgatgaatctgtatattaaattgtcagtttgtgtacctcggctgattcctggacgaggattttatgcacaaataagttcggaaattactagtgaatttccgggcgtgacaagttggtatcagagccatctcgactgtaggataagccaaatggtcaaaccttaaggactaattttccaaaaacatgttttgttaaaattttcctttcttccttctccagaattctttgcaaatcattttatcatcctctcccctcctgctttcaacttgagtagctctaagacattggaacttgaagacgccaatgaggtctacttatggaggtcagtcaagtggatcaaggaaggactgaagtgcccagatgtcaagatggaatgaagtttggatcctaccttagaacctatgccgccaaagtgtctttgaagaatagttagtagggtagaacgcttgttgtttgctttgtgtgtaggtatggttgcattcccatcattggagtagttcaatgatgagtgtgtaactatactaggttgcttgcttaatcaacttgaacaatataatggtctacacacaccagatcagtggtaacatggttaaggtcttaactttagcgtaacccctctccttctatcttctctaatctgcaacggatggtgaacactcgcgccaataaaagtggaaataataacaatgaagggaacccaactcttgctcaagttctggctcaacagactcagttaatgaatatgatgatacagcagatgcagaaccagctcaaccaagggaacaacaatgctccaccgccgcagaacaagttagctgattttcttcgtgtgaggccacctacattttctagcactaccaacccagtggaagcaggtgattggctgcacgctattgagaagaagttggaactgctccagtgcacggatcaggagaaagtcgttttcgcttcacatcagttgcaaggacctgcatcagaatggtgggatcatttccggatgaacagagcagaaggacaaccaatcacttgggcggagttcactgaagcattcaagaagacacacatacctgcaggtgttgttgctttgaagaagcgtgagttccgggcacttaagcaaaaggatcgtaccgtgacggaatatcttcatgagttcaatcgtctggcacgctatgctccagaagatgtgtgtactgacgaggaaaggcaagagaagttcttggaaggtctgaaggatgaactgtcagttacgttgatctctcatgactatgttgattttcagcagctggttgacaaagcaattcgacttgaagacaagaagaacaggatggataaccgtaaaaggaaaatgactgtattccaggaggcacaaggtagtagccagaggcagtgtatcaagccactccaaattggtgaatcttcttccgctggtcaaggacagtcgcagcagttgaacatcggtggtgagatcaaatcagagactaatgaaagcaaagaagttaacatcgagcaagctaatcagccggtgccagttcagcagggtcagtttcaagagaataacagtagtggaagggagcagcaggtatgtttcaactgttacaagccaggccactttgcaagagagtgtccgaagccgaagcatcagcagccgcaaggtcaggtcaacaacattgttgtcacaggagccaatgcagtgccagttgcgtcttcaagagtcgtgtcttcaagtgttacagctcagccaccagtttcaaagcggcagtagtttctttaaagccttagaataattatcggagttatggaataagatagactgcagtttacctattccctttttctttctagccgttccgaatctcgggacgagattctttgtaaggggggtagtttgtcacatcctgatttttatttcagggtttataaattatttaataaattaataatagaatttatattaagtgttctttaatttacaagtgaagtaaaatgtggaaaataaaattttctaaatctaaagcatggatggatttaatttttttattaaattctccatgattaagtcaactctctgaaattttctcggatttttcagagctcaattcctaaatgatacaaagaacagttcagtaattatttgatcattaatgatctaattataattgttaagtgcttttcttgtttaaaatccttaaattataaattgttgtttaaaaggaattattagaaatgattttaaaagcctaaaagagaagatctaattttaatttgttaaatctcaatataaaattgggctagataaaatttcattaaatactttgcttaattctataattcctagatttttctgggatttatttgagctaaggaagtatttttaataaatggaattgcatttaagaaataatttaaattgaaaaatgtttttaaaagtcttcttttggctttgggccgaaagtcggcccaaaacctctctctttccttttctccctccccggccagttggcccaagtcggcccagtccgcgccgccgtcttctttttttttaaccggtgacaggtgggtcccggctgtcaagcttgtttttctcctccggccggcgccgcccgaaaccctaacgcaagc

SEQ ID NO: 9435 - DNA, 754 bp, Oryza sativa
tgtccatcagtagtggtagctgtataaaccagacgtagaggtaagggcactagtcagcagcagacgagacgaccggcgatgaatatgtagatgcccaacaacagcggcataatacgccaatcaacactggcagaatcatgcagccatggaagtgaagaaaccagtcggcagccatggcaaacgtaggcagcttgtgttgaagatactgatgcctattagtagtgacagcgatgtagccagccgtgaagaagatagcatcagttggcgttataacaggccagccgtgctagcggtgacatcagtcagtggcggatgcggcggccggccggtgaagacgtagacgcccaacaacggcagcataataggccagccgtgcaggcggaaacaccagtcggcggcggtcgaggtggccggtcggtgacgacgtagacgcccaacaacggcggcataataggccagccgtgtaggcggaagcaccagtcggcggcggacgaggcggccggtcggtgaagacgtagacgcccaacaacggcggcataaaggccagccgtgcaggcggaaacaccagtcggcggcggcgaaggcaagccggtcggtgaagacgtagacgcccaacaatggcggcataaaggccagccgtgcaggcggaaacaccagtcggcagcggcgaaggcaagccagtcggtgaagacgtagacgcccaacaacggcggcataaaggccaaccgttcaagcggaaacaccagtcggcggc

SEQ ID NO: 9436 - DNA, 9599 bp, Oryza sativa
cgacaccgccgaggccgccgccgccgcctacgacgacgcctgcctccgcctccgcggccccggcgccgccctcaacctcccctcccgccgctgcgtcgctcccgctccgcctccaccgcctcctccgccgccgccgacggccgaggagaagaagctgctgctgttcccgccgccgctgcctccgaggaagaaggcgatgctattcccgctgccgctgccgccgaggaagaagccgctgctgtacccgccgccgctgccgccgaagaagaagccgctaccaccaccatcaccaccgccacagccgccgctgccggagaaggagaacaccccgctcccgccgctgctgctgcctccaaagaagaagccgcttccgccgccgtcaccgacagcggcagcgaaggaggagcccatcgagctcgagcatgcggcgccgccgccgcctttcgtgccccggccggtgtggcccctcctggccagcggcggcggcgggaagcggaagaagcagtcgggctgcggcggccgcatccccgccctcaacaccgccgccgccgccgtcgaggagaccggccgcgcctgatcctcctccccggcgacatggatgccaccaaaaaaaaactaaaaaaaataaaaaaaaacaaataacaccaaccatcctaatgtgaaaagcttagtggatcattccttttgatgtgattcgatgatgctgttaatctaaatctgatctgatgcgattatcttctttttttattttttgtacatacatatgctttgcttctcctgcattaggatcttgggagaaactcaaaaactgatctgtaatattttctgtaatatcatctcgtctcatgtagttgtgacattgtggtgttgacattgtaacgaatcggtcgattcgaagagaacttgtggaaaaagaatcgagtcaagattgattcaaagcctggtttcgtttcgtttcttggatgttgtcaaaaagctttggttctgtttgaagtgcttctataatcttcagctgtcaagcttctctaaacaatttagattttcgctcggtttatgagaagctgctcggtttttaagaaactgtagttgtaaaatctttagtttctctatattttatccgttatttcttagaattttagttgtagaaggtcgttcagattttcgcccggtttataagaagctacttaatttctgagaagctgtagttgtaaaatttttagcttctctatattttacttgttgtttcttagaattttagttgtagaatcttcagcttctctttcttattagttgttttttaaaattttaaactcctcaaccaaggtcatagactcatctggtttgcttggtagagggtaaaaaagagactagttttttaaggatgagttggatgctgtcatcctggcgttcctgtggctgtggtccaagccgttggatttggggcgtgtggttgagatgagatgagatgagatgaccgcagcaagattattatcttccttttcttctgtttgtttagtgcgtgtgcacgtgcattcttcttgcttttctgctactgctgctgatgtctgccagcagcaggagtgagtatcttgacatcgagtttttgcagtcgcaggttggtcatatggattgcaggtgtaaaaaagaaaaaaaatacatgggagattgcttcttttagtactagtcgtgtgatggagaaacaaaaataaaagcttactttctttttcgatccgttgtgttcagcagtagtttatttttatgtgtgacttggaaatatctcatgtttgttggctacggtctgcaccactgtttctgtatagctgaatacatccatgtatgtggttgtgctagtattggaaaaatcttggagagtaggataaatacttgtccaccctgacgaaatcagaaattgtcgagacttatgactcgagtaggactcaactggtgagatattaatttttttaacacattacatagtggtttatgaagatttaaatataattatggaggcaaacctagagcttaagttcaagctgattttggattacctacgcccctgcttgtttatggctgcaaatgttggaaacatcttagaggatgattttttttttaaaaaaaacaaattaccattaggttgatttagatttagggagtaggagatatggtgataccatggtctcaccactattaccaccttattttcttttcatggataaagaaagcgtgattgtattgaattttttttatttataattttttttattaaaagttttacaaaaataattttccattttgaaaattgacggaaatagtcgcctaccgccctctgggagggcgatttttaaaaatcgccctcccagagggcggcgaaaatgacgtggcagacggccgttcgctctcgggcgacggccgtcaacgaaatttgcaggcggcccccttgccgccctccgcgagggcgattttgtactgtgcggggggccgcctgcaaatgggcggcgagggggggcatggaaatttgcaggcggcccccttgccgccctgggggagggcgattttgtactgtgctctatattttttttatataaatatcaatagttatcaaatctttttatattgaaaactatacaagattaaaatctccaagattggtaaaatacaattttattattttttagggcatatttggaatgttaccgtacaaatattttgttaatgccaaaatataagcaagttttggcactaccaaatatttggtaaggtaaaattgcatttgatcatatttggtttgctgccaaaatgtaaaattgtagtgaagaatgttgtacataatctcaattctagattacgtattaccaattaataggcttccattttcgtgtgtggtgtggtagtgggaaagaagatatgaagaggttgccttcagattgtcaattatatagcgtcgttttcactgcaatatatgtgaactcaatgagatacattattcattagatgtgacaagacgatcacgcgtgggcgtgattcactttatgtcaacaggcagcgccgaaagttgatagtgataactcgagctgccgcttttcatgtgtgctgttgtggactgtgcgcgctactggatatggcactaccgtgaagcgccgaaagtgtgttgttgtgagcataagttgttcaagcaccatacgaatgaaaagaactacgtagacgagacaaacacaagtagtactgcagtagtaatagcaaaagtagtactgctttacaagtttgtaagccaaaagaaacggtcacataaggactgaagaggtagaacactactgacgaggcctcttacccctgtccctcctaccctgcgccctaatgtgcccctgggagtacgtgagtcggtccgggggtacggcacggccaacccgtcctgcctgtacaggtgtgacctctggctgctcctgagtgtgcgcctctggagctcctccaagctgagaggagcctagtacgtcctggtggtctgcaccgtgcaagtcgtcgtcgtagaactggctagtaggaccagtcctaccggcgtgagacgaagaggccccagtaccgaagatcccggctgcaaatcctgctggacaaggaccatcagtttcgtataggtatttaacagtattaataaaaagtaaagtaccgtgtgggcgagggatcgacgctccgtgagaggaagagctggcgaacgcgcctaaagaggtggcgaacgcccctgcggagctcgcggaagcgccggtcgtgcctgcgaacgcgctcgaaggcatacgaggtcctgcgatgaggaaacgtgcagttaaaacatggtgacacattcgtgcaaaagctgaaacaaaaatgaactaatatctgggctgaactgtaccgtgcgaaaccggtgctgtaggtcgcactgctccgaagctaggggcgctcgaagacaaacgaggtcctgctccgacggtaggaccgcgaggccgtgggtgtaccggaccagctggaggtacgatgtccacggcgctgcgacaggagaagacgcgcatgaccgcacgcatcttctcctgcatccagtcgaaggtcgacctctgctcaacgtcagtcaagtgcaaacctctgttcaacctcacctggactgcggtgatatcggcactgatatcccgtgccgcatcagcctatgcaagatggaaataaaaaattcagtagttgtcctatattatgaaagataaatgacataattgttggaagtaatacaaattggacgtaccgccacgaagtagtctcggtcacggtgcgtgggatacgcgtccgtgacagcggcaacgtgcggctctggggcgtctggagtgaaggtcacacgcgcacgagtgcgaggaaggtaccagcgaaggtagtcacggtagttctcctccgtgtgtgggaagagctcgttgatcacctcctctgtagctaacacccagtcgtcaacgtattgctgtacacgtggagcccaaagtgcgcctgctagctgtccccgtcgagtcaacctgtgaagagaggtaaattgtatggctcgatgatgtaattatcataaaaatttagaaatgaacaatccgaactcacgagtggtcggcaggggggacggtcggctgcacgttgccgggaaacacctgcctaagtccgaactgtctcatcacacgctgcggccagtgaggctcaacgaaaatgtcgaacaccattggcaggatggtgagccagtaagcctggtcgcgtgtgcacaaggacgaaagtcctagcggtgctctcgcagcgacggcctcttctgtgtacggctcccagatgacgtcgctcggctggagacggtcaaactcgaacacgaagtccgggtaaccacgtctcacctggacgtgagcgtaacgacgctgcaataaacatgatcggaattagacatgttatgtgaaggaaaaaaaaagaagaggactgataaacttataacgcagcgaagttgcactaaccccacgtcgacaccagtaagtccccatcgtgggaccgtcctctggccactgcgcgctgcgaccaaccccgtagggtgcgctgtccaccactggtcgccctatggcaaacctctcggctgcccaaagctgaagcaacataggacagccagcgatgatcgctcccgcgtcagtcttcgtgcacgcctcacagagggcacggtacgtggctgctagcacggcagaaccccagctccactgcggcacgtcctgtggctgagcatccgcgatggaccgtgcgtagtggaccagccggaagtccacagcgtgcccgtgggtgctagtgaacatcacccacccgaacaaccacaacaggtacgcctcaagggagcgtcggaccgagtaatcatcagcgtcagggtgcagaaggtccgcctacagttaagaatgaaatgttagtacaaaacactgatccggtcgcaaataagcacgtatgataataacaacttatttacttacagtgaactggagcaaccaagccttgctaggcccgactgtagagtacggaggaagggtggtggtcggtcctaggtgtggaaggcgcatcacctgctcgaagcgcgcagtgatatcctccttccacccaaaaacaccgtcgacgggaccaactggtgctcccgccagcggtagcccgagcaggtacgacacgtcctgcagtgtcggagccatctccccacagggaaggtggaacgtgtgcgtctcaggtctccagcggtctacaagagcggcaaggagtgaccggtctgcatcccaccgcttcgctgggtcacggtcgtccgccgccgcctcaacaagcctacaaagtggtagaaggcctgccgcacgcaacctgtatagagcaaacttcaaacataagtataaaacaaagcaaagttgagttgaaatgtgaacatacgcgtaccaaggaacgtgacgggggtcgacacgcaaccactcgcgcgacgtgcgtggacggaaggtgccgagctgtgcaccctcgactgctgacaggaacgagcggtggttcctgtcaatcccacggttcaacagcgccggtgtgtcgtacgccatacctgcatcaaataggttgatcagaaacatataaataattagttcaacataagtaataaatgttcataagcgaattactaacacatattaaacaagagtacaaacaaacaaaagtgtttagtccgaacactcatcacgataacattatgatacaacaccgaatagttcgcaatactactagtacaacaatagtcggaggtactcattacaacaagattgaattgaaattacacgatagaagtatttagtccgaacactcattacatcattttatttcctaaatcgaaagcattgttacaccatggaatcgcctgctgcgcgacgacgccttggccttgcgcgcctgcttgttgttccttcaccaggtggtcgcctaccatcacttgcctgtccagatggactagcatctgcgccgcttggaacttctgcattcttcgggcatgtcttgtaagtatggccgcgcagatcacacttgctgcagcgtaaagtcctcccacctgcttctgactcatccatatcatttctgatgcgtctagtttggcgtcgaccctttttcaccctaaacttagatggatctggaatataaaaaacttgggcactcagcgttgtgtaagatcctgagatcccgaacccatatatctcctcactccatgtatgaaagattgcttctttcctgaaataatttgagacgtacacattgggagatatgccacaatcaccggcagcagcaagaacgtgtgagcaaggaaggtgatgaagcttcggcttcatacaactgcaggtacatccaccatccgccttcaagacacattcctgcacggcttgcttgcgatagataccacgcctgctcctatcaacacacattatttcataccgatgcacttgtgtgccttgagcaacaactctatgtctccgtgcctttttgattttatcttccatgtactttgtcactacgttgccaaacactatgttgttatcggccatggacggaccaattttcttgtatcgatccctaaagtaggcttgcgtgccgtgaaggatgaattcaacaatagcaaccaatggaagtacccgaactcctcgcattacccagttgtacacctctgccaaattggttgtcattatgccataccgagatccatcggtgtcgaacaatagagcccacttctccttaggctcattctcaatccactgagagaaatttctgatggccgaccctgacctccttctcattgttggtgggtcatcaagtaatgcaccaagaggtatgggaggctcgtcaccttcaacttgtggtctgcgagattgctcatctgtttgcttcgttgtcaactcatccaacttgtcccacaactcattaaatttcttctcttggttctgtgcacagagcctcttaaagagctccataagatgcttgttcttgaattgcttgtagaaatttgcacccatgtgacgcatgcaccaccgactccgaacatcaggccacttagctggaagtcccttctcatcccaaccgttctgcaagtagtcaatagcccgcaacatacccgcatgacgatcatgtataaggcaaacgttgggcctcatacgcaccactgcaatgtgcactctctctaggaaccagtaccagctttcagtgttctcactctctacaaatgcaaaagccataggtagaacctggttgttcccatcacacccaattgctgtcaatatctgacctcggtatttacctgtcataaaagttccatctatgcatagaacaggtcgacaatgcacaaaagcattgatgcaagcacccaatgagaaaaaggctctttgcagcacactctttgttctatcttcaaccgatgtaaatgtatgtaggtcatagtaagtattattattcctctgggcaatggtggctaacaaacgaggcaaattatcataagaagcttcaaatgtgccatacctcatctcaatgatcttttgtttggctctccaggcctttgcatagcttatggtgtacttgaatttgttctcgatgtgcctaataattgattttggttcaaagccaatgttaccaacaacactgctgtacatctcacttgccacaaaagctgaagtgatgtttcggtgatacttctccaccccttgtaagtagcacttgtgctcggtcacaatgctaactttccaataatcattccatttacccttatatgcatggacacgccacggacaatcttccttcatgcacctcacttcatacacataatttgttgacttgaccaccctaaactctctctgcaatgaaactgcccaatgcttcaccgcctccttcatctcatccttatgagcataccttgcaccctcaattacctcgtactccttatactcccagggtacatgatcaccctctgatataacaagaccagagaagtcctcatttgcccaatcagtggccattacatcaccttcctcatcggatgatgcgtcgtcctccgcttgctcattatccgaatcttccctctccatttcatcaacaattataccgactctctccccctcatccgccatgcccatggcctgctcctcccttggttgattttcctcattttgcatcgatggtccaacaacatcccctgcattgctaggaccctccacatcttcggtttgcattgaaacatttgtatctttctcttgtaccgacacaaatataacgaggggccatgaccgttcaaaagccatttccacataccgtctccaagcagcagtgctgtccatcggcattagttcccaaaaataaccttctattgcacgactcactacaacagatactgacattgtgtagacttcttggtctattctaaatcctctcaacaaccaactataaattgactgaaatgttctctccgcaggcctatcgatgcccttagatgtcattacaaaatctgacagatcaacaccatctggaccaaatctaatatttccttcaccgtgaactatctgaaatgtgaccttacttgacattgtgcctgatgaaaacaataactgcgttaacctcgcatttctgtactacgccctaagttacattctctacaatattgttctctaaatttctaaaagtaggttacattctccagatcaaactaaactacatcttacaattaacactactgtctatgtctcaattcatactattatattctatgctctggatctacacatatgtgctgtgtgctacagatctgctaaaatatatggaactaaaactaaaacgcaacatatgtactcaaacgtaatatattagtacaaatgcaaaagatgtatgggagcatacctgtgatgaagtgagcgaaccagcagggcttcgccgctccccttctgctgccctcccctctctctctctttcgttttttttggatttttagtgaatataatgaaatttcataggggaggggctgggctttatagggggaggcaaaaatcgccctcccccagggcggcaagggggccgcctgcaaaattccatgccccctcgccgcccat

SEQ ID NO: 9437 - DNA, 4733 bp, Oryza sativa
tgcaaatttcgttgacgcccgtcgcccgagagcgaacggccgtctgccacgtcattttcgccgccctctgggagggcgatttttaaaaatcgccctcccagagggcggtaggcgactatttccgtcaattttcaaaatggaaaattatttttgtaaaacttttaataataaaaattataaataaaaaaaattcatgccacgaatgggcgcatcatgggctgggttaggtgctcttgcacaaaaggcccaagcaagcccaagtgatagggaacaaaagcttgtgcagctgaatttatgggcatcgaatagaagaaaggcattagaggctcgggagtggtgatctggttacgcatgaattgaaccttgtgaatgtctctatccctctcaactcctcatactatctcttctataatgttctagaaccttctagaatcatgtatagcttatttcttaccactttccaacaaatacatgtgattgagttgaattagagattgttgctatttaatttggtgaagaaggttgctaacatatatctgaggtataacaaagaaaaatggaaatggcagtgtagatggtatataaaacatatatactccagctcgtagttttacagacttacggttagtgaagtacaaattgacatagcccattctcgtcttttagaaagtttagacctgagtaaatataaagttgataaacataatactatactaatatattagccaatcaaaagaaataaatgcttctagataaacatggaaattatgatcataaatagtccttaaaccacagtgaatactaaatttggtactactcagattattgagaaatatatgtaatttgagccattctttctgtcatcacagtactggaataacatgtttatttttagcttggacatagaatatggtttaagaacaaaattaaaatagcaatatatatgatgccagaggtgacaggagaaaacgattaagatgtgtcttcttcatgttaactggacagcccaggcagcatatgcttgcgaccgtcgttccattcccaatacctgtaccattcttacatatttaatttatagaataaatttctgtctacttttaacttctagatacattgtaaggtttgtttcctttttttttctatcttgtcacctcaatttctggagattgaatcaggggagtggagcagaaattgttatggtaagataacgatcttgaaaggtgaagcagttttctgaacagatgccaacatgcgtatacatggatggctagctctgctctgctaggcttgaggctgtaggtgctcaccaatacttattactgtttcagacttggactacaaatttatcgcaaattaagcccgtcgcttgtaatgtactcctcgtcactgtgattctgtgagttactaacttaatattcattactacacaaatcattttttgtaaagggggccattaggttgcaggcgagccacttgtgtatggggagagctgtggagattgtgatagcaaatagctagaatggtgacatttgagagcagcaatagctggtagttgtgtatgaattccaattgtgtatggcattttggtttatatatcttttgttcattattggactcgaagacaattaggactaccattatattttgccaagacaactgtcatagtctgtttcagcctacttgccaatctacagccagaataccctcagagtgaattaccaccatcaccagttgatatagtttgcattcctaaatgatgttgctaggaaggattgctcgctcctcgaaccttatatggaacagttttatttcagagtttccattcacatatctataatacagatttgagtatactttgggtcatcttttattactcgtgtttcatattggaccacccttcaactaattttttcactttcgaccgggtaattttacctttatggtactttggatcactctcaactcttttatccatttatatccaatttgtcatatgtcaaagtaacggtcaacatatatagctgatggagtttattacgaataggagctggtgtagttgatggtcgttcatatggttaagaagcaagtcggagtgcttcaaagtgaaataattgcaagattactcggtctaaagtgaaaacattagctgaatggtggtctaaagaaaaacgccggcataaaagatagtataaggtgatcttagtactagtctaggctatagttaaacaaatagttttactcattcatcattcatcatgtcacatatccaattatccaaattaatctgatgagtcgtatcggacggcatcgacgcctccctcccgatcgcgcccctcccacgccccctccccatgcacctcctcctcccacaaccctcccagaaaccgcacctccctcccacgcctccctccgccgtctccgccgctgacgccggaaaccgccccaatctcctcccccttttcattcgcacaccctcctcacgcccacatccatcccgtcacccgcccactcgccgtcgcacgagcctccccgtcgtcgatcccctcccttctcaccctcatcctcaggtattgttgccgattgtcctgtctccgctcgtcgccggcccctcatagcgcaaatcgtcatcctgcatcgtcgattccccatgcctcgatctcccgttgggcttcctgccgctcgccattgaccatcgcccatggctcctccaagagtcaccgccgaatccggttctttcatcttatgatggtttgcctgttctctgcagttcagcttggtagatcagtttagcgttgagaagcaagctgttaaaacatccacttaatgcagaagaggtcataagctccactcctgaaaattccacattttttagatatcctcacattattcaccctatatatgttttcagttgttcctgtatatttggtacactattctcgtttaagttgtatgtcagttcaaatagaatctggagcgatgctaacttatggtgccagcttcgaaatttgattgctcatggagacaggggacagattattattttgtctaaacatttctgaaaatataattctgaaactatggtgaaatgaaacactctcatttctgaaaaattcagctgctgtatgggttgctactagcctacggaatacatggttcagttttaacctggcaatgttttcttcgggttctggtcattatggtgtcataagaaatagtcaggccactccattcaaaaaatgggaaagacaataaagctttttcagtcaacaagagacgataaaggactatttttgcatgtgctcttttgcttggagtattgtgtgattatatagctgattgagctatgtttagaaaactgaacttcccagaactaaaattgaatagtctatggcatgacctaatcattaatcagttctctatttgtgagactgatagttgcaattttatagaggatggtctatcataacaaactaaattacttctatgatttttttcttaaatcaaagttgatacatttgtgactgttcattgtttcaggctgaagggggactcgttgtttaaaaaatgaaatgaaaactgctatccatgttgactccatcgattcatttatcagatcagggggtttgaatgaataaggatatctatgctgttcatgaagtgcataatggatggtgtgatcctctttaatcatactgcttccttcagagttcagatacaaggtagaatcttttacgctactttcagcttaattgattgattcattttcgtatttgacttgcagggcctaaccatggtaactaatgatgcacagctgctttgctccagggtgaaccctcactctgctggttggatttcagccgtggattagcaactggttcatgttctgaaatttttataataaccatcctcactctgtagtatttgaaatcaacctttcagtttattctgaatttttatgcataatataaccatgccagtattttggaatgagtgtagaatttgatccgtcggttctgaagaaacccggttacttattagaagaagcagagaccacaacctggcagtggctggtcacttcagtggtctccaattgcatgtacgtcttaaaaaggatgtttggattacaagtatctatggtatagtagaaacctaaaattagatgtacgaaggtacgtaaaaaagcaagaaaaaattgagttgcaacttcgaaagaaatatactgtttcttcaattagggctatctacatcagctgcatttgagagatatccgaactgttgtagttcaaggaagcatttgaaataaaaattctggtaacagccttaaattaattgagagaaatatcctaattagggcacacaggatcagttggatctgttgagtttcataaagaagaggtgcttgtgcgttcatcaaatagctcggacgaagctgtattttcgctcttgtctgctagcaagccatctaaaaagtcaaagcgtatcgtcacatatttgaaaatgtgtttataaattttcagtaacttgctttgtaagggaaaaacaccaaagtttctgtgcatttgcttcgaacatttggttctgcagtactgttgactataaaatacagctcaacagaactttattttctcacatttctcataacaagttggatatggaaaaccatcgactctcataaaagactacgcgcaattattaaactcaaatctattttaaagcatgtgaataggagacag

SEQ ID NO: 9438 - DNA, 17794 bp, Oryza sativa
aaagccatgaatccattttatgcatatctggatttggatcctgcagaacaaacatataggatgagtagtatctgatgtaaatataatactcgagaaaaattcaagcagtttataaatacgtatttcttctcttgttaattttgatttccccgagcagatgactcattacgtttaaacactctgcccgactagtcatagccacctagcactgggagtcggcctaagcacttcccaaacatgcatatgagtgacatgagttcgtcattaatggaacaaagtttcacggatcggagtttactactcgggtacttttgcaattattaagagcagaaaataaatttatctcatctctatgtttttgatttattccgaataatacttagcaccttgcgttactcggtccatccaacgagcccccgggtgctaggaatcggcccaaaggcaaccatccattggcaaaccaaacggaaagcataggaagatagaactccataactcgataggtacttttgtactcagattatgtcgcaagcaatcaagataaatattatgaaaaatatgatataacatctgtagcccccgactcactactcaatggaagaccaattggtgtagtgaggcagaggaaaaggaaaaatatcatataaagaataaaataaatgatgacttagctttgtaatattccccttggtgatggcagaagtggccaatgtgggaacaaagtcgtccatcaataacaatgaagacaccagtcggcggcgacgaaggcggtcgacggtgaaagcgaagatgcccactaatggcggcataataggtcagccgtgtaagcggaaacaccagtcgacggcaacgaaggtgagccaacggtgaggacgtagacatccaacaacggcggcataataggccagccgtgtaggcggaggcaccactcggcggcgacggaggcaggccggcggtgaagtcgtagacgcccaacagcggcggcataataggccagccgtgtaggcggaggcaccagtcggcggcgacggaggcaggccggcggtgaagtcgtagacgcccatgaacggtggtgtgaccaaccaaccgtataggcgaggacaccagtcggcggcgacggaggcaggccggcgatgaagtcgtagacgcccaacagcggtggcataataggccagccgtgtaggcggaggcaccactcggcggcgacggaggcaagccggcggtgaagtcgtagacgcccatgaacggtggtgtgaccaaccaaccgtataggcggggacaccagtcggcggcgacggaggcaggccggtggtgaagtcgttgttgctatcagcaatggcggtggcgaggacaagccggcggagtggactcgcggccgatcgaccggaaagctgagacgcctcgagtccatgaccagcatcaatcgcctcaatagtgccgcgtagttatatgcgaacaacaacaaaaaaatagcaagaaattaatctgagattagaaatcaatctaatatatattgataacaaattgaaacgaaaaactcaagtcgagcagtgaggctggatcatgagtgatagccggcgacgtgccatgcaacatgtataagccccggcaactaacagctaactcgatgttctttcggcatgatgccatcatcggaggtagccggcggagcccatcaaccatcatacatgcaaacaggaatcgaatcctggcggcctgtgccactcctgcaacacgtccatctgcaaggaaaggaagagaggagcactcggacacggcaagggcacccaagtaggcgacgatgatggccgtgtttcgatctcatccagtatatgaaattcgtcaaaatatcaggaaatcaaacaatgattaaaaattaatctaatagagattaaattggaacggtagacccgattgaagatttagatttgagccatcgaaattgatgagattgatctcggggtttcttctgaagttgattccatcgcacttttcgacaggtaattcgacgcaccccctacctggcgcgccaactgtcgaaacatgaattcggcaataataaaacggggtagcgcacgagacctaaaagtggatggatgtggagacaaaggatttagacaggttcaggccctctcaatgagaggtaataccctactcctgtttggggatttgaatctgccgggtgtgtattgatctgacgatcaggttgtctcctgcccctagaggggctccctgccctccttatataggttggggggcagggttacaagatagaaaccttaaccaatacggtatcggtttcctaaatctactttacaatcttatcaaaccaggactttaggccgttccataatattcagggaaacgtaatacccaagtcatgatctgttacatatttcatatatatataagttatcccctataactagtcggataaccataccgtgtgggtatggggtacccataatctccacacataggaacttatgaagattttggcaaacgtttggaacagattattctgcgaattattgtcgcagtgaagaaaaaagtttactactgtaggctgagagagatggatctgcttctaaccaccatcagtgagaattaatgtgggacacagaagaagtgactggatgtctggatcaaaggagtttttgcctttgtgactttgatctgcttgtgggctctaaattatgttacatgactctccgtagttaaatgatcttattttctttctttctttcttatttcagttttgtctactgtaatttctcttacgcaattttcgcttacgattgtaaaattatagtcacgagaaagtagttttgacataaatttgacaatatcaattttatggcaaaacataaatattacttcctccgtttcacaatgactttcacaatgtaagtcattctagcattttctatattaatattgatgttaatgaatctagatattctatattctatattcatattgatgttaatgtgggaaatgctaggatgatttacattgtgaaacggagggagtactatgtgcgttgtaaaatataataatttctggttatatatttggacaagggtttatctaaattatggtactatattttaaaacgaatatagtattaaataaatcattaactaaaatgtaaaattaaacggtcagaatacgcataatattttgagcggggagagtatagaatatagagtcactcaatttaactacaagtgtactctttatccaatttgacagtaacatagatataactcataaataacaaataaatgagtgaaatgctaaatggcattcgatagattaattattgggccaaaatcttacagattcatgctctggtattagctttttctccgggtccgccggctccaatgacaccgacaaaggtggtggagttagggatgtaggatcccgggttgggttagagattgggggaggtgggggcgaggaaagagcgggagagagccaatccagttccaacaatgcacttctcgaaccgagaaagtcaagcttagatggatagccatgggtggcggtgggcagtggatatgggcgagcgatgagccacaagcggctgcgttgaagccgtaaggatggaggagggaggtgatccagcgttggtagcagggacaaagcaagcttgtggttagaaggctagacagcgagaggaaggggatcgagcgaatgagcaatcccatagtggctgggagtgaggagggaggggtgatatggtttagattgtgttacacgaatcttacaataatcatacggtccaaaactcgcatgttttctgagggggttttatgtcaaatgcttgatggacagtccaaataaaaataaggaatattaaataaccatcctaaatgtcacccaaaatttgagattttccttgtaaagaagttttgttgccaatatcccccctcccacccctcctaattcatggtttgatattccttcccaaattaccgatgttcgcgtgttgagtgtcatgagtagggatgaaaacgatacgaaaatggacgaaaaccacctttattgtttttgttttcatattttttttggaatcaaaaacctcgaatacgaaaacgaaatcaaatattgtcgaaaccgaaaacggaccggcaatgatacagtaacgaaaatttatcgaaatacaaaaacccctcaaactaagttttaaactatgtcaaatccaattctcaagtctcaaatttcaacattacatctcaaaacacaattatgtcaagttcaattctcaagtttgaattgggtgtattgggttgggctaaattgagtgacttaggaattacgatgctgaattgggttgggctggggaggaattatagactatggtaagggccttcataattctggaaattccgagaaaatttctggaaaatttccgaccgattccgagttccgacggaaactgcccttatggtattcgattctatttctaagaaaatatttccgaattcgattccgtttccgaaaaattccgaccgacagattccgtttacatccctagtcatgagtgggaatgccatgaccgtattacgtaggcccggtgatatcaaataaaggtgaattaattaggagggagtatttacatccaatcattttatagggtggaatctcaaccttacagcgatatttacgatggtattttacaattttcccataaattaatgtaaattgcacatatgcacccacttgcatgcctaatcatgcggaagggaaaactaaaattaaacgtccacgtttttcccagtgtggtactctcttcgtccaaaagtcaagacctattttgtttttttgttttttttttcaaaagtctaagactcatttataggactaaactaaaatgattggaatccaagaagctatcttaatccttgttagttacatgcatgtgtatagtttattaattttgtcacatgattaatgatttaattttgtcaaaagaaatactccatatggagggagcgagtactaataaccagtagcgcacacgaggaagctaattaacctgacgccaccacctctctttccctctctctcttccattcaccgacaatctaactaaaaatgaatccgatggccccgatgctgccggcgccggcgcccatggcggcggggccgacggagccggtggtggtggttggcccgcagtactgcgcgccgtacgtggtgccgctgacggtgaccaagaagtccatcagcctcaccgacggcgacttcaccgtcaccgacgccaacgacaacgtcgtcctcaacgtcaagggcaccctcttcagcgtccgccaccgccgcgtcctccacgacgccgtcggccaaccactcctctccatgcaagagaaggtaattaattaagtatttctttctttttttcttttgatttgtctagacctagtagacttgatcggggattcaggaggggaatccaagaaatcaagtactcgagggaatccaagaaatccaaggagtagtattttcaagtacaccaacagctagagagaggatttcgtcttgatctgatttcgtgttttttttaatatgttaatcacatggtcaacgcgtttcatggagattgattggatgagaaggtttttatattccttgaattttttcttcttccttttgagaatgatacaaaggtggtcaaattcgctgagaagagagagctcgtggaaattaggatcgaattaattagaatttcgtgtcttcgtaaaggcgcctggattatggatcgtttggcaatcgatgccgtcttggtgaactgaatctttctttctgcctaattaatcactgtcacaatttcaattggaacgttgactattttcgtgattcttgtgatcttgacctgttctttagatgttgaaatccacacaaggcattcaattcttgcacatttttagtattttacaaaagcaaacatttcagcaagttgagaatgatccccaattgaatatccacctaagaacagcaaaattttcagatacttagcatgcacaacagatgggaagtatacagaggggacagcgcacattcgtgcgataagctcttcaccgtgaagaagtcctcaatgctccagttgatgaagacggagatggatatcttcttggccgggaataccgcggagcaagtctgcgatttcaagatcaagggcagctactgtgacagatcatctgccttctaccttggcaaatcaaacacaatcatagctcaagtaagtttactgcctatgtctctcatcacattgtggaggttcagaacaaaactttaatagatttgttatgcatgtcctaatacctgcagatgaaccgtaagcacaccgctgcaagtgtggtgctggggagggacgtattcagcatcaccgtgttcccgcaagtcgactacgtgttcatcgcggctcttgttgcgattctggatgatgttcacagggacagaaaggagtgatgaactggaagcactctcatcccaagcacccttttaaatttcactttcatatctgtcaaattacctctgttctaggtattgctatctggttgaggatgtgtgtaaatttttctttgaattatgtttattttcgctggtgttccatgatttgtaattaccttcaagattgatcgatgttgtataactgcttacagcagtgaatgttttctgtttaaagatcaggttgcagagccaagtgttgctgatcaaaattcagttgaatataggccatttgcagcatggtttctgtaggtcaatcataattaaattgtgtagaggggaaaaacaggcatatggtggcgtttcattccaaaaatttaatctgatttggggttttataatgccaaatgatcttatttcagttatctaaataatgaaatgtgtttgaaagtgacatggatattattttccccaatcagctgccctgatcaggaaaaacatgagtattgaaaagtctgacttctactttgtctttttattttgtctttccaatcatcaacaaatggaaaagcttccgacttaagctttttctttctatcacctactcctttgtcccattttaattgcaaccatgagtttccgtgctcaactttgatcatccgtcttatttgaatttttttttataattagtatttttatttttataagattataaaacatgaataatactttatgtgtgacttgtgttctcaaatttttacaaaaaaatttaaataagacggacggtcaaaattgggcacggaaaattatggctgcacttatattgggacggagggagtaaaagttttgagtgatcttccggtactttctactgatagtattatattgtcagtagaaatgatatgatctattcgttattaaagataaattagtaatttattaatatattcattaggggtaactttgtcatttatatttttcttcccggctagataactttattttagtttatttttttagctttcaagataagccaacaagcaaatgatgagaaatcctatttttttagcttgaagtttcttgtttccctgtactatacattgattggtttgataatgtacaatgacaagaagttcctaagatatactagacacataaaagaagttcaaagaatatgcccaaatgaaagcaaaaataatcatgttcaaatctcagttctgtgtaaattatgcactcgatgtttcataaacttctttgcaaaacctgcaaactttttcttttgcccctgaaatccagactgggaactgcaaaccctgcatcaccctgaccactctagcttgcctaccacaatttctctctctctctctctctctctctctctctctctctgaaataaacagcttaatttctcctggttgtgcagataaaccgcaagtttagcgatctttcagacatgatattcgttgggagcaagttcagtgtgaccgtgttcccgcatgtcgactacgttttcgtcatggcacttgttgtcatcttggatgagatcgcgagggatatacgacgaggagcagtgatccagatcagcacgagccagagaccaggccgatcgacaaggtgaaaaagaggggaaaaaaaagaactctgaagatcaaaagcttccttgcaggtgatcctgctgtaattttatctgaacatgcatggaaattttgcatctaactaagttctgcattcagatgaaattagttagatatagtagttagatgcatgaaagaatgatcaccctgctcttgtgtgtcaatgggcacaccaaatgttgcattttgctaatcctttttctgaacaaccatgtgtggaaatcgatcgaagcttctttgaagctagagattgaccagaaattctaacctgcttgtactgattcttaatgaattcccaaacatattacttttgactctttgatcaacacaacaggggaaagtttcagatttcaacaagccaaatattcttaagatctcatcgatccatgtacatcaaggttcaagtttgtcctattaaaaaaagtttatggacttctatattattaaagtctctttttttcccctgtgagagagatccactacactatgataagaattgactgcaatagtatggttatataggggaagcatcttcagtaaatcatcgagctgttgttggcactcctaattaagtgacttcatctgttcaggtatgaaacaactcgaacaaaaaataatttatggagaactataaaaacaaatcacgattctatacatgatattatggagtatttgttatccatgtggttcccagataattaattaaaaccccacagattcacaaggatgcacatccagtcatggaagacatgcatgtcctgcaaaataaacaacctgaactcatcattataatgatacctgtcgcccatgcaagatctgaactctggaaagggatatatccaacctgaaactttaaatttccaccactaaatataacataggtgagcacaatgatggatatgattagatgtgaggagctatcagaggtgcacatttattatgccatccagaataacattgtgaaaagtactttggtcatttgtttcctctattttttttccaatttggcagagtaatgttattattttcaaaggtgcacattgtttgtatctgcagttgatgatattttctaacctgctagttcctaatctagcttaagacatacttcttcagaactccagtgtggatttctttaaaacaaatgaaaacaacttgtctttaacaaccatggttctgacatatatctgaaggaaaattccagccctggacttgatgtcatgttccacaataaaacaagtattaccaaaggtcatacataaacaatccacataaatgttgcaaatagtaggtggtgttagcaaaagttaagtgtctggacctatgcgtgtgcttatcaaattgtccttttcctttttgagaaaccaccataacgctagaattctctaaatgaagggaacatattccatggagaccattgtgtgggctctaaatttgatcgttttgttcaattaacaaatattttttccttaaaacaataaatattaatgtttttattgcacatatagggagctcttttagtctttaccaaccatggatagagatttagtaataaacattatgacgcttgatagattcttgatcttcttggtttttttttttattttttaaagttagttctcaacccatgttagaacctcttaatagttactccctccgtcccataaaaagccaacctagaattggatggaatgtttcctaatccaacgaatttggataggactagaaaacatcccatccaatactaggttggtttttttttggatagagagagtatggttgtgcatatcctggatccagagatcgggaatttgtatatgacattaaaaaatatgttcttagttaatgaactatctaaatacatgaaagacctgtttggcaggacttcagcactaactgcatcaagagctgtagctcaatcaaatagttcagcttcacctaaaaaaaatgaagtggattagaatgataaaaaaagaactagaggggtgtagcacggttcaggcccatccacagtttcactctaggagtcgaagctttagcaaataggaccgaaaagtccaaacgactcttatacagaaacaattattcatcccccaaattaacaaccaaacactgcatgaaatctaccagaaactcagaagaaggaaaagactaatccaacctagaaaatatgaaaaatttccagcacaaacaccacactatactcttgtgacagctacaaaagtacacttaattaattaatcaacaaccttgatttgatgaacagtaccaattcaatttgatcaccagtgaactttgcccgctccgaagcacggcacggcgcgccgcggcggcgatcgccggacgacgacgacgtcgtcgacggccacgccgccgtcctgcccgagccagcgccggcgatacgtcgtcttccccggcgacggcggcagccaccgctgtcgccgcctgaagctcgtcagccagctcatccatcctcccgacgacgcccaagaacacgacgacgacgacgtcgacagcctcctcctgcacttcttggccttcgacggcggcggcggctgatcggagttgcacgacgaccactggtacgagtacgacggcggcggcgagatcggcggcatggcgtagccgccgtcggcggcggacgccggcacgacggtgctcttgggcgtgccgggcttggactcccagacgaacggcacggtgccggcggcgccgaggctgtagtacacccggaacgacgacgccccgcccgcggcgccgcgatccgccgccgccgacgacgacgacatgatcctcgagctcatcagcaactgcggcttccctcctcctccttctcccttaccaccactcgagctcattaagacacagattaattcagagatatgatcactgagacaaatcaaaccaaaccagagacaaattttcaagccaattaattaaagagagagagatttgcaatttgcaaagggaaaagtgtatgcgtttgctaattagaaggtacactgctcaaaatgaatttgatggagctagctgtttgtgaaattgtgattgagtgagtgagagaggtgtatatatatgggagctttgattgagatggctttttttttctttgtcaatggtggcaattagctagctacctagctagtatctagcttgaggatgaagaatggtggagcacaaaggtagctagctagctactgatgatgtgtgttggcaattaagttttgagcttaagtgataatgaccatgatgatttaattaacagtacaatgatgtagtttaagtagtactagtactagtactagctatagtgtgtacaaactgcaaagttgtgtagtaaagaagaagatggtgtgcatgcaagtactagctaggtgctgtgttaggttgaagatcaggagaaaaaaggggatgagaatgagatagaaggatgtgttggcagccttgtggaggtagcttctcttgtgttcataaccgttttctacgatatatttaactagtgattatctgctcatctcttttatgaaaatcatgttaatacggagttagaacatactccctatactccctccagtttttaatatattgtaccactgactttttaagataagtacgttttatcattcattttattaaaaattatgtaattattatttattttgttataacttgatgtatcattaaagattttttaagcattacttatattgttttatgttaaaaattggataaggcgaatgattaaatgtttgtctaaacaatggtatatattaaaaatagaaatgagtatatatttaagcacaccacaaaaaaaaaagaaaggatctcatgactgaaatatatcttgtttaattaattaacttccttcatatttggttggaataaattgaaatataaatcatcttctaaaaatacctccaaagatctccctttttccagaaatgagagcaaagatccttgaagtagataaataatccctttgtttgctagtgttactctgagatcacatcaatatctctgaattaaaatactcagcgcgattaatttgataattgcctccatgattgtgtcatctaacctagctacagaaaaggctgcaaagtactctgcaacatgaaaagaaaaattaaatacaaggactacattcacaaacgtatatctaatcataatcctatatgcttaacaaactgcctaccggtgcgtgcgtatttaattacacatgtttgtttccccacgaagaaaagaatttatgtaccctgcaacacgatagatggatgagaaaaaaggcagacaccgaattgaactcgtaaccacttatcatttcatagatcagcatcttgcacacattcattggttcatgcagatgaaataccagtacaaaaatctaaggttgctttactttatgtttctttgttcttctttaagaccttttgcaaaagcaggtctctgctgcaacagtttgattatagggcatctgaattcagaagaataatgtttggttgcttcgcatatatgctggtcacatgatcatatctaggccttttaactcaccaattaaaactgttgaaagggtagcaattcagtgattctgagagaaattgcatggtgtatgattgacagtaagttattgcagtggttacagggtcatttccctgaactttcgagcaatcgaactgtgttgaaaagttcaaagaaatgtgttgttagaaaggcatgtgcagtgcatgcatagtgctgtcaataaaatttcttttcgaaacatatctatcagtaataaatttaccaatattgaaaattgattaaaatttatcaatcaaactgatacttataaaagtatgtcgacaatgacgataactgaaactactcttggcatcacatgaaacattctattgagctaatataatgcaagaactgttttttattttttgagaacgcgaaaaactttgcacttcaacatattagaatagtgcaagaactgttgttaaaggtttcaaattgaccaggtttcattagcttcatttaagaacaaaaaagagttcagctagtccaagtttatgactctgctttttcggatcagtccagcacaaaaatcaaagctataattaagctggtgcagtgtcatccatctcatctcccctgaaactttcagacagtcatcaggtcattgatttgttcataatgtctctgctaattaagcacacacgttagccacttttgtcagtacttatctgtagccttgtacgattagaatgtgacggtgaatgtacatctgacgatggaagtgaaggtacaatgtgaggacaagagaaagtgtatggatgtaattgacccagctcatgtgatttttagtcaaacaagcacaaagattttttgtcgtggattaggttaactaacttttagtacttagcttgcaagttactgtcttcctttggattaagacttagctaagcttgctgcagattctaggaacaatactccattcgagcgatgtgtatgacgagtgtttaatttcttcaaataattaattatgcagtacaattttgcaaactctagaaaatcaataaggcattgccgttccaaatgttacaagagttgtagaacaacaactttgttcggtcataaattaatggtatcacatatagtcgtatatatggcaccattaaattatcttttttttaatcacgggaggtaaaattatgatgattatcactggcatgctttctaagctctcaaacagaacgattttcaaaaggaacacttttaaaatcaaccttttaactttctaatatttaatttatttgtttatgcccttaaataattatcacaaactcagtttcatcgatcacccatcagctttaaacaaaatatgccattaaatttctttgaaatatattgcgacttatttaatcgtttcctctgtcttggttaaatgtttggaaacaaaagaacatctgaagaaaaagaggacctcacacacaaataaaccgacctgctatctaatcatctgcagcaatcatctaatcatgctgtcacttacaaatatgtgcatgcatgaataaatccccattgacgcttggaatcaacggttgttagggcgtccttgttgtggctgttcaggaagctaagctgctgcaggcagacgataaaaagcagtttgcaggtttgatagattgccgtcgtccagccatcgctgtaccgtaaaacacgtaggcgacggccgatgcgacgcgtgaaaatgcttcgtgctgaattattcagacgtgggatagtatctatctgtcattagctctgcatatatatgcagtgaattcagacatggatatgtctgcaattataggcttttttttccgactgcggcttataaaccgacacacacgatatccaagtgaaaacgacgaaaaaaaaagtaataatttggttttaggttcagaatggattacactgtaatattcatcgtccccgaattgctaaatatatttcagtaatatgtagatccaccagtggcggatccagaaaatcgatttgttggtgtcataacgtgtctatcggtgtcatagtatgctaattatacttatatcatggtgttataacatatggattagcagttttgttacaggttttactgaaagtcgtcggtgcctaacactgtagatccgcccctgagatccactgaaaattagtcagtttggcattgccaattaagtttgcaataactaaaaattatctttctgtctttcaactgccctacacttgttctttaatgtagtgcgtttatatacaattaacatgatactatacacaatagtgttatactcttagaattaataatcaaaatttctatttcagtttagataacatagatattccattatagtactctgtatgacatatttctgttccatacatcagtggacatcgttagaaggggatagcgatttgtcccacaaaagctcgagttttttactattcatcttccctatcttaaaaaggtcaatgatatgaaccatttttactatcttaaaaaaatatgaaaatctatagttttaccctgtatatgcatatgcagtgtgaatcttaaggtctggaatattacctaccaaatatttggtgcatgtgtgaattatttccaattaataatggttgtatttttgggggcagaaataagctacagaccagctatattttgatccatcgatttggtgtgtgagtcgtcggtgtctgtcgatcgaattagatccttgtccttattattgaacaagttaacatcgttttggtaggtgtgattaaattgattaatgcatgcacctcctggggtggcaactgtgtgctgctgtttgccatttctgttgtgggggaagaacaggttgccaccaaaccactcagttctcacactgtgggtcatgtactagaagagtacacgtgtgacactggaaagtgggcccagactattaggctaattaactttgatgtcatgggagtttggtttggtaatggtactggagtactatgaaattgttgctaaaaaatacatttatgtactgcacggtagatgtggagaaattgttgcgaataaatgtggttggctatagcatactccctccatactcgtaaaggaagtcgttttggacagcgacacggtctccaaaacacaactttgacttcttgtttctataaaaatatttattaaaaagtgatatatatgtatacttttatgaaaatatttttcaagacgaatctattcatataatttttacattttcaaactcaacaacttgagagttattcatgatttatattcccaaggtttgacttaaatattgtcataaacgactttctttacgagtacggatggagtatttgtgtcatcagagacttaggtttgcgttcgtttcgtttcaacttctcagtttttttccggattatttaccgaaatattgaaaaagattatatttgatttgctctatgcttcaaaaaatacattttttaaaaaaaaatcttctactgtattgtttattaatgtttagacgaacaaattatttgttaaacctatctatcaaaatatttaatgtatctctataatcaaagtatataatccacagtagcatgtggtatctagcaatctacataaaacgggaaagggagatgggtaggaatatggcccggtttgacaccaattgttttccataaacgtgatagttaacatcattatctacttctttcctcaaacaaattaattttggtaggtgtgatgaaatttcaggcaagatgctacatgtatgtgctggcattagtcatttgtaccggcttgaattctagaagtaatgcacttggaagaatatagattcatcttaatttagagatttggacactggttgggaagtcatcagacgcgagaaaccttatatcattctttgccaagtatgtgggcagttacgaaaagccctaaatcgtacacgtgtgatatgttggctagtccatttctggcttaaatgccatttggaaattgattaatcccttatgtttgtcatggtccctttttatatttaaatatttaaccatataaaaatagtgtattatgatattatattgttatacatagctttccatcgtttaccttttagattataagttgttgctagaatttgattattaatttagggttgacttttaggatttttatttttaagtattgtcttttagatcataaggacatacatatatataaattttacccgcatgttaatttttttcgttgctgatattatattaggccaaacgatggtggtctcaagatgggtcctacacgtggccaattaatttttttcacaatgtttatgaatccactagtaaataagaaacgctcaaaataactacatcaagaccaactaatgagagtgagctgggagacaacatatatattgaaacagttttaaattaatctacaatatttgagctagctcactcacaagtcacaagtcatcttagtattatgtttatggggccggatccacattatggttgcatggtgcacacgggacttgggccatgttttattaggctgaatccgggggatcctaatggccgatcgatcgcctggagacggggtagtgatcgatcccctcccccctccctcccaccacccctccacctggttttcttttttggcaccttattacttttctactttagtaaatttgtacacctcaagtttacacatctaaagtttagacaccaaaagtttataagtcaaaagtttatatatccgattcaaatttgaatttgaatttaaatatttttctatatatagtatttctatacatctaaagtttatacacctaaagtttatagacctaaagtttatatacctaaagtttataagtcaaaagtttacatacccgttttaaatttgaatttgaatatccaattcaaatttgaatttgaattcaaatattttatatatatagtatttctatacatctaaagtttatacacctaaaatttatagacccaaagtttataagtaaaaagtttacatatttgatttaaatttgaatttgaattcaaattttttatatatagtatttctatacataaatttttctaattttttattttttaaaaaagttttgtgtggtatactatagtaggaagagaagaaggggaggaggaaggggggagaggagggaggagtgtatcgtataggggag

SEQ ID NO: 9439 - DNA, 19884 bp, Oryza sativa
ctggcggtatataaccgctagcgaagttctacattttcactggtctttcctttgtggcagctgcgatttctgctagcggaaacccaaaatggccgccataaaagatggtttccgtagtagattcccatccatgtactaactccgttcaaaaaagaatcaacctaggatagaatgtgacctatccttagataataaatctggataagtctttgtccagatttattatcccaggatatgtcacatcctatctttatccagatttattatcttaggttgattctttttgagacagagggattatacatttattatcgtagattgattctttttgagatggagaaagtatacatataaacttgagtacgtttattaatcatcttgagggcccgaaccaatataaatccttgttacttgttctctggatgcgatctcgcgtacaccatggtcccaacaatccccatactctacaaattaataccgttcacgggtatagcccgttgaaaaaaacctacgaacaggtcagcgactgtgacattagaagctttatgatagattttcctttttagctttatagcggttgaagaatgtaattttatttccttcatgttgaaatttctaatcaagtgtttcctctacgaagatgtaagtaatagaatctctacataaatgtattaattttggaagtaattaactcgcaatttctgattttttttattgactgcatttaaattaaatcgtctcaaatgatttacggataacgaacttactgttattaccgtcccggttttctggtggtcagcaagcttatacaagtggtattcactttcatcagggtttgagttatacatggaagtgatagaactaagatacgtccctatcaacaaattaaatagttgcatatatatatactagagctgatgctagcgcgctaaggtttcacggccgtttgagtcgtacagttcgtacacctagactatttttttcttctccggtacgtatagttgccaccggtttaacagtcgatttcagatggcacatatatatatatatatatatatatatatatatatatatatatatatatatatatatatatatatatatatagtctataccatggatcacaattccgaaggtatatgttaagattataggcatataatgatttaatctattccataaataaatcataatattacagatgaaaaactagcatgaacgcaccattagatctacacatgtaaactacacagtataacatgaacagatcaaatatgcgcaacatattgaacacgtaccgaggtggcggaaagaccggctgctcggtcgaaacttttcgtaggcgtctacgaaggcacgcagcacgcgagcgaagaggaagacgagccgtcgcggacgaacagggagcagtcgtgcaaagcgcttcccaaaaaccttattgctgccttctcccggtgcaggacgtcgaaggcacaagttctggagacttgctttcccgatcgcaggtgcacgccggcgagcaggatggagtaatctatgagcgacggcgcagcacagagtaggaggcaaaccctagattgatttcgcgtgtgttgcgtgaagacggcgggtcagtttatatagagaagggtcgcttgatcagggcgcccgcacgatttccattacgcgtaaccgaaccggataagtcgcgcgtaacttatccggactccacgccgtttgcacgcaccggatttttcggaacgtttccaaaacaaaaacgaaaccggataagtcacgcgtaacttatccggactccacgccgtttgcacgcaccggatttttcggaacgtttccaaaacaaaaacgaatctgaatttgcagcaaaacaaaactgcaaaaagaaactgcatctgcgcaaggtgaggaaccaattttggtggaccattcgacgcgtacatcgtgcacgtgcgccgcctgccctgccaggcgaggcgagcgagcgtgcttgttccccctcttctctccaccacacatgcttcaagtggctaggagggcatcctcccttttaaggaggtccccctatgctagaataagcaaggtggtactaaactccacatgcatgccatctcatgaggtgggcttttgttattttctaaagaattaatcttcgagtgggctaaggcccatttattaattccaacagggaactgcatatctgtttgtcgacagatttttggggcaaaatcacccacatttttccagcctttagatctagatccaatgcatagaaaaaaatgactacaaacaaactttttaccgtctgggccttaggaaacaaaaataaacaacaattaggctgaaaaacaagcccaaaacacagagcccaatagaaattagacacgaaattatcattcaaaactttgacacaatacaaatggtcggaaccatacaaaaacaaaccaaaaaaaaactctatactagtgtagaaaacagattcaacagtaatattttcactgcagagaaaacatgtatcaatcagtgatattttctctaatacctttaacaaccgatttgatcaaatgagcacatctcatatgttgagcttgaaatgccaccatgaaactcagcttctgcctgaacagcacatgtcacgattgtagaaaacagtgcatcagtaaacagctaggatatacaacgagatatctgcaaaaatggggattttctttgtgcacgaaattttctttgtgaaccaaagaactgaaatcatataatcctttatgccaaaattaactctgaactaaaaattcataataactataaaaatgcccatctagcagggcatcagcctccccagattcaacatagacattccaccgtgacaagttcaattacaagaaaaaatgaatatctagctaccaatagctaagttagttacaagaaaaaaataataagaattacatatgtaactaaggtatatttccactgtaactagactgtaagtggtgatgagttgaactgtaagtatgatctaagttatactagtgatgaatggtgctgcatgaaacacaaggcaacacagataatagaaaataacggtacaaaacttagcctacattactaactagcaaaaacaagtttgtgcctagggttcctcaaactacaagtttgtgcctaagaaaatgaagatgcctagggttcctcaaactacaagtccctcagttttcacacaattcattgataaaaccaatataaaaaaagttacaatctaattaccaacagttagttacagtgagagataacataaattacaactgtaagtgaggtatatttccactgtaactgcactataagtgatgatgagttgtactgtaagtgtgttttaagactacatgaaacctaaagtattgacttcatctgataaacaaaattcataactaaaaataccatttgaaaacttaactaaatcaccagatgtaagaagagggcattaaatacagatttagatcagccattcaaatgcctcaagagatatttttttctggggtattttcctaagagaaaacatctaaacgttacaaaagaaataaaaaaacactaataaaccataaaaggcacaagttctccttttctgtttgaatgaaaggaattaatagacacataagagttatgtccaggcgacacttgttatgcaaaaatcaagcagaatctacgcaaagacaaagaaaagaaagttaatgttggttgcatacactaacaggcaacataaatgaagtggcctcacacttgcaatgacgcaagaagcctagctaatttcagtaaaaacatataactaattcaaaaatggatgatgaccctacacatcattgattggaaaaaaacctacaacacaaggggaagcagcgcaaactcacacatattctaacttttgcatgcacaactgacaaaaggagtccctagggttcccaaacaacaagtgtcctagttttcacacaaatcagtaataaaccaatgtcaatcaattacaaaatctaactaccaacagtcagttacagtgaggtataacagaaattacaactgtaagtgaggtatatttcgactgtaactgcactgtaaatggtgatgagttacactgtaagtatgttttaagttagaattactataatttcatactacataaaacacaaaatatttaagttaggtagtctacaacatgattctaatgctttcaattacatacaccaaccatacttgtgttaaattacatgtaggggttgatagaacaaaggctcaagtaacaaggacagttgaaggttagaatatcatgcttacctattattatgcatcatatctgatcttcgtagaaaatttcatctagcacaaatttatatataaaaaattagtcatgacacatgtagtaaataaaaataatctaactacctacattcagttacagtgagaaactacaaaagttacaaccgtaactatagtgcatatggactttttacaactgtaacttttgctatattaattttccatgagaaagtatatgggtgtggggctagcaaaatggcaagcttcacgtaactagtgtatacaactatcaatctttaccaagtaagtacaatattgcaatggttcattcataataaagaataaaaaatatgcaagcatgcatgctgctgatgttctgaatgatgaaggaaagtacatctaaactttatatagaacaataacagaagggaattgtaacagaagcacatggaaatcatacatcaccttgttttgcaaattgaacacaacatatatctttaatcaacgcacagtttagatgtaagcttgctgcagcctgcacagggttgctcaatcaagattgtattgtagaagggatcttcattggttctatcgtataggacacaatgaatggagctctaaaggtgcttgcaacttaaccaggtgatccattcaaacaagatttaggtgtataattgacactgctttgtttcataaaacaaagaacatgataaaagcttttgttattctaaggtggacacatttacaatttattgttaacaaacacagaaggagacgtgcatgttaagaacagagggaaaaaacaaaatccccagtacaggacagaacaaaacagagggggaaaaagatgctagcaaacctgtaaatctgccaaaagcatgtccaatttactccgaaaaatgcaaatcacacaaaaaaaaatccccatctaccagacacaaaatcgagctcagtgacaagaccaaaaaaaaaatccagccatcgtttccaccgatggctagttcggtggttacaatttattctattcccaaatcacacaaagcagatgtacttaaaaaacagatcagacctagaaaatttcaaatagtgtgtagctttacctataaataaacagatcagagcactactcacctggaacttaacaaaataaaaaatcaacagctaggcaatctcatcggcatgacatagaaatcaacggatcaggggactaatcaaaacaagggcaggacggaagtgctccgcgtgttcaggttccatgacatagaaatcaacagatcaggggactaaaccaaaactaccgattccaaaatctaaaacagttaaacaagcatcagatccaaacattaagagctacctaaagcatcaaaacctagccggaataagattgaaaaaaaaatcaactaatgatgcaaacaaataggagacaaggagagaaaaatcagcagaaaactctccggcgagctgaatcaccatggcgacctacctctctctcgcgcgccggcaagccctctctctcgcccgcgccggcaagccagctctcactcaccggcgagatgactctctctctctctctccggagaaaacaatgaagagaaaagaaaaaaagagagaaggaaagagagcgagaagagagctgaggaaaaacaacggctacggagtacagacagaaaagcgtggagcccgacatttgagagggatggcccacatttgactataggcgcggtctgattacacgtgacgcagctgcatccccacccccgcatgcgcacgaatcatagcgcaaatcctacggtcagaaaaacgacaaatattaggagagaaatttaatgacaaatatctagcaaaatcgttccaacagtatatatatgtgatagtcgttgttggcatatagctagctagctagctatagtatatgccaattgagtgagctagagtgaccatcgatcgatcgatggggtcatcaacgacaagatttcctcacctcctggtgcttctttgcctcatcttgcgtttgttgtccctccatgcttggttgatcgatttcgacttcgatttctctgacccgtcgaccttcaacgtagacgacctgcggctgcaaagcgacgcggcgctgaaggagggatcatctgggatgatgatcgagatgaccaagaacagcacgttcagcacggggcgggtgacgtaccgcctgccgctgcggctcatctgggatgatcgctgccggacctcggtctcgtggggaagatgaccgcggacatcgagttcgacggcgccacgaacgcgctcgccctcacgctgcgcttcgacgacaacgccaccctcgcgcccgcgcacatcatcagcacgcgcgcggacgtgaagaggttgctgacgcaggaggtggccttcggcttctccgcgaccactggttcttggatcgagcgccaccgcatcctgtcctggtccttcaactcaacaacagttgctgtcgaggatcagcctcgcgagcagtcgacctctactagcttctggtaacttgcacgccccctgtactctccctcagtgaacaaaacaaattctagcggttaagtgtgacatcctgatctaattagaatttaacctgtgtgatccaagagagatagggtgtacgtttagcaccatcttgctagtttagtaagggtgaaaccaacttataatgacatgtctcaacatatcactcccgggctagtttagcaattgtaaaaccaacttataaagacttgtccctctaaccatattactccgggttaatcattttacacgaaataaatcaattcctattctttctgaccttttctttttacaaacctatactttcttgccatttgtttgcaaattgaaattttttttgtcatcttcagtgcctcttacttaccattggtttataaatcgaaaaattttatcttcaatgcctcttatttattaattttttatcaataagaaatattttggttaatgagagatatatatttcagtcttttgtcttccttcttaatttactgcttgggatgctacgaattgtattttttatgagggaatagctagattactctcttaaagttgctacttccggtaaaaaaaaaagttacttttaccattcaaaatttatctaaaatatagctacatttcctcctctcatccatagaatacacaatcatctctcgttaaatttctctccaattactttctcatcttaaacaatgataaatttttccatttagttttacccctctgtttagttgctttgaaaaaaaatataaattaaagatagttatattttgtggaaaaaaataggacaaaagaataccgtaggttcataagacataaccacttatatttttagacaactaacatacagacaagtaacatacagttaaatccatataatattatcagaagtttttgttttaacaacattagctactccactttgatatgcccaaaacatacattctacaatggcatattctttcattactggagtgagcaaataatagtattatcatatcacactcaaatagtataaactagctgcataatttgtgaaattatttagagctagtttaaattagaattaaatttgacacaatcttatttgtctgctttattaagtttgtttgttattaatcatctgatattttagttatcttactttgcacaacattaaagattgtaactttgctataacggaattatggttttcaggtgactgaagtcaccttcaaccttacactggtttgggaagggaataaggatggagaagctaagaaggggaggaacacaccagtgatggcgactctgcagcagtggcagcgcaacaaagagatcttcctctggcgatggtgggacagtagtggtcatagagtttagaatttgggggtatcaggggggggttgttccttacaacttagagggatggccttggatgtcgacaggaccagcgatgggctgtggcaatgggtggaccgcgaggcagcatgggcactgctggagccatgaggatggaagctatggtgggtggggttggctgcttggggtgggcatttggttagaccaaaacatttagtcttggtctcagccatgatcgaaatttcatgacatccatgagaatcacacaattgccaacaaatttcatgtccaaaaaatcatacatatgaaaacatacacacatacataaatgacatatcggctcttcgatcctaggtctaagtaggaggaatagttatcagggtggaggatggcagcgtgtggtcaggggcagacccagagggtagtccaggtaggcacagaactaccctagaatttggcccagaaaagaccaggtattcatttttcgtggcccatcaaagaaagcctgacccaacagaaaaaaaaccctaactctcttctctcccctctccactcactctcccggcctcccactcccgacgggcgatggtgctccagcgagccacgactccggcggccggcgctcccgtgactcgcaccgccgcgcctcccgcctccggccggcggcgcctcccgcgtacgcgcctcccactgccttcgcgcgccgcgccagcgcccgcgcgcccgcgccctctccgcccctcgccgacgcggggggcctggccgcgccctctccatcccgcgtcggcgcgtccggccggcgcccgacggcctcctggctcccgcggtcctgcccgacgcgcgccaggggccagatggaggtcctgctccggccagcctctgacggtcaagcagtaggttgtcgccggtgccggtgctggtgttgccgtctccttcctagcttgcccaactgagctcatcaagtgtaggtaattaattagcttttactcaccattgcgtgctaaatcctttcatctggtggttactgcactattcactctgagggtgcctgagctctgcatcatcgtctgtacataagcttctgtgaaattgcccttttctgcacatatcattcttcacccatcagccatgttacctactcgttcaagtgcatttcacatttcacactgatccttgtgctttataggtttttaagtgttcttacgttttgtcatatctccttagaagggagatataagacaactaattgaagaatttaacagtcaaaaacatgccttttactcctattcgatcttgtgtatgtccttggaagggatatatgagttttgagtgtcaattctctagacaaatgacatcagactgcgttttctgaacaactgtcctttttatcacaagcaaacttctacatatgttaaacaccatagatggttgctctatcaaatcaatattgtgagctgttgcaacataatagtacttactatttcgattgtattgtatttggattttttttttggctaggcctaccctgggttcaaatcctgggtccgccactgcgtgtggtaggtggctaggggctggggactccagtggtgctggtggcggcgtcgggcggtagagcagtaggaggtggtggtcggtgctggcgttggctaatgaggatagtgactccatgctggtagaggactaaggaggaggaggaggagttgaggaagtggctgcgcggaagaagaggtggtggtgaacaactcaggaggcatgcgatgcggagtcgcggaaaggcagcatgcgatgcaaagtgggacgatgtggtgtgcgagtgcgatgctgaatcaggacgggagaggttgcgtgggatgcagagctgagtgatgactgctataggttaggattaggatcttagtcgacctattggactgaaattcggtgtattcagctaaccaagcgtactaactgaattgaccaaacaaaatttggtcttttaacccccgagaccgaattggtgacaagatttctcagtctcgatcccgaccattttggtttaggctttttcttcctacccctattggctgtagggacaacgaagggtcgtgaggttaggagttagcagcgatgaatttgacaacaataggcaatggtgtcgccgccggacacgggagaaagagagaaggggaagtaggaggcggttggtctggtgggcctcgctagcgtcgttgacggccactagctagccgacgtggctaggagtgatgtggtcggtcggaggcaggaggttggcaacgagagagcacactgagccactgaggattgtgcatacggatgcgtgcggaggggacgtgaaaacggggagaagagaataaggttcactgttcacacacgaatcgagatgcaatcttggttgtctgatggattgtccaaaattttgggtattttcagtcacatgtaaactagacagttccttaatataagtatactgcaaaagatccatttttatttcctgaactgtgtgctaaaactcaattgatgtcacccctaaatttcaaattcaaataaataacgccataaccatgtttgaaggtggtttttgtttgacatgattctttttctttaatttgctggtttaggcttctgtataagtttctatatttctttaatttgctggtttagacttctgtacaagtttcaatatcatattgatgccgacgtacgtagatagatctaccttcgacaaacttctgttttatatatgcgagtatggagctagtattctttgtttgataaaaaaataggcttctcagttgttcaattttcgttccagtggcaagttatatctatctatctatctatcttctattatctactccttccgatactagcatatatcccatccgatactaagttgatatattctgatacagagggagtatctattatctattatctatctattatattaaaagtccattagacttcctagaacgctcataagctgccatgtggtatcctacaaacactcataaatcgtcacgtgtcactccaataaaatagaaaaaaatcgaatgaaaatctggaaaaacaaataggtggattttaggtcgttagatctatatatcttggaaaaaagaatatctcaaaccaccctttcacctgcccctatgctatatgtacgtactcatgcctccgttccttaatttgctttttttgtttatctccatgacaattaaacctgaattatctgtggtggcaagaaaataaccccacaaatcaacctccacctaccaggtttaaccggttcttgctctattccattttttttaactttctcctctagctggcacttaagaacaataatagacttcaaatattcataactttttaaatcatatattaaatttatgatcagtttgagcaattgtatttttaattaaaccaataattcaatatccatattgactatatttcagtgctaagagaagcatttttttccagaaccacatccatcttggggccttcactaaataaaagaaaaatactagaatttctaaataaaagtgaaaatacccccaccttaagttatttaataaaattggtggacctattgctcaccgttagacatctcacaactttctacgaatttagttactttctccaacatacatataagggctatttacctatacaaattatattgatgcttgtctaaaataaattatctttttagtagataaataaatgcctttctaaataaatgatcttcttaagataatcatagaatctaaattgtatatataacatataaagtcactaataaattagaaaaaaaattaaatgatatcatctttttacgtcataatgtgtacccatatagcctatttttatagaaaagtgattgaatataaaaaacatgatcaattgaacatcatattgaatcgtatcaagcgtgtgggttgtaccaggaatcttagcagtgaaacaaccctcaacaatgtaccaagtcaattccatattggagttagagaccatgttatttatttatttttggtaaacttgctatattatattataaattcatgtcatctattgtagaacactctagaaatgtgtttcaagcggtatatgatatccagtgcaaatgcaaatgatatatagtttcattgaaaccaaatccattgttgcgatataatatttttgttataaattcaaaactacacggtttcaagacattttagtttagaatttatatgctgcaagaagaatagaagaaaatcataacaatagttgagagcaaacccaaacaaattattgacaagaaatatgtttacaatagagtaaaggaaagttttaataaaaattcacccgcacataaacattcacaacaaaatttcaaacatagtaaataaggtgtccgcgcatgtacgcgggcttctttcctagttagaaaaaaaagatcgatttttgatgtgaaaaaaaaacagtcacacgacaaataattggcccatatagttgagattaattatgtacatgcatgcttgatcgtgacaaatacaggtcatcacaccaagctggcagtaatcgttggagctacgactgggtcgtctcttgcgatcatggcgctatgattcattctctcgcggtttagatggaaatacggagacggagcatttcaaatcgacggaaaaaaaaactactggacctagacagttccagtacgccgatttggttgctgccacaaacaactttacgatggaaatagggagaggtggatatgggatagtctacaagggaagaatgaggtgcttagaggggcaaccagaagtggccgtaaaggaaatgcagaaaactggagcagtcaaggagacaaggacgacttctataatgaactcaacaccattagtgaagcaaggcacaagaacctagtcaagctagaaggttggtgctgccatataaatgcctggaatttgtgtgatttcttgtgttggtaccgccagaagcacaacatcacattcttccttgtctacgaattggtacgtaatggcaatctcgacgaccacctatatggaaagaagggcacactacagtggccaaagaggtactatacacacacacattaatataggattgatttattcatcaagtggcagattttttctattatgtgccaatcacatttacaacggtaattcgacataaaacaaattacaatcataaccattttcttctggaatacaacaaaagagtactctaacttgaaatttaaaatatacactatatataggctatgtgtcgtacaaatttaagtcactaacaaataaaaatatttaggtgactaacacatactccctctgtccatattatatgtcattttggcattttcatttatctagattcacaatttgaacacttatataaatctatgcattaatctattcaaaatgtagaacatcttataaaacgaaagagaggaagtagcaaaactgaagtatacaatctatatctttagggagcatttactagtctcagtcgtttaagttttattgccaatcaatcagttttgcaactaacatcgagcaacttacttctcttttttaagtcaaataaggaatattaattctagcttaaaataaaaggttacactttggtatggatcctaccaatataaaacaaacaaatataatctatatatgcataaaaatgcatgattttaaacaaatattgatcgagtttttcagcagtggtacgtaccatttttataatgtataaaataaaaaaaatgagagaaacaagaagttgcagtattaagtatatatactaaagatatcttaccttgcaagtctaacctattcattgtgcagtttttgttcactgaaaaatatataacaaaaaaaacagacaattgacaaatagccaaaccagaaaaagaaacatactagagtacattaagcacaaaaacacatctagcttaatccctaaaataaaccaaaccgaactaattaaaagctgcggtgtgctagctgttgtactaagttaaaacttttagctggtaaataagtaaaaaaagaaaaggtgatacataactaagaaatgtgttattgacaaattgtctatgcatggaaggtttcagatagtgatagacattacttcagctctagtttacctctatcatgagtgccatacctgcatctcctgcatagagacatcaaaccaagtaacatactcctggacgaaggtttgaacgccaagcttgccgacttcgggctggcgaggatcacggaaaacgccaagggcaaactgctgatagtggccatggggtcaattgatcagtacatagctccagagtacaagatacacggcgagcttgaattaatatccagcaccgacgtctacagcttcggactcgtcctcctagagatcgcttgtaccaggaaagacagggagcagatctggaacgatatgtacatgaaccacgccggcgtggctgccgtcgccgatcccaacaagctgaagggcgagttcgacaagaggcagatggagcgtgtgatcatcctggggcactggtgctctatgaaagacccaataaagcggcctaccatgagtgatgctatggatgtcctgcagcagtacgactacaggaatctgccagatttcaactcgctcagatgagatctgatcagtgtcaagtcgaatgtggtcaggtgtgtctagagcaccctgcaggcaaccggtaatatatcccttaatcgctagcatcctcagccacgcattcacaagatagtcaactgtgtgaagatctcctggtgtttgatcgatcacttgtggttaacgcaacattattgttttactttttgtatatataggtacggatatggcgcatcatcggattgcaatattatttcagttttcatattgaattcgatttgtttttcagtttactggaggtaatatcattcattaatacttcctctatctacttttcataggcatatatattttcaaatctgaaaaatttatttttgataggcatatttcaatccaacaacctatcatcttaataactttctcggatttaatgcgtattaatgaatcctttgtttacaaggaatgactagtagcatgtttaaatagatgataagtagaattatttattcttggtctgtatatcaagaatgaaatatgactatcaaaaatagatagagagagtataattttgtgttcagttatgggttatctaaatcgttagtttgatttaacggtttttaagacatttcagaagttacttgttaaataattattattttacattgaaaatatatagtttctcgttacaaagcgtgatatttcgttaccgagatatcttttctttctcggaggattctttttttttgggtaatcagctgtgtcgaggacacccagcctgtacattatactagaatagaaaaaatgtccctgtgttgcaacgggtaagatgtttttgaatcagtatacgtgaaaattctttaaatcgggcgcccgtgcgtcccgcgcctcgccgaaaaatcgggcgccgcgcgccgcgcctctgtaacaccccaggtaaccacgtacctagagtgccacaccagaaaacactcaaaccactaacttccaaaattattagaaatttcggcagagtctctcctgtaaatacggacatccacgacaggcaattataagttaaactaataacaatatcattcccataatacgatccatccttataatctatggggaagaaactattagaaatctaaaagattattacaagaccaaaccaggatataatttaagtgtgattatggacctaagcaatatagtttgatagtgtgcaagtagatgtgtatataagggtgctacttcccgcccatgcatgccggtctcaatgcgtacctaaaactaaataaaacacaagagtgagtataaaaatactcagcaagtacaatatgaatctagaaaatacatatacacatcattgacaataaagcatgaacagaaggctttctttctttgataggaaacacatttccaaacaccaagtcaaagaagatagtagttcccatcctgggcaggcatgaattgaaatagtagtttccatcccggacaatagtgaatacatcctagcatttgccggcgaagccgagtaagcgtgatcacgttgaaatatattagaaataaatagatagagtaaacaatgcatgaatcacacaattagttcgtcatgcacttgcctccaataaagaattggtatcatgcatgatctgatggaccaccacctaatcacaaacaaaaccttagcaaacatattcaaacatgcgtataaaactatgaaaaaggtgaacctactgccccatcccatcaaaactcaataacaaggaacgccgcttggactatacacaggactgctgcttcaaacctttatatcttgaaatatgaaaaggctatgactgaaaatgtatacattttgaaaatctacagaacaatacatacaactttcgtgtcgaaagcatatttttattctgccatttaaatggtctaatttgcgcttgaaagcaggcttcagaatctgttcagaatttcagacagtccacactgaaacaaccataactggagttctactcagcccaatcagggtgtactttaccaatatggaaagctaagaaaaacctctacaactttgtctataggcggcctggctgattccactgtttaacccctccaaaaacagttcaatctactactatccagattatgacacaaaaacaacagtcatactaaaataattatatctcctaaaccatttgagatagaatcacaccctttggtcagaagatatatccaaacattatctacaacttcctagttatacacttttgcagaaaataacatttagagccccgaaacatcgaaacactgaagcactgcaaatctgcccacatgcagaactacaataaaccgaaccgcaactacccaaactccttctctagctttccctaaccacaaattaatgcactaaagccatgctagaacaactgatacaacaaggagataagcctcacctagggtttctttagagaacttgtgaggagacaataggggagactccggtctaacccctcctactcctctcctcctcctcgttccgttttctaattcgcttcttgatccaacctatgaaggtggagatctagggagagcaatttgctgtagatgggagagatgcgaacacaggaggaggggaggaaagggcgctggccagggagaggggtggcggcactatgaggggaggtgagattcggttcccctctctctaggttttaggggagaactaatgggctgggtttatgggccttctcatgttggcccacttctaaagatatttttcttttatttatttctgttaacatctttattttaacaagtcaacccaaactaaaaaaacctaaatatcttttaatatatagggtattacagcctcatccttgggttcatcattattagctttatcacctttagccttgccatctttagatgtgcctgattccgaatcatcattgggaaccatctttagtttatacctttggatgaccgttcctgagcgagtttgcttgaatgaatgtaagcactgactcttcaagttgttcatcatctgctcatactctaacatctgttctggtgttagcttatccagtgttattggaatgatgttgtcagggccaatgtcagatggtggtttagaagtctgcttgttgtccaccatgatgaaaaatgtcacaactcgcatcccaccgagcgtgccaaaagcgtgttgatgcgaaaaacacacactgacctgggagatctgcttaactccaatacaagtcctaaatcttgctcttgggttcaaaggcgtgccagttgatttgatcctacaatcaacaagaaagaaacataaagaaaccgcggttaaatccataaacgatagccggtcggctaggagctgatgacatatcgtcaatcattaagccgattttattggcaatagatcggcgatgaggaataaagcaatataaagttatatttactcgatcggctgtagatatcaacgatatataatccttctcttggaatatatttaaattaagtgattgggatagatcgagcagcaagtcgagacagtataaatcacttatatttaaagatactttaagataacgattatacatacgtttatagcatagccgaacaaatagatctaacatgtatcggctaatactccgataccactctatattaagatattaaaacagacaaaatatattaaatagccagcctaatatactttaatgcaataagatcttaatataaagggcagatttagcatgtcaagcaagcatatagggtataaaatagctaaatcaggtaagatcggttgaaactccgatactatttctatcggtgatcagaaaacaaactagatattgcagttatgaatattatttaatagatcgaactcaatcatgcagcattaagtataagaataaatataagatctagacaagatgatgaaacctctaaaatatggtggatatgttatataatctagattaataacgaaatctaactcgatcggccactctccaatgatagatatcagccgattgcaggttagattgggaaactaataaggattataaaacatatatgataactcgatgatttacataaacaagattagagtgtcataaagatgaaagcactaatcccaagaacgcaagacgccataacaagtttaccttttgttgaagatcgaaatcgatgtagctcaacccaaaagcaagaactcgtcgaaataaaagtagaaaaagggtggtgatgcgccgaaagtattattgaactgttgttgtaaattacatggggtccagtcatatttatacccgagatacatgataggtccttgccggacacgactcttatctctaacaaactctaagatacaaacgaatctttatggcagattcttgccgaaacatatctctaaagaaattattcaaaatatcctaattaatagatacaattgcctatctgtgagcttatctctatcgcggtaatccttgtgtagtccgttgatcgatcccaaagacggttttacagccatctcaacgaaatcggctatatcggctgtatcggctatcttctgtccgacccatctcagccgatgcagtcctcagccgatgcccttgcagccgatgcgtactatattctttgtatacgattctccgccgtgtcacgtcccgtttttcgtgtcttctattttgctcgatttgaaaattaacgttcatgtttattcgcctaaaatagcttaatgaaaatttcataaatgaaaaagggtttaatttgactaaataatttaattatgccgcccttttattttacggtttgttaattggagttatttaatttttatttgagttttggaagtggagctcaatttgatgaattctcccaaattcttaaaaaaaaatcccaagtccaagaaaaatctcaacattttccttttccttttccttccttttcttttcctttttctttttcctccctgatctaggtagatgcctcttctcttttttttttctctgtaatgatctccatgtctctatctccctctgatgttctgtctctctctctctcccattagtttcacctttttcaatccccaatcaatatcctccactaatatta

SEQ ID NO: 9440 - DNA, 8678 bp, Oryza sativa
agaaggttgcttcgcttgccttgcattagcctttcccccatcagaagcttcttttgacttcgatttcttgggagcacgattttcccgacgatcaagaggttcctgcagatcagttgcttgactgctttcggtttcagaaggttgtgtgatttgcgtcgccgtagggctaccttcttcatcagatgcttccctggactttcttttcttgaaaacaaaacggtctaaatcatcattctgctcatcagaaacttcatcaccacactcagcctgagactgacttgcacatacatcattctcaatgctgccctcccgaacatcagattctcttggctcaatgactgattgcggatccttggaagttgacctgtttgaagaattaccattggttgcatccaacagagaatctaactgtgttctaacaaaaattgctacggcaactgcatggtcactaatcaaagtgtcactgggtgggcaatgaacaacattagccagtgcctggtaatagcgaaacagtgccaaggatggtggtgccagccccctttggcggaagactttagttgacttaatggcatgtttgcaaatgtttcccttcctggaccagctacaatcacacaatgcaagatcagaacctggattcactatgacatgggacctctccttgtttttctggcaaaccactctggcgcaattgccttcgacaacaacatcagaatctgggatttgcaatccctgctgccatggatttgggccacttttccactcactcctccagtaacgagaaaagttgtccttaccagaatattcatccaaccagtagtaggaatgaaccttcgtacccagcttatgaaccaaccaatctgcacgctggtatactctttcatttgcctcattcaatagcctgagttttagcaggtgatggtagctctcgattgctgaagcaacctcagtagtagccaacggggtggttcttaacatagttatccatgaccctggaatacattcggcagtcagcactagcagattaaatagtgatagaaaacttcatcaaataccagtagactcaaacaacggaaactgaaattcagatgtgggctaagcaaatgtgatacaggaaagagacatggaccaaccaagtcttggaaaccatagagctctgaagtagtctagaaaaccagcacaatcaacaaaatcttccagaaaggcttcaaataattccatgccaccatttcctctgcagatattgcagattaactccccaagtcgtttagccatcatcggacgcttctcaatatctgggcacttcttcattaaatttttatgccaagcatgccttatgcgccatgggctaatcagcacagggcactggaatacttccctgttcagcatgctattacactcaggaactgcaaccccagaaagcgtatagtaatgcactagattaaaatagaaaagcatcatttaccttatcgtgcgcacatctgcaaagggatcatcaataataaagccacccaactgccatgttggatcttttgtacgaactcgatcataaagggcacccatccatctatatgcttcaccatgtgaaaaattcggagttatgatccaagcaacaggaattgcatttttctgcttgtcgaaaacaaggaggctatgtacaggatactgcaaaatggtaaatagaaatgctaccatgaaatcaagcaaaccttaaagcactactggaacaaaaatgaaacaactgtcattgacaaacctttaatttgtttgttccaaactttgaatcagaagccaataaactacggttgccatactgaatcatctgctggagctgccaatctgtctggatgcccacgataaaggtgtccttatctgaaaagtcctcatacaaaaatatatggttttggtgattttcaacccatatgttaatgcttatagcatcatcgtcatcaagttcgtaaacagaacgacgaattttcctttccaacctcctaacatatctgtgagtaagaagaccatctcggtttgatggtcctccttgcttttcgatcatttctgtatgtctctgcattatggtctccactggaataccaacacagagcaaagacataatctgaagacgaagttcatctgatatgtaaggcgcaaacatggccttcgtcccaatagccatattgtccatgggaccatggcagggcttccctatcttatctacatgcttatcatggttatatatcacaagagcgacagatggttcagcaatcaaacgcttcacaataaaatggcaaatacagcccctctttgtatgaggacgaccagcaggtgttttcctctttgttgaagagttcctgctagggcggacagagccaccctttctataatcatctggaccaaaagaacaccaatacctgaaattaatggtatcatgaggttcaaaagcttaatgtaaattataacctatttaacagagcatatctaatgttaagagacataaatagaaggagcattatcagccatttaaaagataagatcgatttaacaaatagcaataataaatttgttctagtttacaagatgaataagaagcccaggttcacattccagtttaaaaattagtcggacagaaatgcataatgcttacatttacttacagaatatactcgagtatcccatcaacttttggtttgcagttcattgttggtggacgccttcgccgtgcttctacatgaaatcttgttgggcactctttgttgtttgattctcctctaacaaaatcattcacccttgaaaatggaataagcgcaagcctgtccattgagtccttccatccctccaccctggaccacatgatatctgatgccgaaaactctggcgtgggtggattctgaactggaagagtcaaaatttcatcccacctagccatctgcatttgcataggaatcatcacaaataatcaacgaaatcaaagccaaagtagcatatatttttttaagaaaaaaaaaagctatggtctgtgcaaagaggacagcatagacaaacaaaaaaaagagcatatatttgtaagacagttacacctaaaccaagtgtcatgttatgccttcgaaaatttaaacattagtgttgttcacatcacatgattaaaaacaaatacttgcagttgaatcgaaaagagcatatccacaatctcagtaggtgattcaagcaccccaagacaaggggaagttcgcattagattttgtggtatgctaagactgttagacatgaatcagcggtatcctttccacgttcatccttttctaagaacccataagtaaaccttcttttttctcaagccgggcattcgataacttgcattctggttgcaagagtgctgtaacagcattactacctctgaatgaatcaactcgctagcaaaccagacatttctaagcaatcccctcacccaagaacctgcaccgttggctacacttgttcaagtcctaaccctcctcaaactcccccatattggcctacgcacgccttaacccttctccaaaactcaccaatcgcgcaagtcaatggtgacgacgcacgcaagccaactaaaacctagtatatgctctacgatattgcagcggaaatattccaattccactggaatggattctttttgggaagctgacacagaagcccccagatctacaagagaagctagttctatgggtagagggaggggatagtgtggaggtaggtatgggtgctcaccggtggcggcggcggcggcggcggcggtggcgctgctcccttcgctggatggaggcggtggagacgggaaggccgtggggacggggagatcgactggctagggcgcacgcacgctgaggctcgaggcccaatcacatgtgtatgggcttttcctgtttccaagggaggctaaatagacttattcattgctgatggaccatgggaccaggctgaaaaatagactgccggtccttagagttagagcgtggtgtcacttagttccatggtcttgtaaaatcgacgttaagacccatgaacttgtttaagtgaatcattgcggttcaaagcagtctgaccagaatttccgtcttgcgtggttctccatcgtggccgcatatttgcaattaggtccctccacgcccgttccacccctcctccccaaatcttaagggctggcgccaccgcctgcagcagcctacgattgccgacgcccaattgccgtgttggagagctggccaccgctagctcaagtgcttgtagacgagatagccatatggctaccaagctcatccccaaccatcgtcaacgagctagccctgcccgcgggccgctgggtatgaggtcgacgaggtggccgtcgggagctcgatagtgaatcaggagtcgtgtccacggcgtggcatcagacgagccggccaagagccagaacggtgagggaggcagcagcgaccgacgacttagaggtggagaagcggaatccccagcgcgaactcgccgctcgtggccatggctcgccatcattgaggccaccacctggcagatgacagcgacggacggatcaggcgagggagagggatgcagatgagatgtgcagtgcggaggccctccccttccccttgtgccatctcccatctcatccgccaaattggctagctcagctccaggccccagctgtcgtcgtcgaggccctccgctttacaccatctcctccaccactccggctagctccaccccagccatcatcgtcgaggccctctattttccatctcctctgccgctccggctagctcctccctagcagccttcgtcgacctccttcactttcccccatctcatctgttgttcctgctagcttcgtcgttgtcgtcttcatcggcgagccaaggtcgtgaagcgagcacctcgtgcggtagcaattagcagacacaatgagaagaagaaaggaaaataaaaaggggaagacttgggggaggagggatggattggccgcagaggggcttaaatgcaaatatagggccacactagacagccacgtaggacgatcaacccggtcaaacgtgttttggattgtaatgattcacttaaacaacccgatcagacaaggtttacgtcaattttacaagatcgttgacctaagtgacaccatgtttcaactttaaggatcggcggtgtattttactaagaaaacaagtaacggtaagttggtaaacggacttgcccaaaatagtctaatgggaaattcactttatcgaaggctttacttctggtccattcactttatcccatttggacatgtcatcgcaggccagatattaaatttgtattctctagaagatgcctctaaaatgtaacatattggaagaaccgactgagcagatattctctcactcctgaagcatgatatatacaacggatgctcgtgagatcccccatcttttgcagtcacaatttttagcattaatgtcaaacaatgtacttagaattcatatgttctacctaaaaatagtacctttttctagctagcaaagcataacatgtgttcaccatatctgtattcttcaacaccttcttcctcatcttggggcatataggctattgctattgctttgccatttctttatgcttattgtattacctactcatcagttgacctttgattctttctagcattttgaggattggtaagtctctagcctctgagatgtacttgctgaatgcttcacaattattgttcagtaagatgtcacacatagggaactcaccgaaacacactctgaccttgcggaggcgaaatcgaagtattcataaatctcccatggcacaccacaagtccacaacctcctgagcgctcaccgctgactcttagccatataggatactttctccaagagtaacaaacacagtcgattatttgcttactataaactctcaagtgctcaaatggatggagtgtatctctcttgttctcaatccaactctttcctcttctcaaatccttctcatagaaagctactccaaggtaaggggatgaggaaatactatttagttttggatataactcacttttgcaaacccccccccccaaccagtagaaaagaaaggatgagggatttaaacaacatatccagatttttgccattgggataaaaagattacaacatcataaattctgatgtggacatcagaacttccggtcatttcaaaaagaaaaacctaacagtaacaacacacatgctttgacctaggattttacacataagaaattctgatgcacaaattaaaacttccgataatttgaagccatccaaactgagagcaagaactttggagatatcaaacattttaatactcaaaaatctagatattcacattgaaaaatctattcataaaccttgaacacaacccaaaagcttaactttgaagaaaaaagggacattccattaaactgccacataagagcttctagtattactcaaaccataatgacttgctttgaagtctgtttttaatgatcgtgaactttatagaaagctcactcagagggttacccggccaaactaaaacacaaggtctaaaatcacttgaacgatacggcaatacttgagtttctctcaacaagcacttcgatagatcattttgagtaccaagacatatacaaacacatcaatgattgcacccctcttaataggtattcatatattcaaatgtaaatagaaaaaaaaaatataccaatagaaatacattaatgtttatttgtcaataccaaaaccatttcttctttcatacttaaaatgattgatgtggagtactcatagattcaaaatttcaaatggctttatacggtccatcatgacaaaatcatcccttgcccttcaagatcgtttggtccatcgcagctgagtattgcattccctttacctgtctcgccatagatattcactttgttcttcgcatttccaatattttcactttgtaattttgttcatcaatttgaattttccatttcactttgtttttgttgattgatagtttgaaatccatcttctagatcttcatctattctcttgacagcaagcttgatcatgaattgagaaaattttatctttcacaccattttcttcttgatcatgcttctcttctcatgaagtaacttgaaaaccaatggctgatgtctaccttgaagttcttcgtagagcatcttaattgtcatcaacttcacatatggtatttgttggcagttgttaaacaccattttgaccccaagcttcggcaatagaatgggtgaaacaatgttcaattcatccatttactttagattaatgaatcaccatgagctttattgttcgttacttcgttagttattttgtaggtactatccaaataaagatgaaatgtggaatttcaaatgtttgaccaaatcttgtcctaaatgacgtatgtttagtgacaattttgttcgttggggtcactcttcaacagtgagatcttattaaccttgcctttaagactttggtccagcttttaatttttttttgatacaaagtataatataaattattaatattggtttgaataaagtatattgtatagctaagtgataatttcacggaaacataaccctagcatctaagtgcaataaatacaatcaattaaattcagttgtaacatgttacaaccttaacaatcgaaccgcctctaacaccacgatataatcggtccaatcgtaagattcaataacaacattactaataaaaaaaagttaacgcgtgtagttacaatacaaatagatagcaaaaaaatccatgcagtaaagaagtaaacatcaatcgtcactaacaccacaaaaccacaatacaaccagttcgatcatagaattaaataacgacatcactacttttaaaaagaatataagaagtaatatgtttaaatagataccactaaaaattatagtatgtaaataaagagctaagcaccaaaattaacagctattgttgcctccaatccattaaccacttgccatctatagatggctgtctccagccacaccagtgaccagccaagcaaaacacagcttttgcttgattacttccttccagaaacggcagcccaggcttcgttcaaactcactcacagctaagcctttccttaaccccgtttgaatttccgagcttgcgtcgaatattccggatgcccatccccaccaccaagggcaccctcgtcatttccccatcccccaccccgaccgaatatgccccgcgcggcggtcgccccgccacgtggacgcgcccccacccgacgaacgagattcctcgcgggtgcccccggccgcgtaattaccaaactacccattctactattccgcttttataatatagctgcctcttcgtcttcttcttccccaatttccccttctcctctccttctcttcccgctttgcttcccaatttctccacgccaccgagcaattcgtgagagggagaagggatcggaaaccctaaccctagcggtgggagccgccatggatgcgcggatgcggtgagcgggggtggttttcttggtgggtgaggcgaggtggttgggggtatgggtggggggaggaggaggaggagcgcggcgatggcgatggagggggaggtggagggtggtgggaggaggcgggtggtgcggatcatctttcg

SEQ ID NO: 9441 - DNA, 46254 bp, Oryza sativa
gcattagttcgatttttcttttgcgtcaatttgggcaaagaagatgatgttaaccaataaaatttggggaagtcgttgatatatgactctaccggtaagagttcaattcttggcgaagtcgttgttatatgactctaccaataataatttaaattttgatacgtacatataaaggacgtaactacacagctaccactaagtttgtctaaaccagctaccactctatctatagagacaccatccacatgtacttcaaatacaattttctcttaaactactcatccgatctacgatccgactacaccgttgtgtttgtaacaattaaatctttacaacaagatcttacatgattatattttgatgaaaaatcataaattacttttataatatgtctaaattacttttagattttactaagttacttcttagatatataaaagtaaattcagtaaagcctaaaagtaatttacatatattatataagtaacttagaacaaaacgaaggtaactttgccatgtcatttaaagtaaatctgttggagagataaaaacatgactctatctagaaattgaattaatcagcacaaattatggaattaactaaaaacaataataaaagtaatcacctcagagcattatgaatatataggaagtattttaatcaaaagtaacctatatatatgataattatatatatgataatttgttcaatgaaaaaaggaattaattaaagttactttctttttgttataagttagttctataatatatgtaaattacgtttaggctttactgaatttacttttatatttctaagaagtaacttagtgaaatctaaatgtaatttagacaaatcataaaattaatttgtgatttttcatcaaaatataatcatgtgagatcttgttgtaaagattttaattattacgaacataatggtgtaatcggatgagtaatttaagagaaaattttatttgaagcttagatgataggaatattttctcaacttacttcatggattagtgctatagtaaagtaagattcttcaagttagcacatatctaaataggggtcactcgttatgactaaatcgagagtgctctcgatttagattttgcgacataaaaatattactccgtacgtgaatttgccatttagtaactaataacaacaattgggctgggccatcttgggccagagggaaaggccgagaggtagaccaaagcccatcaatcatagaggaggccacaaaaacatagccatgagatcgaatggtgtcacgcatggtgtacgtaaccctaagcgccggcgcggtcgcggacaatgtcgcggccgatccttcgccggcctgcgcagccctctcctctcccatctccggcgccccgtccgccgccacgacgccaccgacgtcccagcatttcttcgtccccgccacctgatcataggcccacgatcaggcaactcctcggatgccacaaacggcgccgccggcgagatcgcggcgaagaagcacctgtacctggcgatcgatgaccggaagaacgcgtacaacaggacatctctacgacggcggcgacgccgtcgacccatggtgttggcggagctcagagccgaacacgcagatgtcatggagtcccgtgcgagaaaagcacgccgtacgtgcaccccgggggacgcgcctagcttcttcctctccgcgatgaaccagtttcggtcgggcggcgtcgacgtcgaggtcaccttcttctacagcaaggacagcgacgtctgctggacgcgccgcggcgactggctgctgccgttcagaggccacggccactacgacggcgagctcggctcgtgggtcggcctccacactactccgacaccaacaggctacgcaccgacgggcgcctctgcgcctgccacgtcgtgtccgcctccgccgaagcgagcggcgagccggcgccagaggtgaaggtcgggaaggataaggtgttcgtccaggtccctgcaggctgggtgcacgaagaggccgagctcgtgtacatgggtaagcgagtactgcctcgttgcgtggctgcgccccgagggcgacgacgaggaaaagtgcctgtgcgacggggacaagtgcgtgctccacctgaccagggttaaacatatcggtttagccgatttgatcggtgctcacaaaaatgctgaaatttaaaacaaaatttagttgaatttgaaataatattaccaaaattcaaacaaaaaaaatatggccaaaataatatcgtaacggagggatccgaaatgaccgaaatttctaaaattttgttctggaatttgcaatcctacgcctgaccacgttgcaggtggcgtacgacggcgacggcgagctcaccgccactgatcgccggctcgctggctgctacaaattctccaagtatgagatgaactcccatacgagcgttctggatataacggacagctacgagcctacgacagttcactaaagaatttagtagctcatggtgaatctgagggttcaaaattccgaaacgaaatttcggtctattggatccctgatatgatattataatggacaaaaaaatattttttttaatttggcgatatttattcaaatttaactaatttttttataaaaaatcaaacaatttctgatcaaaatttttgaaatttcacgatatcggcacccacaatacatatgccgaaaaccagagattgaaccctaatggccatacgtgtatgccttatttgaagagtcattttagtgtcaattaatttgtagcagtgatccagtcaaaaggaacaaaaatttgcatagaaaaacaccattatggatccttattcctcagatcaaaattgctctcaggggcccaccattttagcaccctgctgcctgctggacctaggccacccaggctaatgttgcttgagttgcttgcttcctcgttagcttccctggagtttgtgtttttcctcagtagctctcttcgtcttcgcacgcagccacgcaccgtgtgtattcgttcctctttttttttttagccggcagctggctggttgtaaactagtactccctctgtttcaaaatgtttgacaccgttgactttttagcacatatttgaccattcgtcttgttaaaaaaaatggtacatgaaagtatatatttaacaatgaatcaaatgatatgaaaagaataaataattacttaaattttttgaataagacgaatcgtcaaacacgtactaaaaagttaacggtgtcaaacattttgaaacagagggagtatttgcttccttctaatatgtcgacacgcaagctttttgcacgttaaaaaaatcaaagttactctagaacaattaatttatatttcatcatttgttactaatatttattgacaaaacaatgagtgccagcctcctaccatttaggtgattcctaaacgcattctacagctctttccggctcctctccactgaattgccccctattgtccttctaggttcccacatgcctctctttcatcgaatggcatagccaggaatatagaggccctagcaatagatgggtgcatatgtctctcctttgtttagtggcaaagcctacgcatagagcccccgactagagagggacacctagagagggagtactccttccgtcccaaatataacaaattttggtcggatgtgacatattctagtattacaaatctagacatgacgcatatccagattcgtagtactaggaattgttacctccaatcaaaatcccttatattttagaacggggaaagtataacggaaggtgatacctgctcatatatgttagtgcctcaaagacaccttatcattatgacaaaggacgtgctcctacaagcacaaccaaaacccataaaagctagccgccaaaagcgaattcctattggttatcaatacttttcactgcaattgtaatgcataaccatttgggtggccaaattctttaaacgaatgaaggaaattttataaattttaggctcctaaaataactttgagcgtaccgtggccatggcactaaagttaaaagtaagttgtagatgtgaaataaaatcttaattataaagatttgatttgaaggataaaagtaaaccataaatagacaaagaatcccccggagatcaaaatacatagaagaactgatctccaaaaataagaaaattgagattatgccaacgtaaaaaataggctttgccaaaatgccatcctgcaaataggattggataaaatgttgtgaacagggtgatttcaccaccattccaccatttcatacaaattaataaaatgattttgctttttttttacatgagaactgacaaaagtgcccctctctccctatctattgtttactctcattgtggccgagaaataagctagactattgacgccacgtagcagcgccaatgctgagtcgccgccaccactcagcaactagctcgtgcagaatgtagacgagcacatcatcctgcagtaggttgagcttgtcaatccgtcactcctcggcttcttccatatgaggcttaaaatcatcagatgacaagtctgataaggagctagggttagggtttgcgactacaaattaagtagtgtcagcattaaggttgttggggttaccggtacggtggtggtgaagctgaaggagaatgtgatcaacggtcacgtccgatgagcttgttggtacaaggcagaggtacgcggttcctagcttcactacgtacaaggtcttgcggtctcagttgatgtcattgcgtcacaaacctagaaaatgatctgcttggaggtcccataaaaaaattgaccatgatgaaggggcaataggaatgggacggcccacgtttatgtggcatcctcacaagatttccacatgttttgaccttgatgacaatgatataagcccatggcgagctcatgcctccctcccgaagctcatactcaagctctgccggggagcttagacctagttgaaaaaccattttaattggaaagaaatggctttctagcgtagatgtctagccgtttaggttgttaatactaacattttatccaactctatttatggaatgatatttacgtgaaactcaatttttctaggcaaaatttgccacagggcatccaaaaaaccctgtaattagctggtggacaccacaaaaacacgaaattgctgtcgggcaaaaaaaactggtaattagctctcggacacttatggccttattttattattttcggggaaaacggagagagaaactgaggtgagagtacgattctgcccctgtgctacttcgctgaagctggtcgtcacaatccatcgccgccctcaccgaagctggtcggcagtccctccgtggcggcggaggtggcagcaccgaggccgtgagcgcgaggatggtgtggcggtgagcggcgccgcgggtgggaaggccttggtggcggcgcaccggaaggcctgcggagctcgtcggcgaggtgcggcatctccctctctttctccagctcctcctgcgcccctctgggcctcccgcctcacctcctcctcgcctcccctgacgtcgtccacgccgcaggcgaggccgcccctgacgagcttgtcgcagaccttctccagccgctccctcgacctcctctccctctccagctccctccgggacgccgccagctccctctccgcgtcggccagcgccttcccgagcttggcgttcaccctctcggcgcgtcgcctcgacctctgctcaccgtcgagctccgccgccgccacgcgcaccatcgccgcgaccttctccctctgctggctcctccactcccgcgccttctcgacgagctgcgtcctcatccgtgccgtctcgtcgccgtgccgccggtcctccgtggcgaggtgccgtacgtgagcgcgtgccaggtcgagctcggcgcacagcgcggagagcagcgacgccgtcgacgggtttaggccatcgtcagggccccagatgccgacaagagccttgacgagctccttggacgtggcaaggctgctgcatatctccttcagttgcggcacatctccttggacatgtaatctaaacggcggcggcgacaggcgctgcactcgctggcgtgcggcgcggtgaggaagcacaggctggaagaggacaagaaaagaaaataggggagaggctgacatccttgaccacatagggcaatctagtctttttcgattgtttctctctccattttctccgaaaataataaaataaggccgcgagtgtccgatagctaattaccagttttttttcgtgcctgacagcaaattcgtgtttttccggtgtccactagctaattacaagttttttttggatgccccgtagcaaattttgccattttttatgtggcgtaattctaaataggattatcttaaaaaaactgctgcaagtttttttaaggaaaaaccttttcaatctaactatagtattatagtataattgtaatataattccactataattgtaatatgacttatatataagtgttataataatatatacaactttatatctaacttatataaagataacaatatagttatagtgtagttacgtggtagttataatataactatactatataattgcattgtagttacactataactattactatatttatatttgaaaggttttttttatcaaaaaacttgtgacagttttttaataattccgattctaaatttctccaaaaaatactaaccagctcgcaggagacagagacatgacccatgcgcagaagatctccaattgccaggtcagcctcccacggccccatccaccacgcagcccccaccccgactacgttcctagaccctgtcttccacgtgattcagtgccccacgtcactgatagctgggccccacccaactgtcggtccactgcacccgtggacgggtaacccgcagccttaaatctcggcttgtgtcagagccgctccgaaccccctctctcccatcgccgccgccgccgccgccgacacagccgctgacctcgccgccgccgacgccgatggagatggccgcccccgtctcccccgcgccgcgcaccgtcgaggacatcttcaaggacttctccggccgccgcgccggcctcgtccgcgccctcaccgtcggtaagtaataacgacgaacacctcgcccgcctctctctctatctctcttcggttgtctcctcttctggatctaacgagctcgccgcccgtgcggggggtttttgtttgtgccgcgcagatgtggatgagttctacggattctgcgacccaggtaagaccgaaccggatcggatctgatgagggtagagagagttcgggtggtggttttgtgtgtggggtttgatttggggttttggggatgtgagcagagaaggagaatttgtgcctgtacgggcacccgaacgggcggtgggaggtggcgctgccggcggaggaggtgccgccggagctgccggagccggcgctcgggatcaacttcgccagggacgggatgcaccgccgcgactggctctcgctcgtcgccgtccactccgactcgtggctgctctccgtcgccttcttcttcggcgcgcgcctcaacggcaacgagaggtaccagccacacgcttttcctccattagatctcgtgaaaattgaccatctatgaagaagaaaagatcacttacttggagcgtataattcgatgggtgcaagtgcaatcgaactctgttcttgccttgtgggttgtgggtgcagtgtaatgccgttcttgtgcttgccccgtgggggtttatggatttgcatattttatttcagctcaactggtccatgtgtgcgcttgtgctgtgttgcacatgtttattgtgctttatttcaccattcttttttctctttgctgtgaatgggggccatgtttctcactgtgtttgctttattttctctctttcttttcttcgtttgctgaattgattttattttttgccataaaattgcaaaacagtgctgtgtgtacttggtgatgattattactcctaccagtagtaattgcctttgaaataagttcccgggctgtctgaaaatttgatctttcacttggaacatgttttgacagatttcttttcagttttcacatccttgtcagaagttggggggctgacggtgataggctctgtgtacttcacagtacattgaaactttgaaaggtctcagtgtctgcacaaatttttgtttcgtgttacaattcgagtgttgtgctatatggatgacctttcatcataatgctttttagtcatttgggttttggataccttaattcatgtttttcaagagtacctattttatggaccatggcagtaaaagtgttcgcaaattaggatacaactaataaacaatcaaatgggcaagtaccattcttattcaacttaacatgccataaattgaattctttctttctattgagcttcagttgtgtttgctctgttccttcgttcttccttaagaaactttgggattacaatttgctttgtgtccttaattttcaagttctgcaaatactcgttgaatatttttctcgctacattttaattcctaaaatgcaatgtgtcatatggagtcttttgatggataaccaaagggtagatgaagttttatgtgcctaaattattagtactgttaggttgaatcattaattggcctctggtccttttttaatgttttatgcaggaagttttgtgttttttgctttggtctacttgagtacttgactgccatgcaaaccataagtcgtaattctgtgatattgcaatttttttcttagcaaaagttatcttgtttattctgtttttcagtttgattttttttttggttcagttaatcttgctagtttcctggttgaactttgcatttctattccagccatttttctcttctcttttctccctgagatgaggctttgacgctttgtgagcttaagtttctatcattttggcatagtaattctgcctgctttcattgtactctagtatctattttcctgcacactttccacttctatttgaatttatttttcttctgtttcatcttactatctgttactgtatcagggcagtagagtgctaaactgtgaagtgctgccatctgttctttcatgtgcttcgtttgtgttgcacaaggagctaaatcagtcacaaaatttgtattatcattatgtaatgggaagcattatctgttccttatctgtttgtttatgttgctttcatgtttgtttatagtgtttcgttgcttatctgttgtctttcgaaggattcatattgtacgctggattattttttaactcccaaggaaatattgggtcatgcctcacaagtgttttctttctttatgtacaaattctattttatttgttgcattacttcatggatatcttgtttccatatttttgtctatcctgcccagggctaacctgttgaaacataaaacttgtgccatgtgtattggtgtcttggattcatattctgatttgaacatccctttgcatcaaccattatctctgttaagaacccaaagtatcatatcatggttaacaaaatccttttcctggatccaatgtgttgctctcttgattgtcaggaagcgcttattcagcttgatcaatgaccatccaaccgtgcttgaagcactgtctgataggaagcatggaagggataataaatctggtgccgacaatggcagcaaatccaggcactcaggaaaggtgccgtaccagtgctcttagtttttattttcatcatgaaccatttctgaactgtgcccatttgagtttttacgaactgaaagctggctttgttatgcagcgagcaaatgacgtgcagacaaaaacctcgaggccagcagttgttgacgatgggtacgatgaagaagaacacagtgaaaccctatgtggaacctgcggtggccgctacaacgccaacgagttttggattgggtgcgacatttgcgagcggtggttccacggcaaatgcgttaggataacaccagcgaaagcggaacacataaagcactacaagtgccctgattgcagcagctccaagaagagtaggcaataaaaaccatggagctgctgctgtggctctctactgctgactaagctgatcaatcaaatgatacttgccatccctcttccagtcccaagttggcggcagatgtgaagaatttgctctagaacattgcgcactgttgtggtagatgctggaaaacaaaaaagaagaaactttacaggatagtttgtttcataaactggtcggttactgttgtggttgttcatttgagatatggatactgttacattgtagcctttagaggaaatttgttcatgccttgtttctaatttggtatgtccttcccttgctgcatgacattgatttctctctacaagtttctgtctgtcactgtgcatatatactgtggtttgtctcggtgtgtactgtggaacagtcctgtctgctgggatatttggtccttggttcgtctactctgtggtgcatcagggagggattcagggtttctagtttttggagggaatctgcaggcagggatatgctcgttttcagagcagaagcaattatcaagatcacgggaatgctattcccaatctgatactccctcctgataatctcataataagttcacttttagcttttccatttgttataagttcatttttagagcaatattatatcggagtttatgaacgttgggaatataattgtattgaaatataattgtatcgagagtagttaaattgaagaatagttacattagcatttgataaagtaggggtatagtctttttagttttgtattatatattagtattagtatgtgtgggatggatgaaaaatgaatgggagtgcctagcaatcattcgaatgattttttcattcatctcactcggatttttcaacatatggatgtgcgccacgttgcagagggaaacaggctagcttaatagtaagttcgtaacaacagacccaatatgacagttataagtccaaagatgtttaataaaaaaaaataaaaatgtcatcaacatatgcatcagcaagcgtcaagcgaatacatataatctttcccaaaaaaatgtttttggtttcctaaactgaaaatatgaagcaaagtaactgaacgtataatctttcccaaaaatttgttttggttttctaaactgaaaatatgaagcaaaataacttattaaaagcctaaattttatcctcaaaaattaaaagtggaccattatgttaaactaccaacatgatttccgttttcctccgtcagcgcactacctcctagcactccccctaagggcatctacaatcactaactgagggtactctaggtgtactcacatctacaatgcaggccatgtctggtagcccaatgagtgtcccaacccaaaatagcccatttctctcatcctcctctctttcctattctacccctctcttccctctctctctctccctccgcacgaccgcatgcgcattcctctctccctccacccgttgttccactcacagcctgcttccctctctcccgccgctgctcccgccgccgcctgccacctccgctcgtctccctctccctttctctctctctctctctctcactaccaccaccgtctcccgccgccgcccccgaatcgagctcatgggacggaggcggcagtcatcatcgtcatcgtctggtagctggagcagcagatccggggcggaggcgaccgacggcgagcggcgcacggggcggaggtggcagtcgtcatcgtccggtggccggaggcggcagatctggccgctctctccctctctctctctcccgtggaaggtggcggcggcgaccccggaggcggcagatccggcgccgccgtggccggatctggccccccggcggatggagtggcgccggccgcgccgcatcgagacggtggtggtgccggtggtggccgcatcgacgatggcaccgtcattcttcaccgcactcgccgacgccgccccctcctcaccctcccttcttctctctgacagcgagcagccgcatcgagcagacggtggtggcatcagcggtggctgcatcgatgatggcgccgtcgccttcttcaccgcgctcgccacctcgctcctcgccctcccttcttctctccggcggcaagcggcaccttcgcctcgcccttgacgcgcgggccggtgacataggggagaagggtggaagaggaaatcaaagctctggggtgcgtcgcctcaagaacctacctacgcaatgggtttcttcgccccgtccccctggaaaaagcgagcgagcgacgcgtcccccagctagggcgcgcgtttcatcccaggggacgacgcagacgaaaagcctaatggacagcgctagggagacggaccgaagcactacattggtgattgcctaaagccgcgccgatctcccacgtgcgggaaaagcgctcccccctaaagccatgccgttcgcccacacgtgggaaggagaggaggaagtacaaggtgggagcgacgatattgggagtgggcaagggcgccgttttctctgacatatcaacataactccaaaaatcatgtaggggagtaggggatctgttggagtgctttttttttcactaaaatacctgaaaattggttttggagatgaaataggaggaccattagtgatgctgtaagaactttaaaaaaattacgatggtcaaggaaaatatagtttatcttaaatatagtttatcttatggcaataaaatatttaaattaagttgagttgtctctacgtatagcttaaaatgatactccctccattcttaaatatttgacgtcgttgacttttttaaacatgtttgaccgttcatcttattcaaaaaaacttatgtgaatattattcaaaaacttgagtagtagtagtataatatttaacaatgaatcaaatgataggaaaagaattagtaattacttaattcttttgataagacgaacggtcaaacatgtttaaaaaagtcaactgcgtcaaatatctagagacggaatgtgtacataggaatagtatttttgcatatcccaccaaaataaaatgaccaaatgacccaatttgtcgggggtacctttagcgcatgttgctagattgtgcaaatttatcccctttttttcaaataatgaaataatggattaattcgtacgctccctgaatttataaacagtgtttaaaaaactttctatacattaatttctaagaatattgttttaaatctattttctatcttcataacgtttaattcatttatatcctcaaataattataataaatcattcgactattcggtcattcagcataaaagaatagagccgtggacatgcgaacccacatgctgacatgcatgaacaataatctttcatcaatttgtgttatttgcgaaatcaattaaattttatccataagatgactagtggcagctgtagatacgtggtatggtctactctcttgcagattgcgaatagtttatcattaggtattaagcttaataaagggctgtttagattatagccaaaataaagtttaccaaattttgtcattaccaaaagtttgataatattactaagttttggcaggatttcttacgtgtttaccaaagtttggtaaaaaaaataaatagttgcatatttttggtaactttattacaaattgatatagttaatctgaacaacctctaagtcaatgcttgcttcacgtgttttacctgcaagttcacacacacacacaaaatgcatatttgtatctcaagttcagtaggcatgcaagtcaaaactgaatccctccatggtttaaactttaaaatggcatttataattttactgctgtaggttggcatttgttatttgcaatcgctttcatacggtcagagatgcttgtcatattctaccctttggcctccatctgtttctcgttttgctttcgttacggataatatgggaatattttagaggacaaagtggccatccggtgagccaagtttcataattgtttaacccgttttatggtgtggagtgtacccttagcattgcgacatgaatggctgaaaaatcatagttagatttttctaaaatgcagtttagtcatattttaagcaaacagccaacagaaaagacatgtgaaaatggaaattttaatatccactcttcgaaaaataacatgtaaatagcatgggggttgagctgtcaacagcagagagagcactcccctgttacacccataaaaaattctatgaaaaaaagtaaatattattgttacatccgtcccataataattataactgtaagattcaaattaattctaaaatagttattacaatagagtagtaattatcccatcaatcactctcattcaaaattttcactattttaccatcattcatcctcccagtcctacctatatatattattaaaccttaatatatattaaacaacctagaattaaaattattttgggatggagataatattatacgcgtgtaaaacctcaaatttaaatttaacaattttaagagtataaatctatcataattttatcttttttctttctattacgataaatttcaagatgagacttagatgcatgttacttgtaaaaacaaatataatttttattgatatctgttaattggtgtaaagtttgtgcattcatgatacattccaattttgtaaaagcttactattttactcatgaactttaagcagcatatatgaagggtgtgtttagttcacgttaaaattagaagtttggttgaaattggaacaatgtgacagaaaagttaaaagtttgtgtgtttaggaaagttttgatgtgataaaaaagttggaagtttgttgaaaaaagtttggaactaaactcagccgaattttagggaacatttggtttggtatgaactttggaattcatgatccgacccgtttgttgccaattcaggtgaccaaatttcagtacgccaaccatttgcagttgtttttgacgaacctaacttcaaacaaatgcaatttggagcaacaatactattattatagccactatcagagcaaaaacaactactaccttagatgaggaattaataaataatccaaactggtcccctactgctaggttgctgattaagatgagtgattaagcatcaattaaatcaagacgactagctccccactcactgccaggtgggcccaccttgtcggattagaggaaagtccctcactgccatacacaaccattgccggattagctgtccatcgattacaaaaatcccaaatcttttggcgccgccgtcgctgtcgccgacgacaccaccgccgccgccgtcctcgtcatctccagatcgccctctccttgatccccacttgcatcgccccggaggcgcggtggacgagacgacggcgatggccggaaaggatgaggcggaagggctcgaggcgaggctgctgctgctgccgcctgaggcggcggcggaggagccgacgaggtgtggcggcggcgacggcggcggcggcgggaggaagcggaagaagacgtaccttgatgtccttggcgtgtgctgctccgcggaggtcgcgctggtggagcggctgctcgcgccgctcgacggcgtccgcgtggtgtccgtcgtcgtggcgtcccgcaccgtcgtcgtcgagcacgaccccgccgccgccccggagtccgccatcggtaagccaccgcgcgcgcgcgcgccattaatcctccacgcgattctcgcgcgagattctcactgaatcgagtcgtcgtcgtcgtctttgtcttggagtgcagtgaaggcgctgaacaaggccggcctcgaggcgtcggtgcgagcctacggcagcagcggcgtggtcagccggtggccgagcccgtacatcgtcgcctccggcgtcctcctcacggcgtccttcttcgagtggctcttccctcccctgcagtgcctggccgtggcggccgtcgtcgccggcgcgccgccgatggtgcgccgtgggttcgccgcggcgagccggctgtcgctcgacatcaacgtcctcatgctcatcgccgtcgccggcgcgctctgcctcggcgactacacggaggccggcgccatcgtcttcctcttcaccaccgcagaatggctcgagacgctggcctgcacaaaggtaggagtacatgtcaatgtcctcttcaccaaatccatggcgatcttggcacgaacccggacgaacactcacgttgcgaggtgtgcaggcgagcgccgggatgtcgtcgttgatgggcatgctgccggtgaaggcggtcatcgcgacgacgggcgaggttgtcagcgtgcgcgacgtccgcgtgggcgacgtcgtcgcggtcagggccggcgagatcgtccccgtcgacggcgtggtggtcgacggccagagcgaggtcgacgagaggagcctcaccggcgagtccttcccggtgccgaagcagccgcactccgaggtctgggccggcacaatgaactttgacggtaaacaaacaaacaatcaaaaaaatctctcatctcttagtttcagagttcccaaatgtacggaactctgaaacgtccgtgtcgttgaattgtccgtcttttctcatcagcttaagttctggtaaactgattgacgcatccaactcaatagtcacaatagcacacatttgttcatgtcatgatcaatgggattgagaggctgtcacgtttcaggttacattgctgtgagaactacggctctcgccgagaactcgacggtggcgaagatggagaggctggtggaggcggcgcagaacagcaggtcgaagacgcagcggctgatcgattcgtgcgcaaagtactacacgccgggtgcgcaatcggcatcgcctaaactctcaacatctccaattttacaacacaaaattcatcagtaacaaagacatttctgttcttggtgcgttgcagccgtggtggttgttgcagcaggagtggccctgatcccggctctgctcggagcagatggccttgagcaatggtggaagctggctctggtgatgcttgtgagcgcgtgcccctgcgcattagtgctgtcgacaccggtggcatccttctgcgcaatgctgcgcgctgcgaggatggggatcttcatcaagggtggagatgttcttgaatcacttggggagatcagggccgtcgcgttcgacaagaccgggacgatcaccagaggagagttcagcatcgactcgttccatctggttggggatcacaaggttgagatggatcatcttctttactggtaagactgagaaagaagatttcatttcagctcttggaatgcagctgctacactgaacaaatttgacagattttcaactgttgtcggtttacgacttgtcgaaaaatccttagtacttgtgatggtttgaattgacttgaacagtgaaatgcttggcacaaattatgtctttggttattgcaggattgcaagcattgagagcaagtcaagccacccaatggcagctgcacttgtggagtatgctcaatccaaatccatccaaccaaacccggaaaatgtgggcgattttcggatatatcccggggaggggatctatggagagatccatggaaagcacatctacattgggaacagaaggacattggcaagagcgtcatcacctcagtcaagtgagcaaaacacatcatttgtagtagtagtacagttcctgacaattaagcttcagaattagctgatcagctgaagctgagctgactgaactgaaatctgtgacgtttacagctcaagaaatgggtgagatgatcaagggcgtgtcgatcggctacgtgatctgcgacggcgagctcgccggcgtcttctcgctctccgacgactgccggaccggcgcggcggaggcgatccgggagcttggatcgctgggcatcaagtcggttatgctgaccggggacagcagcgcggcggcgacgcacgcgcagggccagctcggcggcgtcatggaggagctccactccgagctcctcccggaggacaaggtccggctcgtcagcggcctcaaggcgaggttcggcccgacgatgatggtcggggacgggatgaacgacgcggcggcgctggcggcggcggacgtgggcgtgtccatgggcatctccgggtcggcggcggcgatggagaccagccacgcgacgctcatgtcgagcgacgtgctcagggtccccgaggccgtcaggctcggccggtgcgcccgccggaccatcgccgtcaacgtggccggctcggtggccgtgaaggccgccgtgctcgcgctggccgcggcgtggcgccccgtgctctgggccgccgtgctcgccgacgtcgggacgtgcctcctcgtcgtgctcaacagcatgacgctgctcagggaggagtggaagggcggcgccaaggaggacggcgcgtgccgcgccacggcgaggtcgctggtgatgaggtcccagctcgccgccgactcccaagcacccaacgccgcagacgctggcgccgccggccgtgagcaaacgaacggctgccgttgctgtccgaagccgggcatgtcgcccgagcactcggttgtcatcgacatccgagccgacggcgagcgtcaagaagagcggccggccgaggcggccgtcgttgccaaatgttgcggcggaggcggcggcgagggcatccgctgcggagcctccaagaagccaactgcaacggtcgttgttgccaaatgttgcgggggcggcggcggcggcgagggcaccaggtgcggcgcgtccaagaatccggcaacggcggccgtcgttgccaaatgttgcagcggaggcggcggcgagggcatcggctgcggagcctccaagaagccaactgcaacggccgttgttgccaaatgttgcggcggcggcggcgagggcaccaggtgcgccgcgtccaagaagccggcaacggcggccgtcgttgccaaatgttgcggtggcgatggcggcgagggcaccggatgtggtgcctccaagaggtcgccgccggctgagggaagctgcagcggcggtgaaggcggtaccaatggtgttggtcgttgctgcacgagcgtgaagaggccaacctgttgcgacatgggagcggcggaggtgtccgattcttcgccggagacggcgaaagactgcagaaatgggaggtgttgcgcgaagacgatgaactccggtgaagtgaaaggatgatgttgcaagattgaccagtaattcactctacgaaatgttaagttttaactgatcattattgtgtcattttccttgggctgaaatcatcttgtaatgcatcaatgattgttgtacagtactagtatcattgaaaactgccaaataacatgtaacattcgaaatcctttttttcaatgttgatacgtagttcacgattgcataccaaccctcgtacatgtacatcgcactcaatagccacaagcgtgtcccatttgagatagattattgacagaattattggtttggagtatctaatttactagatgatgtcccgcgtcttgctacgggatatatgttagatatctattatctatctattctattctattctattatatactaaaagtccattaaacttcctacaaacgctcctaagccaccacgtggcactcctacaaacgctcctaagtcgccacgtggcacaatctaatctcaccgtcgatttttactaaagttggtggacccattattttacaccattagattagatctattattgacaaatacttcctccattttttattagatgacgccgttgactttttctcacatgtttgaccattcgtcttattaaaaaattttatgcaaatgcataagatataaattacacttaaagtaatatgagtgataaaacaactcataacaaaatatattataattacgtaaatttttttaataagacaaatggtcaagcatatgagaaaaagttgacggcgtcattgttaacagtgaaatttggtaagcccggagtaatcatcggcttagagtcaacatcggcttcgaagtcctgagattagccgatgagagttgtcaagatgtcagttgtcggattcttgctatattcggttaagggaattgattaaggaagcttgtccagaagagaccaagttcaaataggatacggcatggcaagttatctattaattaggaatagtttgttagtttccttttatctttaggaaagtgtgtttagtgtcctataaggactttatcttttccttttatctttaggaaagtttctgtcttgtccgacaaggacttgtatcaacccatgggtataaatatgtacacccggggtctatgtaatctatcctcacgattaatacaattcggcgcatcgccaccttttaccttttctactttattttatcgtccggcgggacttggcacctgacgcagggctgcatcagtgttcgatctccggcgaagggataagtccaatgttccgtcggttcaggcaattgtatcgtctacgtcggcgtcgttcaaggctgcatcagtacattcaacctcttggattgctctggtttgaatgatatatttgcctacccatttatcatatgtctctgttaatctagtcttagcatatcaatttagctctatcggttgcttctcgttttagggtttctaccgatatcggctaaatcgcgttgctagattagattagcttagacatctaccaccctgaaaatcagtcaacggtttgattgtctggatattgtgtttcttttcatacttagtgctgcatcagttaagtttgatctactaagtcgtgcttagaaccgtaatctctagcatgctttttgactgccaataagggtttcatcgaggtttcagccggtgagttatctggacgttgtgtatgttcccccgccctcttctagactttatacatttgtaaaaatatgttcggctcataaggattgcatatacatataagttggatttagctgatgacaacaaaggtttcactgtttaatctaatctcgtggatttcatgacatcggaccaccagccgatgtgtgctttaatcttcggatcaatgcttattctatcatatcaatgctagccgattggtttatactagactatattattgttatattttattatcagtagccgattgcctatatatcattatttactaaagtgttagaatctacattggatgtatagccgattgcttaaactctatcgttatcggctggtatcggcatcggctattatcggctatcggctggaactactccatcggcttgtcagccgatcagctgttttatctgctgtttacatattttgtcagttgcaggatcaaactgactggcacgcccgcatctcatcaagatttggacctgcacaggagctaagcagatctcccaggccgatgtgttcgattttttcgtcaacagtcatctattaaaaaacggaggtagtaactacctcgtgtttataacgtacaagcgctactactgtccgtacatatttgtacgatgcaaatgttactgttgttctttccatacgtacaaacgtacatgattgtgaaaacaaaacgataaagctttcctaatcttcacttgaagaaaaaaaaatacacatgtacattaaagacaggaaaaacatacattcataaaaatcaatggtctttaaaatatgattttctacaatataaagataaaatatattacttcataaatataaatatgtttagttaaattaacatgtataataaatattcaatgaattttcttccaaatctatatattatatactaaaagtatattaaactttgtacacacgcctttacaccgctacgtggctcttacataaattacagaaatcttagaaatctattatatactaaaaatctgttaaatgtcctgtaaacgctcctacattgtcacgtgacgctctaataatgatagagaaatcctagaaatttagagtaaaaaaagaaaagcatccaacctttaattttctattaaattagtggatccgttattttaaacattggattagagctcttagaattcccatgctgctaatatctatccaaaaaaaaacataacttgcttacgtcgtacgatcgtctcccacctgaaaaaaaaacttaaatacctacaccatatacgatcgagaaaaagataaagccaaaaaataaaaaaaaacatgcacacatatataggggtgaaaacgggtcgggttcgatcgaatgtcacccttcccacatcctaacccatattttataattggaatcgggtcggacacggatagtgccgaatacggatagaaactcggataatgtcgggcaaaaatacggaacttatacataccaaaatagatatgtacactatcggttacggatatttattccgatatcaagtcgaagcaacaatcttatatatcatataggcaatcactatttaacaatttcatatatcatataataagattatattaggtcattaggaccttaggaaataaatagggtacaatacatcatagtataaccaatacatagtaccaaaaagtacctcacaaaaacgtaatacgtgtaatatccgtataattatccgggtaacacccggattttttaccggataatctgtatccgtcggatactatattcccgaacccgatctcatatccgccaaaaaagtctcaggtacttgaatttgtcccgaaagtaatgtgaccgggcgggtgagtgggacatacccacgccattttcacccctacacgtatataatagaatgggaaaaaaatactaataaggaaaaatcatcagtgccagcactgatttgtggtcaacaacctttaatctatgattttattaaaaataatactatatagatatgcatagttaaacttaatcgtaaacttattgtagtgataaatatatcatgacaaatgacgccaacatgtaatagcaaatgagatcataatgtttcaaataatttcatatcaaattttatggtgtcaaatatcacttgacaaatatacaccgttaatttgaatctacatatgtaaaaatcaaaataacaaaacctagcattgttttttaagtacatcgatctattcaggtttatttaattttgggagagaatgagattctcaaagtatttggaattttcaaaatttttcttatttgagctgtgagaagcacaattaatagatttatgagaaaataaattaaagtttatccagtgataataaaataacagaatttagatttggttaatttttaagtggatctttttaagtttattttgggtgagattgagattctaaaagtatctgaaatttttcaaaacttttttattgctatttgaggagtgagatgcatacatgatagatagatatttcttatatgccactaaaagttcaccggtttccttatatgccatcgtaaattagctattcccgtatatgccatcaaacgaaattttcgctcacctatatgccatccacgtcacccaagagtagaaatagtgttagtttttttgaaaaatgacaaaattgcccctggactccctttcctgctatgtaaagaacaaatcaggatgtgttgcagttaaaactatgactataactttagcaatcattattgattcaacacacaaccaatttaccaaacaaatcaggatgtgttgcatttaaaactatgactataactttagcaatcattattgattcaacacacaaccaatttaccaatgactggatgcaaagttttatttctcttccatttttatagtttatttatagattatagaaagaaatagtttgtattcttttttaaatggcactaagaacaataatttaattagtcctaatttaatgtatctaactggatgtaagcattcagtttagaaaaaaaaatctctcggcttagcaaactgattgtgtgcctaatttgttcacaaaaatagttatgctcaactaaaaaggttaagtgcttaatttagtctcaccatggaagtaagtaacttcatgataccgacatcagttgaataacatcaaaatatgcatcaccttttttaattcgtggtaagaaaactaagacaaaagaaaggaaaagaaagctaagggtaatttcttactttcaatgccacctaaaatagtcagatgacgtggataacatatgaggaattgaaaaaaaaatcatttagtgggatatacgggaatagcaaattttcaatggaatatgaggaaactggtgaacattcaatggcatataaggatttttttaataaataaataagattttagatagttattttgctacaatacaacccttaattcatcacgagaattacgtatttgccaagtagcattggcaaaacatgaataatacaataaaataagcataaaactacttatgttatattttttatggttgataaaaattctaatataccgggtataattgatggacaaatgctatacaccactaaacctaactgtaagtgcactctagagaattagttggtgtaaataagtttgtgaaaataagtacattcttagaattagtaaatgagtctcatatagttgaaaacaacatatgatggaaacaaatctaccgctaaagtataaatctttatcgaaatataattaatgataaggtgttttgcagattttcatggtctctttagctatagtttttattaagtactgttgaatgattaaccccactcatttgaaaaacataatattgtatgtattctattataatttaagaagtacttattactaacttcatatacacattttgcctattctctaccacaaatcgactcaaaacttaaaaaaaaaccatttttatcacctcctttatgtccctctttatccttcaatgcagggtgcagtacttgctataccattgtaaatattgcatgggcatgtacatggttgtgttaaggtggtgtccatgaaaggccaccataggcaatgtaactaaagtgacataattaccatataatcatttgtgattgtaccgatattgaactaagtgttaaaattgtactctaggatggtttttaggggtatggctacatcgacgcgggacccatatgtttcaaggcattacatacgaaagcgttggttggcagatacagtcgacttcatccattaaagaggcattcatgtttattttaacggtgttatcgcattattcggtagatatataaggtatatttagactatttatacatagatgtgaaaataagttatgaacaccgggttatgtaggtagatgaatttttttagtatattaataatgtgtcatttgttttagtgatactaatacagtttcatttattaaaaagtgcacctaactcgatcttaaaacaataacaatgatagtaagtagtggtgacaaacgatcggtttatatattaccaggacaaagggacttttttttttaaatgtaagagatattcttatcacattagtagtatactaaaatctatcatctattttacggtaaatatatttctttttctattgtaggataatctaaattctcttacagtatatacatatatagtgatgtataattccttttagcattttttaataacaaataagatgcccgtgcatctgtacgaaattcctttccgatttatgttttggaaacacaaactataatacatgcccgcgcattcgcgggggctaccttcctagttggagaaatgatacaatgatttggtttgaaatattatgaatatgatttagcatgtttatgtttagtttaagaatgaaataaattatagatataattactatatgcttgcatgttgtgttttgtgtgtttaatgggttgatgtggcagcttgcatgtatgttttagaagtgtcaataaatactaagtttgcatgttgaactttagatgtttagtggatattaactttatagaaagaagggataatatgaatagattaaatattttaaaaataagccaagcaaataacttataagcggtctaaataatagagtgatttttttagtaaaacatattttagataaatagagaaaataatcaataataataggccccgaaaagaacaaggcatatgacaagtacatgacacagcaaagacacatattagaaaagtacaagtcatatgacaaatgcatgacacacgattaatgcaaacacatagagtacaaagggaaagggtaaaaaggtgctatatttataacatatatttttcaccaaaacaattatattttttaactccataaattacctacacttacattaactatattgtaaatttaaaaacttacattacaagtttcaatttttacattgtaattttctaatacatagagtaaaaagaataggattaaaaataatttattatgtacttaaaagagtacatagaaaatatagacatatacttattatgtagaagagaaaatcacatagaaaaaaaggactcaaattaagtgaaaaataagtgaatcaaattttagggcttgtccactttgatgtcattttcaaccttaccaaattttagtaaagttgccaaaaaagtggctacatttagtttgctaccaaattttggtaactatataggagatcctgccaaaattttgataagttgtcaaaatttggtaaggatttttttacatcaaagtggacatgcccatagttttagcaatcccgaaggggaaaacaaacaagatttcattgtgggaataggttccatgtttatttacaacggattttcggcatgtcatcagttgatttaccggttatgagattctccttgggatccatgctcaaaatggatattgaactgaaattccaaacaatcccacgtggatgggctgttattcaggcccatccaaacaataccttaatgggctcattagcaaaccccaacaggccaacactgctacatcaactcagcccagatacgaaaacaaagtccagaacagaaggcccaacaaggctctgcactctgaatcttacacatctcctttggtcagagtcaagctctgaatcttagcagccatgtcgtccatgaatttctcatcactgtcctgttgcaggatcttccatctttctgttgcttcctggacgggtcaaaagatatacatctccatcagattcagcaggcgcggatctcgtggactgcaaagcatggcgacacaatgtcgacattgcttgataaccatgcacacattcttcagactttcagagttccagattcaacagagtctgctatctcgtttcaaacccacaaaggtaggcaggtgcaccctcgatcacaatcagtacccccagttttagtcacacaacaacaaaaaaagaaaaaaaaaactacacacacctctacacattaacaatatataagttcaattagaatgctacaaatactacaaaattgcgacggcgagtacattcacttccattttttcttctcgacctataatttaatttcctctacattagtccctgagtgacgcttgtctaggcccatttggcgagcatggacatgaggccggcgccggcgagcatggcgaggttgatgccgagctggagcttgcctttgctctgcaccctggggttcatgaagtcctcggcgaggaggtcgacgagggccatgtagatgaggatccccgccgcgacggagttgaggatgccctccaccaccagcgccgtcgggctgctctcgttgtacaccgacgagatgcccacgccgacggcgatccccaccggcgtcgtcaggcagaagaagaggaccatcgtcacgatcgacctcaccttgaacttcgcctgcatacattttcaggagaattaaattaactcatgctgtgttattaaatacatttttcaggagtagtatgcaaaaggttgatattgccggaactaggcaacttgtaaattaagccattccatttgtatacttcttcgggccgttctaaacagaggttggaaaccgctgattagccgcattgtatatataattaagtattaattattaaaaattttaaaaaataaatttatttgattgcataagcacattctatataaaaagttttcgtacgaaacatatcgtttgtagtttaaaaaatgtgataacagaaatcgagaagtaactaattaattaaccgatctctgatttgaaacaggcccttaagccctattcatcaggttacatttcagcttttctgttctttgtcttatacatataccagtccgaaatactatcaaatcatgtaaagtttcaatgctttagatgatcactactttgactcaatctcgagccagttagtcacatagccttccttggtcaaatcatcaaagtaatatagctcccttttccctctttacatatatattgtttttcaagaataaagtgccctatcttttccatagaatcaagcaagtggattagtagcttagtcttttttttgcctcttttgatggagaccatacaatacaagaccaaatttccagcttccagtgcgcgaaacataaaagattagcacgaaaacactaaatcatgctacgacaagtttagtgtaaataagtttcattcatcggattatctactttatagtacaaataaattaaatattttaaaatataaaaaaataaatacttctaaaaacaagtggtgtaaataatatagtactagaagattttttttagaaaaaacatattttgaagacgctgaggaaataatttatgacaataatccggtgaaacagctgaactacatgaatgatttgagccaacaaggctatatcttttaagatgccgtgcaagataccatttttacatatatgaattttgggtaaaaaaaaaacaccatgtagtaaaagaaaaagagagtagaaatatacctgcacgatgcagccaccgagtcccatgccctcgaacatttggtggaagctgagggcgaccaccagcggcttgatggtttccggattctgtgacgcgccgagggagatgccaatgatcaccgagtgcaccacgatccctagctctagaacctaattaaaatcaatcaattgtataagtcaataatgatacacaatatatattattctgaatattgcactcgtttgttaaattctgcacgcatttttctttgcattttacatcaccgaaaatgatatatgtacgacacacattgaatttgaaacctttgggcgcatgtgccctcgtttttccgcgattcggctctttcttctatcactccataatacgccgaaaatttgatctttggtataaatgctattttcgagaacgccaatttataatatatggtgggatctcttataaaaaaaatatatgtgcaaaagaaatgaatacacttaaattccattttaattctgcaatatttatttgaaacgtacatactactccctctatccctaaatataagggattttgattagatgtgacttatcctagtacaatgaacttggacatgatttatatctagattcgctgtcttagaatgtatcacattcaaccaaaatctcttatatttaaggacggagagagagagtagtaatgaaagtgtggaaaatgacagtaaaaaaaacagaaggttactgagactgctgtttcttacctatgggttaattaaaccaggctggcgtcatgaatgaatgcatggtaattagctaggtgttacgttaattaaaggaggtggcctctcacctgagagatgacacgatgccggagagttgtctccttgtcgtcctcgccgacggccgcgacgagcgccgacgagccgtgcgcgtggccgtgcgtcgcgtgggtgtgcacgtgcacctgtccctcgtgctcctcgccgccgccgccgccatcgccgacgacgtggtgattgtggtggtggttgtgctgctgcgtcgcggcggcgctctgcttctcctcgtccgcgacggcggcggcggtggcggcgtccttcttggacagcgcacgcgtgaagtagccggtggcgagggtgtcgacgacgagcgtgccgatggcgccgaccatggcgccgaagccggcgaaggggaactccttccacggcccgccggcggggaggcagtcgtcggtgaggttgtcgaacgcgtcggggaggatgtggatgaaccccgtggcgaggatgacgcccgccgcgaacgccttgacgaggaagaacacgtcgccgtcggggcgcagcgcagggacgtggcgccccagcgaggggaggccgcaccccagcgcgccgcacaccaggatggagaagaaggccgcgatcttgagccccctcgcccgcgcccggtcccgccccgccgccgcatcctccttcccgcacccgccgtcgccgccgtcgccgcgcgccgccgtggcgagcagcagcgccacggccgcggcgaggagcacggtggcggtggtgttcgtcctcatggccgctcttctgctcctgctgctatcgcggattcgcgggttttatagattcggatggtgaaggtgaagggagtaattagggttttaatcaccttggattagtcgctcggtttaaatggggggattaaaaggtgaatggtagtagtaacacagagtgacgacacttgacagtaactcggggtgaaatttttggttgagggagatattttagtttttgttttggcaagtaattacggcgtagaattactaattacgcaaggatgacgacactatttgtcacgaagtgttgacatgctgagtaggagagagaagtgtagcattcgagggtacgcgtgtgagaatttcaggccatgaaacgcgtaacgaccggaagtgtagcattccaccgccgtcgccgtcttctcccattccacatggatgaaggtactcgatctattcaatgacaaatgggttcgaggagtcttatgtatcgttaagtactcccctccatttttatttttttttttacgcttcccacaggcccgattaaactaaggaagctgtgaattaacttgtttgcccttcactcttgcccctttgcactaatgcgtttcgtccatacaggggtgaaaagggcaagggtggaaattctcgtatgggaggagggcgtctgaactgcaagcgtcaaaaaaaaaaaaacgccttcagagcatctccagcaggaaccttaaatccagcccctattcaatttttgagagttaagataaaaaaactagatccagcagggaccctattacagccccaaaataagaaggccctcaaatcctcccctaaggcctcagtcctaggggctccgagcacggccccatcattctttttttttggcgtggataacaattttgcttcgcgctttttcgtgttattcctgcgcggctgcgacgagggatcttctccggcgaccaccggcgaactcccagcatctccgccaagcctgccccaaaaggtaagacttttccacacatttgttcgcccgtcgtccacaaggccggcggcggtggtccatgcgtacgcctggtcaccgacctccccccatccgcctggccatacgccggccgtcgcgtgccctctgagactgcccgcacgcacatcacccacttgcatggtgtttgcccccacgctggcctctgcccgatcatattttcagatttcactggccggagcctgtacaccgccgctgccccattgatttttctggaaaaaacttgaagttggtcatgtggtgtggtggttgagtagtagaggagatctcagtagtagagtaccagtcaatttttctgaataaactcgttcttgactacctgtggacgtggtgacagatggttatggtggtgaatgatttgtttttaatatttttttgaagaattgtagtggactgtcggccaggacaatctaaattctcaactagtatatatcactgtacttatagtagcactgcattgtgtagcactgtacaattgttgcaatggatcgattataaccatatatatatgcactgcttttcatagattgaatgttgcgtactgtatatgtgtagttggatacgtgtgtgtatatgctctaaattttcttattaattttatgatcttgtgatggcagtgttttttacatggacttctacgacggtgacgacgacgacgacgacgatcttattaccgaatggtgggatcaagaggagttgtttgacgatgatgactactacattgcagctgctcttcttacggacatagagcataagaggaccaaaagaaagcgtcgtggttcagtcccaggtcgtgagataatttatagggataggtttgctggcaatttgcgcatagtggctgattattttgcagatcctcctgtatataatgcaaaattatttaggagaaggttcagaatgtcaagggagctcttcttgcgcatcgtggctagtgtggaggctcatgatgactacttcaggtggagaccgaatgcagtgggtcttctcggtgctactgcattgcagaaggtgtatggtgcaattcgcatgcttgcatatgatattccaaccgatagtcttgatgaagttgtgaggatttcagagagcaccatgatagaagctttcaagcactttgtcaaggctgtggtagatgtgcttgctgatcaatacttgagggcaccaactgctgaggacactgcaaggttgatggctataaacactccaagggggttcccagggatgttaggttgtattggctgtatgcattggaggtggaagaattgcccaacaggctagaaaggacaatactcagggcatgtggatgggccaaccatgattcttgaagctgttgcatcgaaagatttatggatttggcattccttctttggactaccaggttctcttaatgatatcaatgtactacagagatcaccactctttcaaaggcttacatcaaggacagctcctgagctggagtttatagtgaatggaaagaaatacactatgggttactatcttgctgatggcatatacccttcttgggccacttttgtgaagaccatttccaatccacaaggtaacaagagaatacattatgcaaaagttcaagaaggagtgagaaaggatgttgaaagagcatttggtgttctacaagcccgctttgcaatggtgaggggtcctgctagattttgggatacagagaccctatggtacataatgacagcttgtgtaatcatgcacaacatgatcattgacaatgagcgagatgaagatgtagactatgactatgatcgggaggacagtgaggtgttgagaaaggaggaataccaatggcgtaataaacctgtgttagagaagtttctaaagatacataaagaaattgaagaccgacaggtacatgagcaacttcgagatgatgttgtggaacagttgtgggcgcttcatggtgctcgatagtttgtttcattgcattttctatcatgtatgggttatgttcaatatttgctcgtaggatatatcattttcatgtttgaaaattttgaattcaaatttgaatcgtggtatttgaaattgcaaatttgaatatggttgaattccacgcgctagagttatctatgtttgaattattgtgtgttaaactaaatataaatataaattctatactaaaataaaagagaaaaaggaataggggctaagatatggaggctactgctagacataaaggcatatttagggtcctaaagcattggggacagcccccatttaaactttagggactctaaagtagggcctactactggagatgctcttaggtatgaattggaacgtcaaacaaaaaaatggaagggagtaatagtattatatactacctctgtccctaaatatttcacaccgttgacttttctaaacatgtttaaccgttcgtcttattcaaaaatttttgtgaaatatgtaaaactatatgtatacataaaagtatatttaacaataaatcaaatgatatgaaaagaattaataattacttaaattttttcaataagacgaacggtcaaacatgttttaaaagagttaaccgcgttaaatattttgggacggaggaagtgtgtagtagtgcagatgattttaatttttcacatgcctcttttcttcttcttcggccaccatccggagagcgccacgcgtcagacgtacggcgcgagacgaataatcggacgcctcgcacgaccgtccgatccatcataaatgaatcaagcaaactttaaactatttttttctcttaaaatatttatcaaaatcatgatccaattacactattaaatccattacaattaaatctttaaaacaagaccacacatgaatataaccagatgaaaaaaaattagcttattattgaattatttttaaatgttgcacgctgttgcaccaagtatatcagaattgtttcactaagtagatcaaaaatgtttcatcgaacgccttatttgaaaattatgtttcagcgaatagcgaaatgatgtttcaattcactgcaacatttgatccatatatagtaaaacatcacgagtacactagatgaaacattttaaatgaaaataactcatttgaaattgaaaaaaaaaatcagacggtcaaatattgcagttgaccaacaagtgaaactttaagttatatatggtgaaaaaaaatcagcaactgaagcatttaaatattttatgaaatatggtgaagatacacgttgaaacatgtcgctatcacatataaaacaataagtattaatggactgaaacatatgtttttcttttatgaaaatataattaagcgatatcttattgtaaagatttaattacaacgaatataacggtgcgatcggatcatagattgaataagtaatttaagataaaattttgaagcttgctaaaatacatgcatctatgcatgcatgaggtggagagagagagtagtagcaggtagtttcagggattttgtgaaacacactgaagacacatattaaaacatatcactatcacgtatgaaacattttgttttaacagtttgaaacacatgtttttcttttgacataatataatcatgtgatattttgttgtaaagatttaattgcaacgaatacaaacgatgtgataggttcgtagatcggataagtaatttaggagaaaaaaatttaaagagaggaggaaagaatgaaaagaaacagatagacatgcatgttacggtaacatggttcgtccaatccaccaggctgctgatttgtagtattttcctgacgtcgacagagagagaagaaattagtaaataagaagtgagctggtcgtaggtgtccgatgatttttatctgatcggacgttccaagagaagtattttcgccaccatcctcttctcctcgattcggctatctcaacctttgtcttcgagtagaagaatgactataggagggtagcaaacaagtgctttgtcttcgtatagcccaaacagatccaagcttgtcgatcatctcgagtaattcttcttctcttgccttcgaattgctccgagcattaatgccgacaatgagtagattaggacagcacggtccgattcttaaaacatccgtagctgccaaaaacttttttaactagacccgtctatgtgtcattatattgtttttttatgtctcttccttaaactgaagagataaatccctaaagtcacgaaatttcttaaagaaacatccttgtaaatgcatacagttccaaaatttcatgccatgggtcatcacaaccgcaaacatctctcctattagggattattgaggactcccaaagatcgggtttcaaaccttcacagaatttcgaaatgaacaacggttatgttattgcagaaacgtatagctttttttttttcttgaggaaaaaacgtatggatattcaaacaattgaacgcaagatgaaagccagatggggaatctcgtcaccagcgctgtgtacgagctatatatatggagatttttctgcacgttaacctcaatctcctcgaatcttttccacggctgaatgacttttttactcttgctgatcttcttcattgtttgtttcctcggtttcaccttttgcaagagcctatgtgctttcgggtggtgcgttatcctgttggttactgcgagtgtgacccactttgctttattttcccaattacagtgaagatgcacacatatcttaaattaaacgatactctcttcgtttcatattataagttgtttgacttttttcttagtcaaatttctttagatttgatcaagtttataaaaaaaaattagcaacatgtataatatcaaattagtttcattaaatttaacattgaatatatataaataatatgtttgtatcgcattgaaaatgttagtatattttttctacaaacttgattaaatttaaagaagtttgattaagaaaaaaatcaaatgacttatgatatgaaatggatagagcataagtgagaggcaaactttgatctcgttgaaaattctatggatatcgcgcctatgtgtatacttgacactactagtaatctcttcgatccgttgtcaaatacgttacaatctgagctcaaaattaatgttaactattgttataaaattattaggatttaatatatgaaaatgacattattagacttgtgaaaaaaattgatgcaattattatattttgatgtttttagtaatgtataattagaaaagtgattattaaacccatgttttagattcctttcgatgttgtaaacggcatctaaaatggcgtggctaatgggtgatcgctcgcttgcgatcgatccccatcccccctatacactccccttcccccttcctccttcctccttcctcctccccttcttctcttcctactacactataaatttttaaaaaataaaaaaaaataaagttaaaaaaaattatgtatagaaataatatatataaaaaatatttgattcaaattcaaatttgaaatgggtatgtaaacttttgacttataaactttgggtctataaactttaggtgtataaacttcagatgtatagaaatactatatataaaaaatatttaaattcaaattcaatttgaatcggatataaaaacttttgatttataaactttgggtctctaaactttagatgtgtaaacttgaggtgtacaaacttttggtgcataaatttactaaaataggaaagtaatatagtgccaaaaaaggaaaccacgtgaaggagagaggggcgacccgatcgctaggggtgatcgatcgcccattaggagtttcgcatctaaaaggaacataaataatgtggtatgtttgtgaaaacaaccctgttgactttattaatctctagtatgatatatttgtgaaaccaagcaaaaatatagtcctaggaaattattctattttacgaaactattccaccggtaccattcaaatatcaattagtcacggagatgaagtcatggagacattaaagctcataatgctggcctgattcaacgcccaaaaaaagtcacacatcgtttaatagaaacatatttcagttggttcaccgtaccggattattatcatggattatttgctccacctttctaaatatactttttttttaaaaaaaagtcttctactatattgtttggattagactacttgtacaatatttattaagtttatgtttcaaactatttaattcacgtacatattcagctagctagataatccacgacaataatcctatcaataatttgtttcgaacattaccttagaaaagattcttttattttggatggtgaggccaggatacacataagtcgaatggaaccgtagaaaatatgaccaaagcgtgctgtttcagaaaaaaaaaaacaaagaaaagaaaatatggccaaagcgaaggacaaccaggaccacactacaacaattcacaccatgctactctcttagtacaaaatacacgcatcttttcttgttagtagagattaaatttaaatgagaagtaattgatgagacagtgataagctaggaagaaatttaaatgagaagtaatcgatgagataaatagtagtagtacttagagcaagtttaatagtatagctaattactagcttcaattcatctatagtcaatctaatagatcattcatacaatagttacatactacactattaatacctggtcccacatgtcatacacacactgcgtcttgaagtccgtgctacagctggctataaatctgtagcccccctgctcttctctttcctcatttgtctccttaaaatatgtttggaactggcttatagcctgctattatacttgctcttaagaacaacactataaacatattttaatataactttcaaatgctacaaatgcttattttttagataataggtaaatcctatctttactttagcaggagctaaaagtgcttctgaatggagagagtaggtttttactgtttatatgcttatctcgaattctaagaagaagcgaccgacgagagtcttcctcgtctcaatcacaagtctccccatggctcaatcgtcaccaaaaactgatgcagagacaaaggattggtcgtcacgacaaatatgaatcaacagtggaatgaaaagacggacaatttttgtaccttgcaaaagtcttctcctgttgcaaatctttggtcgccagagataagtatcagctggtcctaatcttagcacgatcagtggtcacatgaacaacaaagactacacagccaacgacttgcagtacacgaacataggcgaccgcagtgaaagttgacctatagctaccatagaccaaacgcaccaataatatttatatattccaaggaatcaatcaaattaaagctctagattacattatatatatatatatatatatattatgtcattactcaccgcagttgcacgatcggccaccaatactagatactgctacgaaaacagttttcgcaagcggctgaaggcctaaaaacaagtgggcggaaatgtacatcattttcacgaacggtttcttagcaatacacgaaaacttattctcatatgtgcagttccttttaaccggtcatctacgaagttcgcacctgcattatgtcgttatctaaaagaaattcttgaaaattttaaatgatctgtgtggtaaagaaaaagggtagcgcatggttggttgagttagatgtcttatcagccatatagcttaaccaaaatcaacgattaagttcaagagctgtaaaaagaaaacttagagaaagtcttttgcacgacatatgttacatctaagaggtgacatgggcaaggttgttcgattaacgtcatcgtagactcgtagacttgtggtggcgtggttgcccgtgtcaatctcgatcgtacaatttttggcggaaagtagacagaaccggttggctaattcacgcgtgcgtccactttgtgccgtcctatacgcaggtaggaacatgctggtcttgatcaagtactctctctgttcccacgtataagtatttttaagatttaaattttgtacacactacataaatatttttgtaacactgaatccaacattttttatgggaatcaaacatttcagctaatcaggtgcttgaagaatctaaccaattcaaattttgaccaataaaatcactcaaagaaagtatttctctataaggttgcgtttgtgagggttggaaaccctttcccgatatgcaaagcatggcggtagattggcgcataattaattaaatattaaaaaaactgaaaaatagattgatttgattttaaagtatttcttctatataaatcttttagaaaaggaaaaagtatgaattaccccctgaattaccgcgatagtttaggggggtaattcgtactttttttccttttaaaaaatatattgtttaacggtgcacgcgaaaaataaaagagcagaagttgagaaagtgtccaaaggaacacaaccttaacgttaggcctatttttggtttgatggattcgtataggaaatcttaattcctttggaataaacactattcatgcattcggttcataggattccgatcaaaaatttcatatgtaaatcctatgccagtcctccaaaatggattgattccatgggaatgaaaacatccacttcatcctcttttgttaagctcattgaagcaaaaaatcatgtgttctaatcatttgttttgcacatacattcctacgctattcttgcaattttcatttttcttattcctgtaatttaaaactcctgtgaaccgaagaggctcttaatatttattaaacaaactaaaatacccatattaggacaacaccaattatgtttacgaaccagtaaacaatattggacccaagaaaagtagctaggcatatgtttttaaaagtttcacaatgtcttattagcaataaggtgagacccataataatataaagtttagcagcagccaataacacgaagggagacgggtgaggaccaatgcatagcaaataccaggttgtaatattattgtttaataaaagctatttactgatttcgcaatgcttattagtggataagtacacggtagaaggattaaattattgcccatagggggttttgggagcccatgtcctgtcacaagcaacttgaccaaactgtccggagattcgttttcgtgtggttcctggcttgtttaattttacattggtacatcttgagctgcccatattttctcaagtatctttggactggagcatatatataaacatactcgagcgtaaagatcttcgtggtcagaacatggatgagacgactcactttctgtcactggcaagcagctggtctcccctctgttatacttcatccgtccaaaaaataaaaatgtataatgtttaaagtttatctttaaaagagttgatttctaacttcttacctatcattaattagtccacagatccataagtattaaatgaaataagtattattcttttaatactctttatctatcctcctaacaataattttttttgatgagctatactttagtcttttttctcactcgctgctaaattctcttcaattggctctaaattaaagtgtttttggattgagggagtattacggagggacactctagttatggtagaacagtaaataaaatgcgatagctagatagcgctcccttgttaaaaagtatataagatatattttattttgttaagacataattaataaaatataattcttatgacagaattgattttattaggtttgtatttaaaatagtttattattataatttttatgacctagataaatggtaaagtagtaagacaactgcttctttcgtcataaaatataattatttttaggttgacacatatattaaagaagtagatgaaaattattagagaaatattgtgattggttgagaaaagaaaaggtagatgaagaaattaaatgaagaatggttatgattatgtgaaagaatagattgattttaaaataagtcaatacgctataaataactactccctccgtcccataaaaaaccaatctagtactggatgtgacacatcctagtataatgaatctggacacatccaattctagattcattttttttttacggagggagtatatttcgagactggagcagtattaatcaaagtcctgttcttgtttatgccattctggattggagggagtagcactatgggtgtgtttagttcacgccaaaattggaagtttgattgaaattgtaacaatgtgacgaaaaagttgaaagtttatgtgtgtaggaaagttttgatgtgattaaaaagttagaagtttgaagaaaaggttaggaactaaaccagacctttgtatccacgcgctcgacttttgagacaaatttgcactgagctcttttgctgtatcaataaatatgaaccatccatcacacatccaacgacccagagcattcgaaatgccatgcaccggtgctctctgccatagcagcaggcttacggcagaggatcccgatccaccagaccaatagttggggttccccttaccatttttccttttttgcgcggttaccgcaccccgcggtaaaggcggttaccgtgagacataccgtagtttcaaaaactaaaaagataaccgtgcgtggtaaccatggtaaccgcgtggtaactgcgcggtttggtaaaccctcgttgggacttgggaatcgagtaccgactactgagacatgcctttgtcaaaactagagaaaaaaaagacacggatgcacatcttatcatatgaataataatcaatgaaaacatgcacaatgtatagtggttggttgagctgaagctgattaaattttaggatttgattctaattaaatttagagggtattttttgttactttcttgcccctctgcattactcctaaggagcaaggacactacttaaaaaaagggttttttccctagcggttcaaaaacagttaggattaaaacaaaaccgtcaggactactttaccgtcacggccaccgtcaggaaagcgccgattggaacagcatgttaggaatgtggctttctccagagacaagtaaaatatctacataaaatatttttgaaaattagatttagaaacttcaaagtcagcatgtaacaaattatgttgttacatttcggatcttgcaaatgggctagcgaggaggagtagtttcactttcacccattagcatttaaacgtgtgctcgattagtgagctactccaatatagtggaaatatatatggtacttatattgaaaaaaatagaaaactaatgtaattttttagatgagaaaactaacgtaaattgtatatatatgtgagaacggcatgtagggctcaataggtctaccgtctaccggtcaatattaatgacacatacgtacagttaatgatatttttaaaattttatgatttttcaatggtccttatttttttttatttttatcaagaaacagtacctctaaaaatttaatgtacagaaagatgaaagaattagaatacgaatatatatcacatgatcaatatccatcacttcactttggccagtgagccagccagcgccctcattgccggacgtccatgcgaacagtatactttgaacgctattcttgcttgccagcagaggccagaaaaacgatatgctaacataaaggcttgagctggattttgcttagctcctcattctttcgtgtaccactctacaaaataagaataaaatcctagagatactcttatgtttgtgtaccactacaaatcaatggatttggatgataggaaagatcaagggatatgaccctcatagttttttctttcatgcgtaccagtaaataaactaagcggttttagatgatatgacattgtgatttaaagattttgaattttaaaaattagtagatgaactaaaaaaaatcttgagtggaggatttagaaaacaaactaaagggggacgtgggggaggtgctagttaattgtatgtatgcatacgtgtcttatataatgaaatatcggaaaaaagtggttgcatcttatatttgggatggagaagtatcacttattcttcatggcatgtacaagctatattatttttgaactatataaataatagttttattatatggtaaagaacttaagatcagttttgtaatatgctgcacaaaatagttttataatatggttaaagatcagtttttgtgattggaatctttactttggaatgtgcataatttatttacttttggtatacacaaatgggcaactgaaaaacatttctgaattgttttaggtaaataaactattttggacaattcaaatgcaatcgcatccgtgggttatgtatctgaattttaaaaaatattataaatttctgcaagaaacactagttacaaattgggcaaattacataatttggtccattgtgaaataaaatttaattttatcttaaaatatgattttattaagatttaagcacgtatatgtgcgacttgtgtgagccattttatagttatcaatttgttggtagtgccgaattatagactacttttttttactaccaatgtattttttttcacggtagagttgtatctattgtatttatttggtaaagtattgggggttttttttttttttttttttttttttttgcaaagcgaagtgaacactgttgaagaaatgaagttgtcagacaaggcaagtttcggcgtctctaccagtatcttaaaagcacggtcatgctcctttcctcctctccccaatcctacgtataaaaaatccactcaaaaaacctgtataaaaaaaaactaaccaatcgagagaaaaatatgcgataagagagaaaaaataaatcacgtttatgagatcttgtcccattgtaatgcataggcctatgactagtttttagatatggaattgctaaaaattgttgcaagtttttttttggaaaaaaatttcaaatgtaactatgatataattatagtgtaactaaaatgtaattacactacagttatattatattgtaagtgcattgtaatctctatataagttagatataagttgtaaatattattttaatacttatatacaagttatattataattataggggaattatattataattatactctctccgtccctaaatataagtgattttggttggatgtgacttgtaaccaaaatcccttagatagagggagtactatagtttgatttaaaagttttccctcaaaaaaaacttgcaacagttttttgagatagtccccaaatagcattactactgcttgtttagttgaaaaataaaattagaaatcccttgcgagccttagcctaagcatcaattaatggagatgcctgtagaggtagagttccattttgtactacttaggaacattaaccacaaatcgagcaagttgatcagtaaataatcgatgagcatgttggatgctttttatcttgaaagggttatgttgcatgcttttgtaaagtgccccttgtaagcatgtaaaatcctccatctaggataatagcgtgcgtatggccccatccaataaacgtgagccatctctttatttgttcctgccaagtgaagtggagctcccaaacaaaaggcagattggatggacggtgttcatttctgaaagtcgagatcagaatctgatggagccggttctttgatttctggcatctctggtcatgaggccctgcatgaaagtgggagcaatcagataaataaattaaagctaaatttgatactcccttctttcaaaagtgttagatatattacttttgtcatcaagactaaaaagaatttaactaatcctacgtgaaatacaatcaataaatattaagatgaatacttaggtttcggtcaatcatttaatttatctctttatttaaatcttgatgtacggaagttacaaacatgagtatatgaccaccttatttttttaaaaaaaaacagaaagtaaaataagtctaatagttgaatgggattggtgcagccaacaaatgcattaaataatcaaatcacggataatctgagtgaatctgaactttatacggggtaaaattgattttgtaggaatctgtgcatagaagaatctgtgccagtctggttagaacttagagcagatgcaatagcaggctataagccaactataaatatattttaaagagataaaagaagagagagaagagcagcgggctatagatctataaccagctgcagcacgaactccaagacgtaatgtgtgtatgacaggtgggaccagatattaatagtatagtaagcaactattatatgaattggttattatattgactatagatgatttggagctagcaatgtactatactattaaccttgctcttagaaccaatgagtaccaccatggctgcagaacggtcgagcgaaacggaattttttttatttttaattttttttattaaaagttttacaaaaataattttctattttgaaaattgacggaagtagtcgcctaccgccctctgggagggcgatttttaaaaatcgccctcccagagggcggcgaaaatgacgtggcagacggccgttcgctctcgggcgacggccgtcaacgaaatttgcaggcgggccccttgccgccctccgcgagggcgattttgtactgtgcggggggccgcctacaaatgggcggcgaggggggcatggaattttg

SEQ ID NO: 9442 - DNA, 7771 bp, Oryza sativa
  unsure (1)..(7771): unsure at all n locations
ctggtattaaaaacttgatcagtctatgctaggtcttaggcttgtgaaaagaattacaaaacttgctttgcgcgaaagaaccatagccatcctttgaattcctctgtcatgtgcatcattgctgtgatggcttgctgagtacggttggtactcacccttgcaaatataaaattaatcagaagcgggagatgaagcctcggaggatccctatgcctactaccaggagggagatgaagacgatggcgctcagtaggtcttagtacggtcgttgcctgtggcaatggcatgccgctgcctgaattccgctgccttatctatttctgcttttggatgtattccggaccgctcggtccaatgatttaagactatgcctgcgggcttatgatgtaataattcgtattagatactcgtgtatttgcacttggtatttcagctatgaattcgtgtgtaccagactacttgatacagggaaatggtactgtttacacgattgattcctgttataaaaacgggggtccacagagctggtatcagagccatacgactgtaggaaaagaccaaaaggcgccccaccccttttctaagttggccaagggagaaattcccatttagtaatactttcaaaaataaaaacgctatgtttacaaaaactcggtacaattttcatcttactcttaactattttctttacaaaacaagttttactctcaactgactttgggtttttcttaaaattagatggcagatccggattcacccgctacttgggtgttgagcctacctcaatcagaggggtatgtcattgagctgcatcggatgttgaggcgtctgcgatactctgggttcccgtcataccgagtgagacagtgtggctcagtttgggaggctcgggtcgaggttcacccccgagtcccttccgagttggactacagctttcagacacgtcaccaccgagacctgccagagaccgcgatgcaggatgcagcccaggaggccttactccgactcagctctatccaccgagctgagttagcgagtaccgagtttgctcatcacccgttccgggaggagagcaactcagtttgcacagttcaggacacgccctgctgctacaacccgatggtgactcggttgtcacgatgggctgaggcagtagatgactactacgaggaggctctgttggagattgacgaccaccagagacgtgtgggggagttagagactgaggtgaccgacctcacagcgcagcagctgcagttggaggaggagcaccaggcttggggcagtgagatagactcactgaaggcacagctccaggtccacggcgaccagttccagcagttatctgaccagtacaacgatcgccgcgggatgatggatactcttgaggggcagctgagagagagtcaggagcacgtcagccagctggaggagcagcttcgagcagccaagatcagcaccacaggggcttctacttccacagcagtaggccgtgaccgctacttcttcctcaccccgccgtacccaccagcattccacgctcttctgggagaggctagtatgctagctaccgagtcagcaccctacctagtggactcgacagcggcacaaccacctgtcctggagttggtgcacactccactgatccctacaccttctccgcagctgggttccagtttggagactccgatccaggtcgactccgagacagaggggaccgacaccgagccagagatcgagccagacatcactgatccttcagaagatgagacccctgttccccgcatcaccttccttggaggtcctcgcaccctcagcactgctcgcaagagcacacgacctccgggcaagaggcccaagccagatccagaggccactacctctgagccgtggggactcaggtttgcgcgtgccagcgaccaccctctacctgccccaggatcctgcggatggctggaggactagactgacggactccttgcagcttcgatctcgtatcagatggtttttggatagtatgcgagacacccccctcccttacctagattgacgagtagattgatgattagtttgatgtatcttttggatgaaccttatttggactgcgtatgtatgcggtcgattgcatcatgatttatgtaccatttgtgaaactctgttatgttatttatgatatctattgttgttgtgttataaatgagtttattccaccatgcttgcaaaacaaagttcatatcaacacaactcccttaatgggataaagccataggagctagttagaaaattaggatatttactccatcaacctacacagatggcaagccgacgtcgggcaacaaccagcaatgacgaaactcagacacccgacttaaccactcttgctggagttatggccacccaaactcaacttctgcaagctatcgcgaacaaccaaggcaaccgcggaaggtcaagctttggagagtttatgaggaccaagccacccacattcgccacagctgaagaacctatggatgctgaagattggttaaggatcattgagaagaagctaactcttgttcgagtacgtgaggccgataaagtgatctttgcggcaaaccaattggaaggaccagccggagattggtgggacacgtacaaagaagcccgagaagaagatgctgtagaaccaaactgggaggaatttaccacagccttccgtgacaacttcgtgcctgccgcagtgatgcggatgaagaacaatgagttcaggagactacagcaagggaataccacagtacaagagtacctgaaccgtttcactcagctggcgcgctacgcgactagagatcttgccgacgaggaggaaaagatcgacaaattcattgaaggcttgaatgacgagttacgcgggcccatgattggacaagaccacgatagtttccagagtttaatcaataaggtcgttaggttggagaacgaccggaaggtcgtggagcacaatcgtaaaaggaggcttgccatgaaccgctcgcctcagaccgcaccccagcgtcctaaagggacaacctcctcggcatggagaccaacagtggtgacaaccagtcgacctgccgcctccagcaatttccacaggccggttaccattcagaaccgcgctcctgcaccgaatcaggccgccactggatcagtaaggcctggaagctgtttcaactgtggagagtatgggcatttcgccaataaatgtcctcatccaaacaagacacccatttgcaccggagctaatgcaacggctattcacgggactgctacccctgccgttggacgaggtctattcaggactccgcagactaacaggaccgctaccggatttggacgcgggcaagtgaaccacgttcgagctgaagaggcccaggaagaccaaggcgtactgatgggtatgttttcactcaactccactccagttaaagttctcttcgattcaggagcatcgcattcatttatatctttgaaagcaagtcaacaacacaatttaaccagagttaaactaagacaaccaatgttagtacattcacctgggggtgagatagcagtggatacagcttgcattgacgtacccatccgccttagggatgtggtatttccctccaatcttatggtgctaataccccaaactcttgatgtcattctgggtatggattggttagcaaagcatagaggaataattgactgtagacgtagagaagttaccctgaccacaccctggggatcggatatgagagcaaccatggattaagatcctaggctaaccgaacgtgccggaggtatatttaccatgctacccctaaagggaatgcccgtagtgcagcgatttcctgatgtgttcccagaagatttacctggaatgccaccagatcgtgacatagagttcattattgacctgatacccggaactgcccccatatccaagagaccatatcggatgccggtcaatgagttagaagaacttaaaaagcaaattagggagttgcaagaaaagggatttgtacgccccagttcgtcaccttggggagccccagtgctattcgtcaagaagaaagatggtagcatgagaatgtgtgtggactaccgctcactgaacgaagtaactatcaaaaacaagtatccactaccacggattgatgatctcttcgatcaacttaagggagctaaggtgttttcaaagattgaccttcggtcaggataccaccaattgaaaattagaaccggggacatacccaaaaccgcgttctcaacacgctatgggttatatgagttcaccgtaatgtcgtttggtttaaccaacgctccggcatactttatgaatcttatgaacaaagtgttcatggactacttggacaaatttgtggtggtattcatcgatgatattttaatctactccaaagatgaggaagaacatgcggaacacttgcgattggtactcgagaaacttcggaagcataagttatatgcaaaattcagcaagtgtgagttctggttaaaagaagtcgcttttctaggccacgtaatctcggccggtggagtagcagtggatcctgctaaagtggaggctgtcacggaatggaaagcacccaaatctgtgactgaaattcggagttttctaggcttggctagatactaccgaaggttcattgaagggttctctaagatagcccgaccaatgacacaactactcaagaaggaaaagaagtttgtgtggtcagagcagtgtcaggaaagctttgagcagctcaaagaaaagctgacctcggcgcctattttagttcttcccgacatcaggaaagactttgttatatattgtgatgcttcaaggcaaggactaggaggagtactgatgcaggacggaaaagttgtggcctatgcgtcgcgacaattgcgaccacatgaggaaaactaccctacccatgacctagaactcgcagctgtggttcatgcgctaaagatttggagacattatctgattggaaaccattgcgatatctacactgaccacaagagtctgaagtatatcttcacccagtcagatctcaacttgaggcaaaggcgatggttagaattaatcaaggactatgatctagaggttcactatcacccaggcaaagcaaacgttgtggccgacgctctgagtcgtaagagccattgcaattatctgagaatggaagggatggtccctgagcttagggaggaaatagctcagctgaacctacctcgtgggcagataaacaccctggacattcaatctcttttgagaacccaaatagaagaagcccagaaggacaacgaggaaatccgagaggtgaaggaacgcttagctgcaggacgtgcaaaggaattttcaaccgacgaaaaagatgtcctatggtataaaaagaggatttacgtacccgaacagggtggactgaggggattaattttaaaggaagctcacgaatcggcatattcattgcaccccggaagtacgaagatgtaccaagatctgaaggaaggatactggtggcccaacatgaagagagatgtggcggaatacgtagcactctgtgatgtgtgccaaaaggtgaaggctgagcatcagcgaccggcaggcttgctgcaaccccttaggattcccgaatggaaatgggatgaggtaggtatggattttattgttggattgcccaagaccgcaacaggatatgattccatttnnnnnnnnnnnnnnnnnnnnnnnnngacggcaagattcatccccgtcaggacaaactatagtagtgctaaactcgccgagttgtacatgaccagaatagtgtgtcttcatggtatacctaagaggattttatccgatcgaggcacacagtttacctcgcatttctgggaaaaagtacatgaagccctaggaagttacctcgcatttagcacagcttatcatccgcagacagatggccagacggagagaaccaaccaggtcctagaagacatgctgagggcttgtgctctggattttagcaaggactgggagagatgtttgccctacgccgaattctcctacaacaacagctttcaagcaagcctaaaaatgtcacccaatgaggcattgtttggtcgacgatgtcgtaccccgctaatgtggtccgagactggagaacaggcggtatttgggcctgacattattcaagaagccgaagaaaaggttcgcttgatccgtgaccgtctaaaagtagcacaatcacgccaaaagagttatgccgacacccgaagaagaaacctggaatttaaggagggagattacgtttatctaaaggtttccccgatgaggggaacaaaaaggtttaaggtcaaaggaaaactggcaccaagatatgtggggccattccagatcatcgccaggcgaggagaagttgcatatcagttacagttaccagagaatatcgcggatgtgcacccagtcttccatgtgtctcagctgaagaaatgtttacgagtgccggaagagcaagccccgctggaagagattcacattagcaatgatctcacatatccagaacacccgatccggatattggatgaagccgaaaagaggactaggagcaaagtgtggcgtatgtacaaggtacaatggagcaatcacactgaggatgaagccacatgggaaagcgaagaattcttgaggacggagtacccacatctattcgaaaactggtaagaaatctcgggacgagatttatttaaggggggtaggtttgtaacactctgaaaattcgaccgacaaaatcaaaactctaaaaatacggattttcaaaaactttttaaattaattgcatcatgccgatcttattcgtctattttatctggatttgatctcgaagattattaatcgtgagtaaagaatagttaattaggaataaaccgtaaaaacaaaattggtaaaatacatacaaattaaaataaagattaggtggggatagaaataaataaaatattatcgcgaccatatttggatcaattaaatttaaatacgatggaataagaattaaccctaattaaaactcaaacaaattatataaaaataaaatatgagtaatattaatctagggtgaattcattagttaagataacacaaatattgagtaaaatgcatatatgcaaaattaggaattgtggaatcaaatttatatggaaaatacactaaaatcgggttaattagaaaatggcactgtttattgcacctaaggtgttcggcgcggtcccctaacccagctcctcctctttccccctctctctcgtcgccagccgccgcgcgccgtcgccctcgtcgcctggcgccgcgccaccgtcgccatcgccatctcatcgccgcggccgcgccgtcgccgtcgcgtcccgccccgcgccgcacgtgcatcccatcgccacctcgcgccgcgcgccaccactgccgcgccgtcgccgtcgccgtcgccatcccgtcgccgcgtgcgcgttccatcgccgcctcgagccgtgctgctgccgctgccacgccgcgagcccgcgccgcgccatcccatcgttgcggtcacaccgtgccgtcatgtcgccgcccatcgcatcccgccccgagccgcgcgccaccgctgtcgccgtcgccatcgacgtcccgtcgccgcgcgcatcccatcgccgctgccgcgccgcgcgctgtctcgtcgcctcgcgccgagagcccgcgcctcgcgccccgtgctgcgccgctgccgcctgccgcgccgcacgccgt

SEQ ID NO: 9443 - DNA, 18634 bp, Oryza sativa
ctcaatatttgcaaagatgtgtatataatgtataatagaagtttatggaaaacatactcatcaaagaatcttgcaccaagtttatagctgaccttggagaagttccataaaattttgtatacctcctgccagcagggaatgaaatagaattttatttaactagtggaccttgtaaaaaaacagatattttcgatatagaaatataaatgcacatcatttggaccagcttagaagaccaaaaaaaaaaaaaagataacatatggaatattctgtaaaattaaataaattcagggagcaattcaagaagaatgccgtgtggcttggtgggtgatgcgcagatctcctgcatgttcaagataaaatgcatatagatatacaaaatagttaaggccatgcaatagtatacatggagggttgtgcaatatgagttcaatgttttatatgcattcattaataaatcaaacactgttacttatattcgtagccatccttgtttgaattaacatgattatcaccataaataagaaattaagattgcataagttacctgtagtatgcatttcccttcttaaatttgaccttaggggatgaccaagccagggaaaatacgactgtacatcttccatgtggttcaacccaggtggatgcacaaactgctgcacaaactgtatcacccagcgaagaaggcatgctagggccggcactgaaattatctcggtcgaagcaaccatcctttaaacatttagatggtatgatagacagtctcagtcattgtttcattgatatgacagtgtcagtcgtcaataagagaaactagtgtaacaaaagatttgccctattcagagtagaaatgtgaaataaaatatatcaaggggataatcacctggctcaatgtgccccacatttccctagctgtaacagaactttctccagaaagcccaaaagcaggcaacacagtgacatttacattttggttctcacatgctgcaacagcaaaagttacaggaggattattgttggcagtcctgcaatggtaggaatacctaatcaggaatagaaatgatattgctcatcttattagatcgcatacaaaaacatagtgcatatctacacataatttcttgcttccagtacaaacatagcacagacattatggtattgtttcaaattgtatcagagtgaaccagtagaggaatagtattgcaaacaatgacaaactactagctcttaatctctgtggcacttatcagtgccaaaggagatctgacaaacaaccatagcaagaagagtgatcagcagacaatgacttgcttgtgatgcagaagcacgccagaaactccattttctcctctgcatgttaacagcacattaataatttcactttattgcagacaagatattgattaagttttaatgctttagttaagttctacaaagtactaacataaatggctcatttacatgaccgccggaatgatgggaaagccctccaatagaattctggggtagattcaagaatggaatgtaattagatgcaactaacagaaaacccaaattaaatttgcacattaaagtaaaaaagtagttactaccgcccaggtcattacgaggctgacttttgccctttctttaccagtgttcactatctgcaatttcatatgaataaaaaaataatatcaatgaaggaactggcgatagtggcattttgtttgtcagtagtctgcacgtgatttgtgtgtatctttgtaatttaattatatcactcacaattgtgggttatgataattctctatggtttattgagcaaatgaaaaatgtcaatgcaactatccattttagttttctgggtttagaacttgcgatacatgaatgtagctttgtttattctgaccagttgcaatgtatgtgctctaaactagtgcgagcaaaatattaaatacttaatcagctaaacagaataaagtgtcaaacatactagcaatgaacactaaaaaagcaactttcaggtttaacatactcagtatcctgttcttgaaagcacattcctataagcaatgaatacttacagtgtaaacaaaaacagaggtaggaagactgctctcttgatagttatggggaataaaaggagatatttgccggcaagatactttcaattcaggatcaggttcacctttaaacaaaccgaagaagttgtcagtaatatcctcatgcttgcgatattatggacaatgtgcctaattttttttttacggaaatgtgcctaattattatacagaaaagcagttagcttgttaaaaaaggctccactgctatgtacacttatccatgggtaattagtacttaatagcacttgaagtcataaagctaactaaagcaatgtttgtaattatcaagttcatcttataacgtagggttatttctataacaaggaatgagtaggtaccatcatagacagtccatgctcgaggaaacaacgcatggtatgtagaacgatcacctcttagtttccaatcccaggatgatataccatcatcattagatttcctggaccaagaaacataaaaataaccggacaattgtttcatatggactatgattgctatatattttacataaaagcatagatgagaatatttcaggtagatccatttagacaacgtccagatgaagtttcatactaaatatactatattgaggatcagggagagagtcatactttaaactatcatgctgaccaggagctaaaacagaggagtattttttgtttcctcctcgagttataaagatctgcagtaattaaagatatggtgaaaaaattgtgaatgttctcttcagttaatctttgtatttcacagcaacatcatgtttgatacactatcaagagaatatcagaatagtcaatactgaatgattgaatataattccagtgatatgttaagtggcttacaacataagggagctgctgaatatgataaataagtatttgatgaatggcaacacataacgcaacatccaaagttctgaagaactgctacctagctctcaattgaaaatattttttttattaattataatataagtgtgtattttaattcaaaaatggtgggtgcctctctaatatgtcatgaaatgtttgttcagttgttcctaattgattttcatagaacaaactcaccatttacttgacaggtaacattaaatgtgtgcataaaacgtaaaagaagtaaaatgctgatagtgtatcataacaaaaatatttaatagttcaatcaaacaataaagtgtcctgatacggatttccctcgtttcatattgaacacattgctttaagattcgttaagttttctaaagtagtacactgaagcatagccatcaaactagaagtatgctgccaagaatatgtcaagttcagcggagtgaaattgtctcacgagttaccgaaaattggtttgccatgactggtgacatttcacatgaacctgggattatctgccaatgtttaaattctcctctgaaccctcttgaaatgctaccgctcctgctcaaatggtccaaattaaatgatcttgacaatagaaaaaatcgaaggattgacagcaaagcaatcatcacttagtacacaccccatcccaccaagaggtacaccttgcgaggctgaaggtttgtcgctctccctcgtgaatggatcaattggtgctttctgacaattattaagtttcaagttagaagtgccataaaaaagaagtacaaagtaaaggcgcaggatttaacttatacagtatagttggtggtatgacacagaatcaacatattacccttccatgagaagcttcttcccgaatatatgaccagaggcgcagaccaagtttcatctaatagccacgaggagacacaactcaatcatgttgacatacataaccagataatcttaagatttcagcagaatgaagagcaatcacagccagaatttccatgaactgggaatgctgataattgcatttcctgtaccatcttaattgcttctctaaaggtaacattgaactccttcaatctattggcatgactacttagttttcttctccaagcatattctggtggtgagccatcatcaaagtccagctgcagtattccaaaaggaaatcacaaaatgaagtcagtcatgaaagaagccaaacaaaacaatatgatcttacaaatccatgtcatattgtgttattcttggcatacattttaccagaactagtcagttttccactgtaaaagagtaaagatataactgatgaatagagtgcaactttgggtactacaatcgtcagccaaataagcacttcacatgcatcgaaaattgaaaatgaaaagggacagagaccctatatcataatcagcaaggtaacagacttgacacagcaataaaacaggtaaactaactatacaatttacacttgttagcgaaacctctctaagttagagaatgcagtaacaagtaacaacataatatcacaatcttgttactttcacaatatgaactaaacaatctttatagccgattttcatattacaaggaaagaaaaacatcactgctaatgagagcatttgagggggaaaaaaaggaaggggtaaagccctcaccaattgcagggtgctcctgctcacgagatcaccggcacgccatgagcgcttcctccggtagaacatgttgctgctcaccattgctctcccgtcgccaaaagcccaagattatcgcagagaaggaaagaaaaaaacaatttttcacaaaatctcaaactgccccagttggataaagtcctgagagaaccgaacagtcctgaaataacggaagtcgcaggaatgaaacccacaaatacacgacatggggacgaattttgaacgggacgcaaccaagaattcgagcagattaaagcgatagtagctgaacttctaccaaagtaccagccaaaaaaagaacctttaaaatcgctcacaaatgtacccagcagaagaaaatccaggaaaattcaaatcaaattatggacctgagctcgaatcaaattaggcaagaacaagttactccctctcttcataaaaattaaattagggaaaggagcggattcagggaatctcctactggaagaaatcgggaagaacccacgagctgtacccacgggaatggacggttggttcgaggggaagctacgagaaagctcgaatctattttcccctcgcggcgaggaagaagggggaacaagtaagaaatctttgacggctttattaatcctgccgtcgctttcgctgttcctcatcttctcatcttctctcctcatggcgcggctttattagcagttaagctagtgagcgaggcgtataattaaatgcaagtaattaattaactgcaggattagtgaggcaggcagcagtgccgccacatcagccgggcaggtgtcccggcgaccaaatcaacaaagcgaaagccatcatattttgctgagctccccggagggtgtgcactgtgcaggcatttggaggtggctgggcaagttaaaaggggagttttttttcacctcgccggcggcgacgtggcggtgagaggcgccaccggtatctcgcgcgaggatgtcaggatggtaaggtagcagcagcagcatcaccctgcgtggtctaacggcagattattttatcgcggaagaaagataaattctgtgagtaaacttgcagcccatttggttagacggagtttttggtagggattgggagtttagagggatgaggctattgagtgttttgtttggttaggagacataggaattttggtgggatggggatgggaattgagaaaggaactccctccttttcaatgggcctgttcggctgccattcttgctgcagcgctgagcgcttggttgcgcggctgcagcggtgcttcttgtgttagtgatatgccctagaggcaattatagagatgattgtatcacacactatgtttacatatttatccgactttgttcattgaaatagataaactcattattggttaatgaatatgtgattctttcacgagactctttatgttgtgtgttgctatttctaaaggatccctgatcaaatattatatgtggaacaaatatatttagatgatcagcacatgtattaatcgatgatcatgtctcatggatcatggtatagagataccaaattaataatgtggacatatgttgatgaacatgttgttggatagaccgaacatgagacactgcaagagccatatgtgttgtgtcatcagtgatctcatttagtgttggtgttgaatccttagacctgagattatcatagttcccaacatatgtagtagcttacttagggactgctaaacgctactccgtaattgggtagttataaaagtagttttcgggtatgctatgacacatgtagtgggatatgaataatcaagatgggattttgcccctcctatgaagagatatctctgggcccctcgatgttgtagattaaggaagtgcattgtcacgtcctgaagtttccccctttttcttgctttaaaaaaattggttaaataaattgcccgaagaaattgtttttttaacctagagctaatcctcaattaataaatgcatttaataatcaaattcggcgtggtggattttttcttgagttccccatgcttcaatacattaacaatatttttagtggaattttcagagccttggaaataattttaaccaattaaaaatgagcaagtgcaatattttaaatcccatgaaaatctatttccttttttccctcctttttctttgttgggccgtcggcccatctctctcccgcgcccctccctcttgctgggccggcccaacacccccctctctctgggacgccgacaggtgggccccacctgtcaggatgtccctaacctccggccagccgcgcccaagccggcaaccgccgctgccgccccacctcctccgctcctcccacgcccacgccgcgccgctcccgcgtcctccccacatcgccgccctctcccccgcgtctcccgccccgcccgcgcgcacgaaatgggccggattcattttgaatcccaccccactctctgtctctccacccccacgtcgccgacgaaatcgggggctatcccggccacgtccgcccctcccgtgcctataaaatccctcccccgagtcccctctccctttttccgcgctcgccgctagcgcccgtgccgctcgccgctagcgccgccgcctaccgccgcctccggcagcacgccgtcgccgcgccaagccaccgccgccgccgccgctagcttcaccgtcgcgtgggtcatctcggccaccgcctcgcgtcgccagaaccccaccggaaccccatttccctcgcaagctggtgagctatccattcctctccgcccccagccgtcaatggtggccgccgtggtcgtcctctccacccctaatccctctcctcctttcctataggtgtcgccgccgcccgcccacccctcctcgtcgccgggtcaccgccgcctttcattctccgctccggtcgccgtgctcgccggtgaggctcccctctcctccctttttctctcctctcccgcgtgcgccgccgctacatcgctatggccggccggccggttttgtgccgagccgagccgtgcctagccgccaccttcgccgtccgatcggcctcgggccgatctagaccgtcggtcccgtgggccggcgatggaccactcgtgtggtcccggtccacggtagaccggccgcctcgtgccgctgacatgcggggcccgcttgccggcgccgccacctcccttgatgacgtcggccctggtgatattgcgaaataaatcgaataaggacttttctttattagtaaaaacacagattatcttctaaaattcataagtaattcattcgagctccgtttaagtccattcaagtctcagtaaattcataaaaatccctagaatccattaaaaatggttttgcttcctgtttcagtagtcttatagcatgttttgcttatgtgctttgtttgtcgcgtagatttcagccgttttgtcgatccgcggtttctcgaagacgttgttgaggtctcatcagtgcgagagcaaggcaagtgtggacccccgtttttataacaggaatcaatcgtgtaaacagtaccatttacctggatcaagtagtctggtacacacgaattcatagctgaaataccaagtgcacatacacgagtatctaatacgaattattacatcataagcccgcagacatagtcttaaatcatcggaccgagcggtccggaatacatccaaaagcagaaatagataaggcagcggaattcaggcagcggcatgccattgccacaggcaacgaccgtactaagacctactgagcgccatcgtcttcatctccctcctggtagtaggcatagggatcctccgaggcttcatctcccgcttctgattaattttatatttgcaagggtgagtaccaaccgtactcagcaagccatcacagcaatgatgcacatgacagaggaattcaaaggatggctatggttctttcgcgcaaagcaagttttgtaattcttttcacaagcctaagacctagcatagactgatcaagtttttaataccagtgttcatattaaacaatgacggttctgtccaccatccattgtgatcccagggatagcttcccgtcattgagtcgttatggttttctgaggacgtccacattcccgcctctcaggaagtggctccatcagcataaaaatcatcatgcaatatctcatcccacacaagttaaagaatttagagtctagccaagtgtaatacatgtcccggtgctcaataactgcgagcacggctattcgaatagatttggtttactcacactgcagtggatgtacactttacccgcactccgcgactgcccaacacatgagcctcgtcgcaacacatgagacgcgtcacggcaaagcttttcgataacctcgcattggcagtacccgctccatgaacttaaatcctcatgcactctagacgtccatgtttctagcagtgagaggagttctggcgctcccgggaaagagaggtctcacacacattaaattatggttcaagttaagttctctctctcacacactcatggcagtcctaccaatggcgacaccgatgtagggcacgcttctcggccctacctcaacggctgtcccatcgtagcgcaactgcctcactcaggggtgaaccatctatgcagggatactgcctccgctcggctatctaatccgctaggtctatacccatacgagaagtgcggttgtacgggggtcgtttcatgcttaacttcatggctcggtccttaattgaccggggacggtactagccttttccagataccacccaaatcctccgtccgccccagtcgaaaacagttgtttaattttatttcttctttcacaaatcatgtcatcaacatcatggcaatgtggcgctcatgtctccacatgccgcatctcaattaccttcccaaaggtaattgcccaagcatatagcatttgataaatatgagtatgcatgattctagaatagcatttctaagcaattgtcatagttgactagggactcatacgtaaacatggttacaaagatttaagggtaaacaataatcaaggcatggcataatcacaagtaggatgttcatcattgcatgcaattttatttgtaaacaaaataatttcgcaattgggatcaacatgttcaaggaatagtgatgacttgccttgctcaaagtcttgcgggtcttggccttcgcttggatccgcaactccctcgggctctatagttacgtgcaaaaattgatttgaattcggttagaattcaaataaaaatccaaataaatccaaatgaaagtcgaatgcgaaagtcgattcctttttattaattttactatctgcgaactacggcaaacccaatttcaatttaaactattttgcgggtataattatttcgttgtcataagtttttaatttactctccccgagcattgtatataataggttagaaatttctattacgagctaaatatcggacgaaatcctagaaatattatacaatttaatttagcctatggctaaacgattaaatataatacacggctaagattcctagtaattaaatccgaatttcaaccgtgaaccgatgacttatagagattaccaaaaataatctataataatctataagaattcatctaattgtttagctactaattatatctaaattacttacaattttactctaatctgctcaagatacacatttttataattaactcggaatttcgaccgaaatactattacgctcgaggaatttccaaaaataacctatgatcaaccccgaccatttttatttcctaaatcctcctaatttctcccccaatttcccttctattttctccttttcttcttttctatattccctctttttctctcctctttttttttctttttctctcttttctctccctctctttctttttctctcctttttctctcctttttctcttctctgccggcctctcttttctttttctttttcttttttttccttctctccctctctttctttttctttttttttcttctttctctccctctcggtttctctcctccttccttctcctttccctccctcggtttctctctctctcggctctttgcttccccgggcggcgacggcggtgggcgcgaggtgaaggggggagacggcttaccggcgacggcggtggcggcgacgacggcgacggcggcgcaaggtggcgacgcacggcgcggcggccccggggcgacggcgcggcggcttcgaaggtggcggtgcggcggcacgacaacggcggcgcggcggcgcgacgacggcggcgtgtggagaaggggaagagggagaagaggagggaatggagtggggtggagaagggggattgggccggggtctttataggggagaggggaagaaataaggggaagaggggagaggggagacgcgacggcggcgcggggcgcgaggtgcatggcgacgcgacagcgacggcgacgcgcgtgcgatggcgacggcgcgcggcgatgcgacggcgatggcaacgacgcgcggcgcggcaggcggcagcggcgcggcacggggcgcgaggcgcgggctcgcggcgcgaggcgacgagacagcgcgcggcgcggcagcggcgatgggatgcgcgcggcgatgggacgtcgatggcgacggcgacagcggtggcgcgcggctcggggcgggatgcgatgggcggcgacacgacggcacggtgtgacctcaacgatgggacggcgcggcgcgggctcgcggcgtggcagcggcagcggcacggctcgaggcggcgatggaacgcgcacgcggcgacgggatggcgatggcgacggcgacggcgcggcagtggtggcacgcggcgcgaggcggtgatgggatgcacgtgcggcgcggggcgggacgcgacggcgacggcgcggccgcggcgatgagatggcgatggcgacggtggcgcggcgccaggcgacgagggcgacggcgcgcggcggctggcgacgagagagaggggaaagaggaggagctgggttaggggaccgcgtcgaacaccttaggtgcaatgaacagtgccgttttctaattaacccgattttagtgtattttccatataaatttgattccacaattcctaattttgcatatatgcattttactcaatatttgtgttatcttaactaatgaattcacccctagattaatattactcatattttatttttatataatttgtttgagttttaattagggttaattcttattccatcgtatttaaatttaattgatccaaatatggtcgcgataatattttatttatttctgtccccacctaatctttattttaatttgtatgtattttaccaattttgtttttacggtttattcctaattaactattctttacttacgattaataattttcgagatcaaatccagataaaatagacgaataagatcggcatgatgcaattaatttaaaaagtttttgaaaatccgtatttttagagttttgattttgtcggtcgaattttcagggtgttacagcaagtcatgcattacaattggtcatattgtacccaatttacaaatatcccgcatttctattaaatgttgcattcttttacaatgttatgtgggatgggtcctattactcagccatttattgtttaccttgtgccattgataatttgggtttcaaaatgactagatgttggtttaggaaaatgcttagccatgcctagttcaactagtacacaaatggggatcacattattacatagactttgactattagcatagctttggattggtgccaccgcaatggtgttagtttattaaaatacactgaatggtgggctatgggtgcatggttttgctagtcgcacccatggcaattaaggaccggttcacgggaaaccctgggagacttaccgtgcttaccacaagcgggagtgggtaactgcttgatctgaagtatagcttgaccctttccaaggcaccggtggcgagggtgggcgtgatggagttgggtcgtgtaacgacccgcctctcccaggccgggcccacttacatctggcagctttcataggtcatagactgccctcacagaccaacacatgtcttttctgcacactttgtcctcactcgtgtgcacccgggaagaatttcccggtcggtcacccatcccaaattgctccaggccaagcacacttaacactagagttctttggagattggcatccggaaaagaagttgcaacttgttgatatgagtattctattaatcttattaagccgtaggccgggatgttacatcgtttgtcacgtcccaaaacgaccttaaaatatatcctttaaattatgcctagaataattaaaatccgtgtgaaagcctccaaaaattaaaatgtgcaaagtaaaagtcaaacaaggcttagaggatttttgtatatttcctaaaagcctaaaatgtgtaaataaattttagtggaattttcagagcacaaataataattaagaagaaataaacaaatttaaaatgattttataaaaagaaaaaccttaaaattcccccctccccctcttgggccggctcggtccatctccctccccctctctctcctcaccccgcggcccacttggtccctccccgcgcgcgcgccgctgacaggtgggcccgccctccaccctcgctgacgggtggggcccacccgtcatccccgacctcccgccgctccgcccgcaccaagcgccgccgccgccgccgaatccgccgcatcccgtcgtccccgcgtgcaatcaataggggggaattattccccgtgattccctctccctttccccccaattttccctccctctctcccttggattcgtttagaaaccctcccctaatcccgccggcgccattgatggagcctgagaacgccgcgccggtttccttcccctccggccgccctctcccccttccaaccctatttaaaccctccccgcacctcctccgtccgtttccgcctctcgctgcccttcctcctcgccggattcgagctcgcgacgtcgctctctctctccgccgtcgccgccgagctccggtccgccgccgttgtcgccccggaccacctcccacctcggtgccgcctccttcggcttcgccgcatcctcgccgacctcgtccacctctccatttcggtcgccaaccgccggaacgccgccgaccccgtcgacccgagccgcgctgccgccttcctccgctccagccgcctcctccgtcgccgccgtcgcctcggggtgagccgtggaccgccgcttcgtttccccctctccctcccctctctcgtccgccgctccgccgtacctatggtcgccgccggcgaccataggggcgcaggcgccgcctcccgccggccgtgccggcctggtcgccctcgggcgcgccgagtggctgccgcgtggggcccggccgtcagccgcccgcgccctcgggtgcggctgacgtgtggggcccatggcgccggctggtgcgagcccgggtgcacctggtccaccgtggaccgtgaggctgccgcatgggccccactcccatggacccggtccgcgcgcccctccccctcggctgacgcaataaacccttttaaaattagaatttaaatgaagaaattcacaaatattcatttaaagagcatataaacttcaaatggccataacttggccatttgaactcggaattggaccgttcaagtctctaatttttccttaagaagtcaagaacccatttttgtgctttgttcctgcttgttatatggagtttattagagtaaaagccttttcttttccgttggtcgtgtagacgccgcagcttcggaagatccgctcttcgtggaggttgaagccgacgtttgggaaagcgagcaaggcaagtcacatcatccttgaacatattgaatcccattttataaaattgttttgatttaaattattgcattatcgctttatttaaattcccgcgttatcactgttttatttagccatgcctatttacctttgttatgaccttattagtattgctattgttattattaccttgttcaccctagaataaacaaaaccccaactagtggaccctctactcatggtaccactagtatgaatttaggtagatgcttcgctggttaattaggcaacattaggtggttttacaactctagactttgggaatattctcatcacctggacactatggaatggttggattattgtggaattggattcacacctccccctctattcaaaatcttcaaaatggttttaggctgggctcagggtgcatggttttgatagtagcacctcggccatataaggaccggtcttcgggcctctgttgcaaagcactaccgtacttccacatgtctagtgggtaaggcttagtttgtggctcagtctggttataaacaaaagtacacggatggagatggacgaagtcgggggtcgatggacatctctagggcaaatgaaggctacacgtgctgcggcccggtagtcgagatgtcatggcacagggctggtgtcctgctgctaggggctcagtcctacttacctgtcccggaggttccggccgtaggtggggttgggtcggtactcttgtctatggctaggatgggttggaaactatgtcacgtcttccgcccgtataccgtggtggtgtgtggcacgtggttacacgtgagaaagatgtgtcttttgggtaaagatgtacacctctgatcagagtataacctattcgaatagccgcgccctcggttatgggcaagccgagcaatgtacccaagttagtgttttaattcttaaaacctgcttaacaactaaaatgtggaatggttggcctgggttggcttgggacgagctgggacccatggtcgggttgccagttcggtctgaatcatcgtaggccttgggttaaggcaggttcgtttgggttcacggccttgattaaaaatattgtatagctctaggattgtatttacaatatagctttgagcaactaagtgtcttttaatgctgtttactgcaaaccctaacccttatattataacccccttgtactcccttgcatttattctgcacttgtgggtgtgtcttgttgagtacggtggttgtactcagtcttgctcaatttttcccaaacccagaagaggagttcctggaagatgaaggctttggtgtctagctcgtgcctgccgtcaagcgcctgtggtcgtcgccctagtcttccgctatttcccgtttgtctttgtgtgtgctgggccttcgctgcccatgtaataaattaattatttatgcttccgcttgataaactctaaaatgtatcaacttttggtgtaccttgcctcctggaacaaggaataatacacgcacgtaaggaatgcccgttgggttatttccggtcgtgacaggtcggccggggtgtccggttgtccagctgccgcattcaccgcggcgcaagaggggaccgcccactgcccgttgggggtgggggtgaaaccttagcgtggtgtggatggttaggggagggttatgcggatgatcttgtcacgatttccccctttgcagtatcatggtgatacttcggggcatggcgacatgtgtggaatcgtgtcttgtgggtacagttgtacacctctggccagaataaaactatttgaatagccgtgcccacggttatgggcgatcaaccagattcaccgtgattagtctcaccctagtttagcttaatgaactggtgtagttcaggtggttggttgggcctgttgcaacgtggtgtagcgttggacagtgattggttaatattgattaatctactacaattgttttactgctttcaactactgcttctaaatgcctgctttatgcaaatgaacccttagcctcctttggatatatcctgcatcatacctcctcttccggtatgacttgttgagtacagtgggtagtactcagtcttgctctcttttcccccacaccagagttgaagttcttcccagttggagctaccttagaaaggttggtttcatcgctgccgtcaaggatgcctgtggagtggagtcgccccgctgctgaagtcaagcttccaagtttagttcgttttatctttttccgctgcatttgtaatcttttatatttttttgtaagacgtggatatgtatgtcaacaattgtcgtttgtgtaccctggctggtcctagacaggggtttaatgcacattcagcttagaaattctggttcgtgaatttctgggcgtgacaagttggtatcagagccaaccttgaccgtaggacaagccaactggaaccctaagagccttctgaaccccttttcatctgcatatgcctttttcacttggatttgtttcgggaaaatttggggttttgcctctttggtttgcgggaaaaatcttggtcgttcattcggattggatctttaaaattagctcagtctagggttttagtaaaattttatttggagtttattcgacagttagtcaggaatttatcgggtgatatgcattaggtcgtgtctatgtttgatggggcaattttatgcgcatcattttccatgcatctattttatgcattaagttattgtttagtcagttgcattagtgtctttatctgggttcatgaaaaatgttctatgcataaaaatcaccatgctcggttatttatttgagtcatttgttgctttgtttatttggatttgagcatgcattggttcctatcccttgtccatctttagttgtcagacctgttcctcgatcgcaagcgccgctccgagcttcagagtagccgcccttagctttatcgtcttcttagtctgtttgcttgctagtttccgtgttttaggtttgttgcttgtgggttagtcggcagtcgatatcatgtgtcagtggtatgactgccttaattaggagttatttgcttccttttcagtgttttattcaagattgagataattgcacttaaatttataagaaagattagtttctgagccccctgtttttcttccttttctcatatttctacctatcccccttcagatggtgaagacaaggaatggttcccgtgaatccaacaacgccagtggcagcgaagagcagatcaatggaccatgtgccagcgttctgacaacagtccgtctccaccgcccgagaacccaacgattgctcaggtgttagacaatcagattcagatgatgacaatgatgatgcaacagatgcagcaacagtaccatcaggtgttgcaggaggtgcagcagcaagcacaacagcagcagcagcagaacctgcagtttggtctttcacctccacaatccaaactattagagtttctccgtgtcaagccaccgactttctcaagcaccaccaacccaatcgaggccaacgattggctccatgcgattgagaagaagttgaatcttttgcaatgcaacgaccaggagaaggttgcttttgctacacaccagctgcaaggtcccgcttctgtttggtgggacaactacatggtgacccgtccagctgggacagaagctacttggtcagagttttgtcaaagttttaataaggcacaggttccctagggaattgtggaacaaaagaagagggagttccgttctttgcaacaaggaaccagaatagttatagagtatttgcatgagtttaaccgccttctgcgctacgttcctaaggacgtgcgcactaatgccgagaggcaagaaaagtttctgtctagtcttgatgatgaattgaccaaccaactgatctccaaggactatgaggactttgagaagctagtggacaaggctatctgtcaagaggagcagtgcaacaaaatgaaccgtaagaggaaggcagctcagcttaggacttcccaggggatcagtcagaagcctcgctacacgatgggacatcaaggtggaccttccaccatgattatccggcagcaccgtccttaccacccggg

SEQ ID NO: 9444 - DNA, 37047 bp, Oryza sativa
ttgccgccctccgcgagggcgattttgcactgtccggggggccgcctgcaaatgggcggcgagggggcatggaattttgcaggcggcccccttgccgccctccgcgagggcgatttttgcctcccccttataaagcccagcccctcccctatgaaatttcattatattcactaaaaatccaaaaaaaacgaaagagagagagaggggagggcagcagaaggggagcggcgaagccctgctggttcgctcacttcatcacaggtatgctcccatacatcttttgcatttgtactaatatattacgtttgagtacatatgttgcgttttagttttagttccatatattttagcagatctgtagcacacagcacatatgtgtagatccagagcatagaatataatagtatgaattgagacatagacagtagtgttaattgtaagatgtagtttagtttgatctggagaatgtaacctacttttagaaatttagagaacaatattgtagagaatgtaacttagggcgtagtacagaaatgcgaggttaacgcggttattgttttcatcaggcacaatgtcaagtaaggtcacatttcagatagttcacggtgaaggaaatattagatttggtccagatggtgttgatctgtcagattttgtaatgacatctaagggcatcgataggcctgcggagagaacatttcagtcaatttatagttggttgttgagaggatttagaatagaccaagaagtctacacaatgtcagtatctgttgtagtgagtcgtgcaatagaaggttatttttgggaactaataccgatggacagcactgctgcttggagacggtatgtggaaatggcttttgaacggtcatggcccctcgttatatttgtgtcggtacaagagaaagatacaaatgtttcaatgcaaaccgaagatgtggagggtcctagcaatgcaggggatgttgttggaccatcgatgcaaaatgaggaaaatcaaccaagggaggagcaggccatgggcatggcggatgagggggagagagtcggtataattgttgatgaaatggagagggaagattcggataatgagcaagcggaggacgacgcatcatccgatgaggaaggtgatgtaatggccactgattgggcaaatgaggacttctctggtcttgttatatcagagggtgatcatgtaccctgggagtataaggagtacgaggtaattgagggtgcaaggtatgctcataaggatgagatgaaggaggcggtgaagcattgggcagtttcattgcagagagagtttagggtggtcaagtcaacaaattatgtgtatgaagtgaggtgcatgaaggaagattgtccgtggcgtgtccatgcatataagggtaaatggaatgattattggaaagttagcattgtgaccgagcacaagtgctacttacaaggggtggagaagtatcaccgaaacatcacttcagcttttgtggcaagtgagatgtacagcagtgttgttggtaacattggctttgaaccaaaatcaattattaggcacatcgagaacaaattcaagtacaccataagctatgcaaaggcctggagagccaaacaaaagatcattgagatgaggtatggcacatttgaagcttcttatgataatttgcctcgtttgttagccaccattgcccagaggaataataatacttactatgacctacatacatttacatcggttgaagatagaacaaagagtgtgctgcaaagagcctttttctcattgggtgcttgcatcaatgcttttgtgcattgtcgacctgttctatgcatagatggaacttttatgacaggtaaataccgaggtcagatattgacagcaattgggtgtgatgggaacaaccaggttctacctatggcttttgcatttgtagagagtgagaacactgaaagctggtactggttcctagagagagtgcacattgcagtggtgcgtatgaggcccaacgtttgccttatacatgatcgtcatgcgggtatgttgcgggctattgactacttgcagaacggttgggatgagaagggacttccagctaagtggcctgatgttcggagtcggtggtgcatgcgtcacatgggtgcaaatttctacaagcaattcaagaacaagcatcttatggagctctttaagaggctctgtgcacagaaccaagagaagaaatttaatgagttgtgggacaagttggatgagttgacaacgaagcaaacagatgagcaatctcgcagaccacaagttgaaggtgacgagcctcccatacctcttggtgcattacatgatgacccaccaacaatgagaaggaggtcagggtcggccatcagaaatttctctcagtggattgagaatgagcctaaggagaagtgggctctattgttcgacaccgatggatctcggtatggcataatgacaaccaatttggcagaggtgtacaactgggtaatgcgaggagttcgggtacttccattggttgctattgttgaattcatccttcacggcacgcaagcctactttagggatcgatacaagaaaattggtccgtccatggccgataacaacatagtgtttggcaacgtagtgacaaagtacatggaagataaaatcaaaaaggcacggagacatagagttgttgctcaaggcacacaagtgcatcggtatgaaataatgtgtgttgataggagcaggcgtggtatctatcgcaagcaagccgtgcaggaatgtgtcttgaaggcggatggtggatgtacctgcagttgtatgaagccgaagcttcatcaccttccttgctcacacgttcttgctgctgccggtgattgtggcatatctcccaatgtgtacgtctcaaattatttcaggaaagaagcaatctttcatacatggagtgaggagatatatgggttcgggatctcaggatcttacacaacgctgagtgctcaagttttttatattccagatccatctaagtttagggtgaaaaagggtcgacgccaaactagacgcatcagaaatgatatggatgagtcagaagcaggtgggaggactttacgctgcagcaagtgtgatctgcgcggccatacttacaagacatgcccgaagaatgcagaagttccaagcggcgcagatgctagtccatctggacaggcaagtgatggtaggcgaccacctggtgaaggaacaacaagcaggcgcgcaaggccaaggcgtcgtcgcgcagcaggcgattccatggtgtaacaatgctttcgatttaggaaataaaatgatgtaatgagtgttcggactaaatacttctatcgtgtaatttcaattcaatcttgttgtaatgagtacctccgactattgttgtactagtagtattgcgaactattcggtgttgtatcataatgttatcgtgatgagtgttcggactaaacacttttgtttgtttgtactcttgtttaatatgtgttagtaattcgcttatgaacatttattacttatgttgaactaattatttatatgtttctgatcaacctatttgatgcaggtatggcgtacgacacaccggcgctgttgaaccgtgggattgacaggaaccaccgctcgttcctgtcagcagtcgagggtgcacagctcggcaccttccgtccacgcacgtcgcgcgagtggttgcgtgtcgacccccgtcacgttccttggtacgcatatgttcacatttcaactcaactttgctttgttttatacttatgtttgaagtttgctctatacaggttgcgtgcggcaggccttctaccactttgtaggcttgttgaggcggcggcggacgaccgtgacccagcgaagcggtgggatgcagaccggtcactccttgccgctcttgtagaccgctggagacctgagacgcacacgttccaccttccctgtggggagatggctccgacactgcaggacgtgtcgtacctgctcgggctaccgctggcgggagcaccagttggtcccgtcgacggtgtttttgggtggaaggaggatatcactgcgcgcttcgagcaggtgatgcgccttccacacctaggaccgaccaccacccttcctccgtactctacagtcgggcctagcaaggcttggttgctccagttcactgtaagtaaataagttgttattatcatacgtgcttatttgcgaccggatcagtgttttgtactaacatttcattcttaactgtaggcggaccttctgcaccctgacgctgatgattactcggtccgacgctcccttgaggcgtacctgttgtggttgttcgggtgggtgatgttcactagcacccacgggcacgctgtggacttccggctggtccactacgcacggtccatcgcggatgctcagccacaggacgtgccgcagtggagctggggttctgccgtgctagcagccacgtaccgtgccctctgtgaggcgtgcacgaagactgacgcgggagcgatcatcgctggctgtcctatgttgcttcagctttgggcagccgagaggtttgccatagggcgaccagtggtggacagcgcaccctacggggttggtcgcagcgcgcagtggccagaggacggtcccacgatggggacttactggtgtcgacgtggggttagtgcaacttcgctgcgttataagtttatcagtcctcttctttttttttccttcacataacatgtctaattccgatcatgtttattgcagcgtcgttacgctcacgtccaggtgagacgtggttacccggacttcgtgttcgagtttgaccgtctccagccgagcgacgtcatctgggagccgtacacagaagaggccgtcgctgcgagagcaccgctaggactttcgtccttgtgcacacgcgaccaggcttactggctcaccatcctgccgatggtgttcgacattttcgttgagcctcactggccgcagcgtgtgatgagacagttcggacttaggcaggtgtttcccggcaacgtgcagccgaccgtcccccctgccgaccactcgtgagttcggattgttcatttctaaatttttatgataattacatcatcgagccatacaatttacctctcttcacaggttgactcgacggggacagctagcaggcgcactttgggctccacgtgtacagcagtacgttgacgactgggtgttagctacagaggaggtgatcaacgagctcttcccacacacggaggagaactaccgtgactaccttcgctggtaccttcctcgcactcgtgcgcgtgtgaccttcactccagacgccccagagccgcacgttgccgctgtcacggacgcgtatcccacgcaccgtgaccgagactacttcgtggcggtacgtccaatttgtattacttccaacaattatgtcatttatcttgcataatataggacaactactgaattttttatttccatcttgcataggctgatgcggcacgggatatcagtgccgatatcaccgcagtccaggtgaggttgaacagaggtttgcacttgactgacgttgagcagaggtcgaccttcgaccggatgcaggagaagatgcgtgcggtcatgcgcgtcttctcctgtcgcagcgccgtggacgtcgtacctccagctggtccggtacacccacggcctcgcggtcctaccgtcggagcaggacctcgtttgtcttcgagcgcccctagcttcggagcagtgcgacctacagcaccggtttcgcacggtacagttcagcccagatattagttcatttttgtttcagcttttgcacgaatgtgtcaccatgttttaactgcacgtttcctcatcgcaggacctcgtatgccttcgagcgcgttcgcaggcacgaccggcgcttccgcgagctccgcaggggcgttcgccacctcttcaggcgcgttcgccagctcttcctctcacggagcgtcgatccctcgcccacacggtactttactttttattaatactgttaaatacctatacgaaactgatggtccttgtccagcaggatttgcagccgggatcttcggtactggggcctcttcgtctcacgccggtaggactggtcctactagccagttctacgacgacgacttgcacggtgcagaccaccaggacgtactaggctcctctcagcttggaggagctccagaggcgcacactcaggagcagccagaggtcacacctgtacaggcaggacgggttggccgtgccgtacccccggaccgactcacgtactcccaggggcacattagggcgcagggtaggagggacaggggtaagaggcctcgtcagtagtgttctacctcttcagtccttatgtgaccgtttcttttggcttacaaacttgtaaagcagtactacttttgctattactactgcagtactacttgtgtttgtctcgtctacgtagttcttttcattcgtatggtgcttgaacaacttatgctcacaacaacacactttcggcgcttcacggtagtgccatatccagtagcgcgcacagtccacaacagcacacatgaaaagcggcagctcgagttatcactatcaactttcggcgctgcctgttgacataaagtgaatcacgcccacgcgtgatcgtcttgtcacatctaatgaataatgtatctcattgagttcacatatattgcagtgaaaacgacgctatataattgacaatctgaaggcaacctcttcatatcttctttcccactaccacaccacacacgaaaatggaagcctattaattggtaatacgtaatctagaattgagattatgtacaacattcttcactacaattttacattttggcagcaaaccaaatatgatcaaatgcaattttaccttaccaaatatttggtagtgccaaaacttgcttatattttggcattaacaaaatatttgtacggtaacattccaaatatgccctaaaaaataataaaattgtattttaccaatcttggagattttaatcttgtatagttttcaatataaaaagatttgataactattgatatttatataaaaaaatatagagcacagtacaaaatcgccctcccccagggcggcaagggggccgcctgcaaaattccatgccccctcgccgcccatttgcaggcgggcccccgcacagtgcaaaatcgccctcgcggagggcggcaagggggccgcctgctaatttccatgccccccctcgccgcccatttgcaggcggccccccgcacagtacaaaatcgccctcgcggagggcggcaagggggccgcctgcaaatttcgttgacggccgtcgcccgagagcgaacggccgtctgccacgtcattttcgccgccctctgggagggcgatttttaaaaatcgccctcccagagggcggtaggcgactatttccgtcaattttcaaaatggaaaattatttttgtaaaacttttaataaaaaaaattataaataaaaaaaattcttcgtggcataacccatccgtgacgtgtagcagcgccccaggacaagatggatataggcctgtttagttcccaaataaaagcttttcgatcaccctgtcacatcgaatgtttgaatatatacatagagtattaaatatagaaaaaaaactaattatacagcgtgtaaattgcgagccgaatcttataagcctaatagtgtcatgatttgataatgtggtgttacagtaaacatttgctaatggcggattaattaggtttaatactttcgtcttgcagtttacaggcgtaatctgtaaattgttttgttattaaagtacgttcagtacttcaaatatgtgtttgtatatccgatgtgacacgcaaaaacttttcacccaagccatagcatgagatatgacctaagcagcgtacatgccaagcccgatgtagataggcaaaagtagtaatccctccatcccaaaaaagacattcgatatattctaacgtaacaaatctggacataaaatatgtatatattcgttgtattatgatgtataggttttttttgtttgaatgggggagtactattttaggtggcactcatacacaactgcttctttaagatgcaatcgatccaagtatttactacggtcacaactactactgccaaactaaaagaaaacaacttaataaaaaggttatgatttggatggctgtgtgtaaatattgtggttggatttttatccactatatgaaaaaatgatttggagatgccatgactagcatgtgtagctaggtatatatgttgaatgaagcatgttcacaagagcatgcagtgagtcagtgacatggagtccagtattggagggcttgtcaataaatgtttcatctatggtgaccacctacaattctaggccatgtttagttccaaactttttcttcagacttctaacttttccatcacatcaaaacttttctacacacataaactttcaacttttccatcacatcgttccaatttcaaccaaactttcaatttttgcgtgaactaaacacacacccctagtgaactacaaatccaacgcagcttgccgtcatcgcagacatggcatccataaaagtcagcttcggctttcaaatgtcacagatcaagacatcttgagctaccatcacaattgttgtacttcttccctcaccaaatccgaagatccatcatctcccataaatcgagactgtacaaaactgagaagaagcaaacaaagcttatgatatatctagaggattatggggaggggaaaaaaatatggtttctgtatctcaaaagtataggaacggtgggcattgggaatggcgttatcgtaggcaaactgtagtgtcactgatgtgaagaacagtctagagcttttcctgatcgatggcatgaagcatttagctatggcgatgtatgctgaggttaccaactatctcggcacgcactcctcaaccacgctgcccgaagggagatgccacgacatggcctgttcacaaggtagatgcggctcgttgtacttaacggccgctgcttcaggcacgtcgagactggtgctgtggaattgtagacttgctctgcactgtctacacctgaatcgcgctgacgctgcagcgatccccgtgcacgtgatcttcggggagctcgctgcgtccgaggcagccaccacaatggtttcatgctgccgtgttgggctccgatcttccgaggccctcgtgggaagtgaattgatggggagcacgtacatggagcaagcaagcctccatgtcctgtgtaccaccttcatcatcctttccttcagcagggtttgcaatctccaaattagggttttttttggcgggccgggggaggggcgaaagaatcgaaattttggaagtttcggaaaatttctgagccgaaattatttagaagttttacgtatttttaatgaatttgaattaacttcgaacaaattgaaaaaatgaaaaaaaacccgtaaatttcagacgagatttgtgtttacctgtgagtgaggaaatttctgaaattgtaataactgccttccggtcaaagcagcatttacctttttcagcttttcacttcactcagagcccgaagcaacaggttggtagtagtactcaacaatcactgtctagtgttagtttttttttttaaaggaacaacggcagaagattccgttctgccggaatttaattaaggggaaaaggaaaaagtttacaatcccaggaatgggatttcaagtccaaaaacaaaataaaacaatcaagggtgcctaaaggccgatcttctaaggtctagatcttccatgacaagatgagctacctgataaactgtacaggaacgattattgaaaattctcctatttctttctaaccaaatatttcaccaagtagttaacagtgctcctctaacgtcctgcttttgatttgtcgatccatcttgatttacttgatcccaccaagtagagatatttgccggctataggatagggactagtagatttcgccaggaatgaacgagagtccaaacttctctgacatacacacagtcacagaaaagatgatttgtatcctcgaatgtagacgtgcaaagacagcatatccagttgcacggccagtgacgccttagcaggttttgggctgttagggttttgtgatgaaggatcaaccacccaaaagatcacatttttagctcagctggtgacttccatagggcatcaaaatccaatcgtgcaaaagttcctgcaaattgataggagtaggcttctttactagagtaaaccctggaaggattccagttccagttaatttcatccggttgttgggagagttagatatcttggatcattccccccaagttgcactaggtcatgcagctcttccactgttgtgaattgtcagaaagaaacaatccaattgtttgacgaaatttcaaactggacacatcgttgctttcgtttggctaaacgaaaacagagaggagcaacatcctttggacataaaccgttaaactgtctagtgttagtagtactcagcaatgttagcatgtgctgatgccaatgactaaaatgcaagaagctatatgcatgtagatgcatcaacgccacaggatgaaaaactgtattctttcaattgctaacagttttccttgaaacacattgttttgatgttacataatcttttaatttccagctgggccacataacaattagcactagtgctaacacgctagtggagaaaataggaagtccttaatatttgatattgcagtggcaagcatcgcaaacagaggttatacactacacatccattaaactcactgtttctaccccttgcaggtggcgaatcgatcatctagcaccgccggcaggctctctgccatagggatctaaagcgtgctactaaccggcttgccagacgcatgcatctcaatcatgcttaggccttgttcggcaggcccatttccaaacctggcctggaacagttcctggcctggattgaatggatccaggtaaattcactgaaagtctgaaaccacatgtcgattgaatccactccttttcttaatccacctcttcaaaaaactgcattcggttatttcttaatccatctggaatgaagccattcaagctgccgacgctaagtccaaagcactagcaggatcagaagttaagcagagaaaaggcaaaggcacatgaagcaaactggcttatatatgtatgcgtcgttgggctctgcacatacatattatgcatatataaacctgagtatatttatagcagacgcatacatatgcaaagaacatgaagcaaagcactagcaggatcagaagttaacacacaacagaggaatcagttcagactaggtattttgccacatgggtacggacccttgaaatgcctgcagtagaaatgataggaccaattatagaaaaggcatgtgacattatgacattacagaaaaatggtcaccgtgtatttttgaccattttgttgtatgaaaatggtagatgggcacatgggggaaaaaatatttgagaagtaatttacacagcatcatatgcaaaggcgttaaatgcaatgcttgtcgtagcttcaagcccacaagaactaatagcatcatacatgcatgtatgtacggaatgtaactcatctatattccaaaatctaatatgaaattcattttttccagttaacaatgtcgatttcaatgtacccagataaaattataggatgtatagtttctaccaagagagaagggactaaagtcggcaggtttttacaatatgctatgtaactgtaagcaccataagcatatgcgataactgctaacccagttgaacggataaaagaagaaattcaaaatgctgctgtccctgtagaaattcaaacaaagtatacttttttatttctcaaacatatgtcagcacactacccacactaaaacagggaatttttttttactgaacttggtgtcatctcagccatttcatgtcatctcaagcagaaaacaaggacaggaactaacctttggtgatgctaggccatttcacttctcagccaaattaaagcagactctaagtcatcttcgtaggcgccggggagagaaaggaagaagacgatgcattaccggcgagaaggcagcagagagcgcggacgtcagatgggaagaggtcgccatcgccgtcgacgctggtgcgccactgcgtcgcctcctcgcgtcgccagccgcgcgcgctgtctcctcgcttcaccagccgcacgccgccgcctcgcatccggattggagctggagggtctgatgtgaggaattgatccgggccaggaacaggggaagggagggaggccaaaccggccccgtttccaatctgggccggccaaaacgaacgacgcttccgagccagaccagatttggaaatagaggccgtttcgggccttaccgaacgaggcctaaggcgttgtcagggatggccggaatggagcaggcggcgctcgcggagcttgcacatgcaccactccaaaagtgtatttgctatgaattaatatacgactcgaggggctagcggaaggagccgccagcgagaggatttctcgagaggtaagcaaattttattttttaaaattttatcgaatgcaagcaatctgccagcaatccagagaagaaaaaaactaaatggtaaacctacccctaatcattgagtttgtcaagtaataagaggaaacatattcttggcacacatgcttcccatgcacactccatgcacaccaactagcaaatgtcacgaaaaattatagaaaaaattgaacacatatttttaatagtattacacatacctatgaaatctcatgttcaaattcattatattttagccgtaacaaaaaagacaaaattttgacagatttttactcttaaaactgtcaggtttttctcctttttattacggctaaaatacaatgaatttgaatataagactctacagatatgtataacactattaatagtacatgtcatatttttttctagaattttccgtgatattttttagttggtgtacatggagtatgcacagaaagcacatgtgtataggatatgttaaaaaatgtccttattaaggaacggtccaaaattatttctgtgagtagtataatataactagtagagagtacagtagcgtttctcatataaaaatgctagatacatcactgccatgcgcagctcaatgtttaccccgaaaaacaaaacgaattatacaaggattctgacctgcaagcagtatactcgggcatcactatcggtctcatcttttctcttatacttataattatcaatcaaaatttaaattttcacctttacatttggagttgattttgagagctttttcattgaagtttaattttcaatatttgcttttagatcactgagaacttatatataaaaattttatttacaaattatttttcgtttgtaaatatgccgttgggccaatacttcttctgtcctaatatgttgctatctaggataggatttgatctatcctaggacaacgaatctggacataagtcctaggatggggtagcaacattttggatcagacaaagtagcatatagctggaggtccagcatcaaaagcagcagtataccaagcaatctagcattccgcctactgcaccagtcggccggcaaccactaggccgcaaagctcgatcgctcctcaccgtcgtcaccgacgtggcgtcttccaggtctctcagcaaatgtgttgctgagctggtggccacaccacctctcagtctcagctgatatactcttgagctgcctcttggtgatgcagtaggccgcagtagccacagctgaagaatgcccttttttttcacgaagatgctgaatatatatcccggtttctgcatccaagcgccgcctttgccagtcaccgtcaagacgcaacttttcatttggtcgacaggtacgtcggcggcgagagaaagaaaaagaaaaaaaaacaaagaagaagcctgcaggatcgaatctggtgccggcctgtggccttggaacaatgttccccggtccaatccacgctgccggccgctagctcgctcaggcgatcaaatgacacgccacacggattctccaccaatcgatctactttcagtatcaatctgctagcacactggctgactggataagatgtactcgttctatttttaaatataacaacttttaaaatttatttatcatgtcaagtaatatttttatatatttaatctgtatttcttctcaaaaaatatcaccattccacaattttttacctattttttcctaatcaatcgtaacctttatccattgaattttacttgttttcttaacaatctcttatgttatttcttatccgtgaagatatagatggatagatagatagtacttgttgtcgaaacatgaattcggcaataataaaaggggttagcgcacgagacctaaaagtgaatggatgcgaagacaaggatttagacaggttcaggccctctcaatgagaggtaatactctactcctgtttggggatttgaatccgccgggtgtagtatagatctgacgatcatatgtgctcatgcccctcagagggcctcctgcccaccttatataggatggggggcaggattacaagatagaaaccttaaccaatacggtatcggtttcctaaatctattttataatattatcaaatcaggactttaggccgctccataatataaaaggaaacgtaatacctaagtcatgatcggttacatattccatagatataagttatcccctatgactagtcggataaccatgccatgtgggtatggggtacccataatctccacagtagcccctgagaccttcacagtcagaaaaataatcttctctcgaactagattactccaaagccgagtgcttcaatcatcttcgccatgatttcccgagtacttttaccaaatatgaagactgtggagggctgaaaaataaagtcaggtgcatcgaatagatgtacctaatagatgcaccaactgaatggttttgataattgtagtcaaccaagtgacttaatattaatatatagcatatgcagtgtgaatccctgaataacatgatcgagtgatataccgactgctttgtaaaatatgatgcgtgcaacctaaagctgactacatcattgaatacacatagcaaaacagctataaagaagcttgtatgttgtgaataaataaatttccaaagtattgggcatacaccatgcgcacactgctttaacagatgtgcttgagcccctaaaagacacatggtttcaccacacctggaaatatatagcatatgtggtataaaatccgagtaaatgaactcataaggatttatcaatcgtttggaaaatgaccaaaatatataatcagcctaagccataatattggtcaataaaaatgcacacttacgtggcaaaaagcaatgatattgtatccaatcaattgctttatgaacccaaacagcgccttgacttatataaaaagtcagcggggagctatataaagcattactgtttggcaccttttaaaatgtattgtaccaactcctaaaaagttgagtaactgcggtataaaaggattttaaggtattgggcacataatcacgcgcacttttgccaaagcaaaaagatgcctaagtccctaaaagaacgtgacaggccacacctgaaaatatgagctgcagacatattaggcctaggccaaaaaatatacctttgacaccctttaaaggattacgcatgtaacatgctctcgagtaataaatctttcaggtgatatagaccaagtgtagctcatatgaatagcttctgatctgagtgattatcctttatgggatactccaaaatagatataacaattgaattccgactggcgcaagtattaggctgataacccatacggggaataataaatagtctagtctttgagcatagaaaatagacccatgatcatcaaattcatgttgcatgtatccggaacaagtccaaattggagatataatcctcacgcttgagttgatgagcccctgagcatatagcttgtccttctgtcatagtcaccattgtccattgatggtagctgacgcagttggcatagagacaagacgaccaatatagagataatattgcccaccagaggtggcaaaaatattgttagtagtgaagatagtgataccaatcaaaagtgatgaagttgtatagccgtggaggcgaagaaaccagtcggcaacagtcaggtcagccagcaatgaatatgaaggcgcccagcgataaagttgtgtagccatagcagcgaaataatcagttggtgacagacgatgcagctagtgaagaagatgaagatgcccattagtggcgacataataagccatccatgaaggcgaggataccggtcggtggtgacgaaagcaagccgacggtgaagatgtagacacgcatcaaaggcgatgacgaaatccaccaatcatgaagatgaagaaaatagtcggcgacgacaaacgcaaccaacagtaatgatgataagcagcaatcatagatgatcaaatataatgacgaagttgcccatcaatagcagtagagtgggctatattgaagaggcttgacaggatgttgattaagataacgatgtcggtgatccagtcgatagcaaccgtgaaagtgaaataataagtcggcgaagacatagtcatccattagcaacagagttgatgtcagggccgatgaagcagaggtgctggtgatgatgtcagtgacaataatgcatcaaattggtgttatagctgttgcagatgcttcacttggaggaaagtagatgatgttgtccaactcgtcgaaactgagctgattggttgataactctgctctaaagcaaagacgaagataatgactcctggaattgactcgttggctgataaattgattgcttcagcttgtcgaattttgagagtcttgtatttgtgtagcccccgactctttggttagttgggaaacaactgaacatagagtcgagaactgtaacttcttgtcgtcgagtagtcattgcttgagtgaagataaatattgaagactggaacaccacttgttgtaataaaataacacggcatcatatttggtgacgtatgccaaggtgtcgaaactcttgtagtcgtcatggttggtgaagtagaggcaatagagtttgctgatgccgaagataataaaaatgaagttgctccaccaaggtgacaaaattgcatagccgtgatgaagtgaacacgggtcggcggcaacagaagcaaactagtagtgaagacgcgcagttgtgaagattaaagcaccagtcggcggcggcataaccagtcggcaacggaagacgatgatgtccatcagtagtggtagctgtataaaccagacgtagaggcaagggcactagtcagcagcagaagagatgactagcgatgaagacgataaggccaatcaacactggcagaatcatgcagccatgggagtgaagaaaccagtcggtagaagacgtagacagcttgcattgaaggtgatgatgcctatttgcggtggcggcgacgtggccagccgtgaagacgatagcaccagttggggtcatacgaggtggccggtcggagaagatgtagacgtcctgcaatggcggcataatgggccagccgtgcaggcgaaaacaccagtcggcggctgacgaggcggccagtcggtgaagacgtagacgcccaacaacggcagcataaaggccagccgtgcaggcggaaacaccagtcggcagcggatgaggcggccggtcggagaagacgtagacgcccaacaacagtggcataataggccaaccgtgcaggcggaaacaccagtcggcggcagacgaggcggccagtcggtgaagatgtagacgcccaacaacggcggcataattggccaaccgtgcaggcggaaacaccagtcggcggcggacgagacggccggtcggtgaagatgtagatgcctaacaacggcggcataataggccaaccgtgcaggcggaaacaccagtctgcggcggacgagacggccggtgaagaggtagacgccctacaacggcggcataataggccagccgtgcaagcggaaacaccagtcggcggcggacgagacggccggtcggtgaagatatagacgcccaacaacggcggcataataggccaaccgtgcaggcggaaacaccagtcggcagcggacgagacggccggtgaagaggtagacgcccaacaacatcggcataataggccagccgtgcaggcgaaaacaccagtcggcggcggacgagacggccagtcggtgaagaggtagacgcccaacaacggcggcataataggccaaccgtgcaggcaaaaacaccagtcggcggcgaacgaggcggccagtcagtgaagaggtagacgcccaataacagcggcataataggccagccgtgcaggcggaaacagcagtcggcggcggacgaggcggccagtcggtgaagaggtagacgcccaacaacagcggtgttgtgaccaaccaaccgtataggcgtagacaccagtcggcggcgacgacggcgagccggtggtgatgttctgactgatccattcctggagcgtaagagataagcttaaagccatgaatcccttttatgcatatctggatttggatcctgcagaacaaacatataggatgagtagtatctgatgtaaatataatactcgagaaaaattcaagcattttaaaatgtttataaatatgtatttcttttcttgttaattttgatttccccgagcagatgactcattacgtttaaacactttgcccgactagttatagccaccaagcactgggagtcggcctaagcacttcccaaacatgcatatgagtgacatgagttcgtcattaatggaacaaagtttcacggatcggagtttactactcgggtacttttgcaattattaagagcagaaaataaattatcttatctctatacttttgatttattccgaataatacttagcaccttgcgttactcggtctatccaacgagcccccgggtgctaggaattggcccaaaggcaactatccatgacaaaccaaacggaaagcataggaagatagaactctataacttgatagacacttttgtactcagattatgtcgcaagcaatcaagataaatattatgaaaattattgaaaaatatgatataacatctgtagcccccgactcactactcaatggagaaccaattgatgtagtgaggcagaggaaaaggaaaatatcatataaggaataaatgatgacttagctttgtaatattccccttggtgatggcagaggtggccaatgtgggaataaagttgtccatcaataacaatgaagacaccagtcggcggcgacgaaggcggtcgacagtgaaagcgaagatgctcaccaacagcggcataataggccagccgtgtaggcagagacaccagtaggcggcggcaaaggcaggccggtcggtgaagacgtggacgcccatgaacggtggtatgaccaaccaactgtataggcgaggacactagtcggcggcgacagaagtaggccggcggtgaagatgacgattcccatcagcaacggccaatggagaggcgcagccgggtcagcgtgagctatgagaggcgcagccgggtcagcgtgagccatgcaggggcgatagtcgggctcggcagcgtggaagcagccaatcgcgaacttgttgagacggtcgacagtgtcagcggatgtagccaaccatgtaggcgaagatgcaagtgagtgcgggctaacgcgcggacaaatcaagtcgatactccgcggcacggcgacggcctgaccaccacggcgtctcagtagcatatgcaatcaaacaaataattaaattgatcagcagcagcaaggaattaattaaagataaatgcacaaatatcacgtgaggtgtgattggttgctggcttgatgggcatgcatgttgccgatgcatggtcctgtgcatgctggtgacgtgtcatcgtatcatttgttggccatgttgccattcacagccttgttgaatttggttgttgatgatgtcgccggtggcgaagacgaggagcttgaggatggcgagagcgatgtcgcggtcgtagcagggatctgtcgacgtctcggactccttcgcgtgatgcaacccgcccgactagttgacgatgacgacgcggcagcagccgggcagtcctcaccgacattgaagcggcggaggaacagatccgcgactctgggaggacggcggggagggaggcgacgtagtcgtcggagcggaggaggcggaggtcgcagccgcgcgcaggcggcgtagctgcgtgcgcggccctggcgtcgttggtgtccatcagctgcaaccgtctcccatgcatgctgattagatcggttttgtcatgccttgtgtctgtagatccatcttgcagcatcatggcatcttcgttggggtagattgattggctcagtaggcttggtggtggatgaccatctgatccatcagatcgtcgctgccttagattgaatctctcctgactggtttggatccaagtcagagtgtgaaaacttgttaaagttgtcagcggcgacgacgaagcaaaaatcccgaagcgaagtgaagacgaagccgacgactctttgaggtcgatctcagcacatctccagaaattgattccatcgcacttctcaatggaaagctcgacgcaacccttacctggcgcaccaactgtcgaaacatgaattcggcaataataaaagggggtagcgcacgagacctaaaagtggatggatgcggagacaaggatttagacaggttcaggccctctcaatgagaggtaataccctactcctgtttggggatttgaatccgccggatgtagtatagatctgacgatcatatgtgcttatgcccctcagagggcctcctgcccaccttatataggatggggggcaggattacaagatagaaaccttaaccaatacggtatcggttttctaaatctattttacaatattatcaaatcaggattttaggccgctccataatataaaaggaaacgtaatacccaagtcatgatgtcacactccgaactagtcctgagcggaactagcccgtgacgctccaaattaacctgttaatcgataccagtcccatgaaacagtgctgatatcacaggaagacagaatatcacagcaacagaggtctctttattatagagtaggagtacagtcatgttgggctgcggatagatcccgagctcacaactgcattacaaaagggaaacggaagccaagacttggaccacacatgacaggcgcgacttgggaactaggccgaaaccctaaaactcatcgtagccggcttgctcctggaagaactcctcgtcagcgggatccgcttcatcttcttcagcaactgggggggggattatttatatagagcaagggtgagtacaggagtactcagcaagccatgggaaataaatgtttaatgcaggcttcaaagaaaggctgttgtttttgcgattgattttatttaaactcttttctgaaacaactaagggagtgcttcttaaacgacacggatgagacagtgcgtctcgtccggtcggagtatgtgcaatgtttcagtcttttgaattgatcaagattggcacccggccaacagctttcaaacggccacccgggcctggctgatcccatcagccgccgattttccaaacatcaaacccattccacaacagcaaatttcacaaggcagtagtcaaacaaaactacgctaggaatcacctcacatccgcccatgaccgtgggcacggctgttcgaacagttttaataacctctgcagagggggtacactttacccacacgacattactaacccggatcatccagcccgtgcagaacggccacgactagagaccttaaggctttcatgacaaggcatttcgaaagccgacacaggttcaccatatgccaacgagaggggtcccagaccaacaccagattaggtcccagaccacactgtgccaggaagcccaggggtcttccccgacaccagcccggcgaatccacatgtctcttagcaccatggctcccccgataagctagttactcagccaggggtgtcccattccacccatgtggtcgtacttgtcttatgttcggatgaaattccaaggaaacggtccttaagtgcaagagcgggaaaccgtacacccggtacgttccccggtccgtggttttggaaattcatttagttcgcaagcaccgacccaggtgtcgggttttccaagtcttttgtaaaacccaagttttacccaagatgtttctcagattttaagtttgaaggcgatcatcgatacccgtgcagagtgcacgattaccgaggcgcaactaggtgggtacaagggaacatggtataacaattacaatggaagggtcaaatgcaacaaattaggtaggtccgccaatctgccttgcagacgggacaagcagattaagtgcgatcctatcaatgcataatatttttcaagcaacataattaagttcaaatataggctcaagatgttcaaaggtggcttgccttgctcgagatcttgagattgatcctcgaaatcctcgcactgcgggtcttcgggctccgaaactacacgcgaaacgggacaactcaacaagcggcgaaaataaagccctattaatgacctctaagtgtgacattagatagatctcgagatttgaggaattttggaagctgaacggagtcaaacggacttacggttgggaagatattgaatttctaagattattggatttttggtctaaaggaaaaaggatttatttaaatctttttgaaaaagaaaagaaaagaaaagaaggagggagggaaattagacttccctcggacggctagggcgcggcctgagagaatggggcggctcggccgagcttaatgggccggccggcccaagaaggcggcccaaggcgcgcgcgcgggcggggaggggagagagagtgccggtgggccgggtccatcccgcgtggtcctgggtgggacccgcttgtcggcgactcggctcaccgtgagcgaggtgcacgcggggtgtgctagggtttggggagggaggcgcggcgcaggcgcgtggttcacggaggacgcggtgcggcgggcccacgcgcagcctcacggctcgcagtggaccgcgcgcgcgaggggcggagagaagcagcgggccggggtctgcttgacccggtcgcggccgaggtggcaccgacgtggcgcctacgtggctgccacgcgggccggcgggaggtagacgacgacgccggccggaacagacggcggacgacgacagcgagcggcggagcgaaccacggcgatacaggcgaaagcgagcacaccgggacgttgcacgggacgaggggagacgagccaacggctcggattcatcgggggatgctcgatggcggcggattacggcggcggcaaccggcagagagaaaagggggaaacggcgatgaggtcatgaggggccgattcccggcggcgagagcatctacgcggatacgggaacccatcccttgcgccggattaggaggaaacgcattgagagaggccggcgacgagaggcgcttccgagctcgggcggcgacggtggcgagcacacggcgagcgacggcagcagtcggggcggcgccggctagctacggggaggctacacatgctactaccgaaaactaaggggaagagatggattgaggagggagaacggggagatgcactaccgtgcggacggggcgcagtgacgatgggccgacggcacgggagtgatctctttggcctcgggccggggaagaggaggaagtcgagctcccggagtccccttccgcgtccacgaacgcaccggctctcccggtgcttggcgatgaacggcggaggcgagacagaggggcggcaatggcgtggtggcggcgagcgaaacgggaggaggaatggatgggaaggcgccttggtttataggacgacgatgtcggtttggaaaccgaccttgggcggtcaaggcgcgagctggcgctcggcgctcgcagccaaaacggtgacagaggcggatgacgccggcggggaggggaaaaggaaaaaggaagggagaaagggagcttgccccttgccactttgggaaaaggaggagggagcgggggcgacgcggcagagggaggaggagctctgcctccgtcccttggaggctagcgcgtggagtggcgggggccgggtcgtgatgacggcgatgacggtggggcggtgtggagcggagcggcgacatgggcggcaggcgcgggcaggcgcggcagatgctgacggcggcagcgactaggcggtcggccaccatggcgcgcgcgcgcgcgggaagcaacgggcggcgcggcgatttcagcggcgtcggcgggaagcggcagcgagggcggagggcgctcggctcggcgcggctcacgcgcacgcgtgtgcagcgcacgggcagagcgggggagagggagagagagagagagagagatggggagggagggggagatgggccgagagggattcggcccatcgaacccgagggaggcaaaatagacttttgcggagggatttgatttgggaaggatttggattcgggattgaacttgacgatagatcggggatttgagatctgagatggcacggacactagacaacaagcaaggaaacggatttcgcaaatagggtttttaagagataatttttccgctaggcgccacgacggaacgggcgctacacatgatcggttacatattccatagatataagctatcccctatgactagtcggataaccatgccgtgtgggtatggggtacccataatctccacacttgtaaagacagatatgctagggtgggtatatgagccgaagggaatccgaacgtctggatggtgacgccttttcagtgagggctggaggtaaaatattctgaatcccggcttgagagttgatgtggagagcagagaccaccttgattccaatccctgcgatgcaagttggtgcctggattctgggcttcttctttcgcagatttgggatctggtggatgtcgactgcatgtataggtgcatatgcagtggctgcgtgcgtgttagtcatcaatacaccgaccatgcctgtagttcatagtctgtatcccagcaaaatgagatgcactggatatgcagtatcaaggggtacgtggtttcaaccccgaggtcatgcgtttaattctcaacatactcacaatatcttacttaaaaaatattgggaggagtgcctctccctcgaaatctcgtttttttcacgtacccagtaaagtttgacacggctaataactcattaacaacgctggaagatagatcataatattcagcaagatttttaccgtggtaggaaaccactcaacctagcggcaacctgcaaccgccatgtcagctgctcattctgcttgttgatttgtcttggcgaaaaaataaaaatatattttaaaacgtagctgattttaccgtttctgttttccaatcttgaattccaaaccattaatactaataacatagatataaaagtttatccataaattacttttgcttgttttctttacattgtacagcttatcagttgtagctcactgaaacgctgttaatttccatagacttgatgtttgctgcaaaactgttagcaaaagtgaattacactagcatggattcgacaaggaaaaggcgttgaaaatatcgcagggaatcatgtatctttgtgagaaggcgaggcgctttatgtagattatattccacggagatctccccagaccggaggctcgaggttgcatatgtatggtttgcttggggcaacgcagccgcaacaatcagctggacacgaaggcctccacatcgtagaccatgctgcttttggagctttggagatggagcaaatcttccatgggcgctggaaaatctctcctaattccatgggcccagcatgctaaacctaggagcgaatcacgcacaggatggatggacaggaccatggataaagaaaagcatcactttgatggcaaaagccaaattccttctccaaagacatgggagttgcagatggtgagatccattcgttttcgttggatggctctaccagtttttactttgtcaagcactactaaaaaaagcatttttcccgacgtggaggtctttttttcgcaagcggacataacccttggaaccaaataaccgcctaaaaaaataaatcgggggtgaagttcgctgtccgcctctgtgaaaatcgaccacttaagcggcaggcaaaccgtatgtggtccgcctgcaaaaattgtgcctacccctccccaccactcatttccctctctcaactctctatctctccctcaacacttgtccctccactaggctgtccccttcccctccctcccgccggaggggaagcgatggcgacggcggcgagacgcgtggccagcggggcgcggggtggcgtcgacgacgcgtgttgcgtggcggcggctcccctcccctcccctcccagatctgaccagagggatgccaggggagggcggcggcggtgaggcgcgtggccggtggggcactaggcggcaacgacgacgcgcggggcggcggtggcggctcccctcccctccccttccaaatccggtcgggggagggcggcggtgacgacgacacgcggggcagcggcagcggctcccggcgcagctcccctcccctcctagatcctgccgggatgcgattttttttgttcgttcattggatttcctgcctgattttcacagtcgttggtctgcaggcggtccgccccccgcctggaaaaattacttttggctgcctgtaaaaatgttttttctagtaatgaaggtgaaggttaaagcgatcaaaaaaggaaaacgcatcgtcctgacacgttcgccagatcggaagtcaatgagcgtgcgctaactagccatttcgatccacgtttcctccccttcgtatcgtcatggagaaggccgtgggcctcagctatatctctccctgctaaatgggagaacagcgcgcctactcacatctcactatgcagataatgccacgatgttcatctgaccgacaaagagagatatgagacacctcgctcgaattcggcattccttggggaaagttatgggcctctaaaccaacatggtgaaaagtcagattctgcggcgccgttagcgacctacaagatatctcatggatttttcccacaaacatcaccagctacccgataaagttcctcggcctcccgctggtgatctcctaattcgaaaagatacatgtccaaccattgctcgataaatgcaagacgcggttggtgcctttgcaaggaaggatgatcacggcggaaggaagagcgactcttactaaatatgtcctcacggtgtaactaatctactatctaacagctttaaagatcctagacgagatactacactcgatcgataagatgaggcggaagttcttctgggcaagaagagacgacacatcgtggggatgtgcaaagcaaatagggataaagcctgcagagtgcagacctaagaacctgggtggccttggtgtgcttaacctagaccagttcgccagagcactgagaataagatggctgtggtacaaatggactaaaccggataaaccttggaacagcactgcgatcccctgtggtcaattggacagaaacctcttcatggcgcgacgataatcactctagggttgggaaaacggcaaccttctagaactcacactagctagaaaacaagatgcccaaagagatcgcaccagtaatttttgtggcttccaagcgcaaaactaggacggtgcacgatgccctagcatccaaaacatgggtccgagacatcaacctccccttcggattaaggcagcggatcatctacgacaatacgtccatttgtggactatgatacaacgtgtgggtcccatgagtgagcaaagggacaccatttacctaaaagctgatggctaatgcagtctgctcggccaaatctgcgtatagactacaattcgttggagcgaccgaaacgatctacaactagactatctcaaaatgttaggcctcgcctaagtgcaagttcttatcaattatatactaaaagtccattaaactttctagaaacgctcttaagccgccacgtgacgttcttacaaatacaattagaccgccacatggcactatttaatcttaccgttaatttccatttaaattagtggacctaatattctagaccgttatattagatatattattttgagaaggtaataatttcctctcataatggggccgagaaaagaaaccaaacataagtatacttcgtatacttcgtgtacggacttacgtgctggaaaagaatcaactaagcttaaaaaaaacctaagtacgaactgacgataaaatcaataaagtaaaaaacaattacgtaacatcaacgaagcttaattaaaagaaaacctacgtacgaactgacgataaaatcaataaagtaaaaaacaattacgtaacatagttagtacgtagtgccataaaaaaaatcgatggtccataatatacgattttctactatttaaaaataaaaatataatactctataaacttacgcaaatatacatagttaaactagatcttctataatataaaaaaatatcctatctttaaattattttaaaattatatatctaatttgtgatccagtcggattcctttaattaaataaactattgatgtctatcttcctaaatacatcataacacatgaggctgacatataataaataatattatgataatatttttaaggaaaaatgacgaattacccttaaactgttatggtcgaccgaattacccccataaacctaaaagctagacatttttcacactcaactattaatatcggatgaaatacctcgctgacacagcttggagtggtggcagtccagtcagtattttcttaaaaagaaattgatgggacccacctatcgtatctctccctcacccatcccctccctctttcttctccctccatatctatcaataggcaaggctagaggcagtgagcaggtcctcctcagtctccgccgacgcgcacctccttgatggccgtgtggcttctcctcaacatccactggcccgtgaagaggacaacagcggtggaggcgactaagggcggtgagcagcagaggcggctcctcctcgactatctcgggcgccacatctgcactccgatggagattgttttctccatcctttctatcacatctcatcgtcacgtgatggctgccagaggcgagcacctgcgttggtcctccatggccaggttcggctgcgccccgtagctctgtctacaactgcatgccatcccaccatagttcttaatcgatccccaccaccaatgcctctctcctgacgagacagaaagcaccaatcaatcaaagaacgacaaggtagatcaattaagagagcaagtgcaggggaatggatgaaggagaaaggaaaagagcgacggggtagtggcgtgcctgctggttggcccctgtagcaaggagaaggagaagagagagagaggctgaggaatgggattgaggaagagagggagagagatagagagggtagagagtgtgacaggtaggcccccacctaatttattttttaaaaagtgctaattggactgtcatgtaggaacaagaccactccaggttgagttaggggtaattcgtccggtattaatagttgagggtgaaagatgtttggtttttgggtttagggggtaattagtacttttttttcctattttaaataatttcacatcatatttcaggtgtcaaatatcacttgacgactatacaatgctaatttaaatctatatacgaaaaataaatgaaaataacacaatttagttgtgtatttttaagtatttgatttaatttaatttgtttgggattaagattctcaattttttttcggaatctttacaactatttatcagtatgtaataagtgggcaacataaatgttgcatagatgtaaaaaaaattgtgaaaaaaatatttcataccaatgatcttgctataatacaaccatttaatccaccatgagatttatggtcatatatctatgtttttctctttgtcaaatagttttggcaacaaatgaacaatcaaataatatgtgtaataaactactcatgatatattttcttatagttgaggaattccaacacatcaagtatcaatttgatggacgtatgttatacaccctattgaagtaactataaagtatacttcaataaattagttattgtaaataagtttgggaaaatagattcattatctaaattaattagtaaaagtgtctcatgtgattatgaataataggtgttgcaaaaaatcaaacgcaaaattatagatatttctcaaaatataaccaacaatgtgatgctttagagattattgcggtagttttttcaaaataaccctttatcttggttaaaaaaatcatgtatagtacaaatagaaacaactccagcattccattattgttccattatcgtgacacatgttcttaattaaatttaaggttatacggttccaagtaatatatccaaaccagatattaacgaaaacatatttaaaatagagtcaagatctattttaaaaatatcatctacatataaacattcataaaaaaattcaagcaatattaaatatgtgtccgcgcatatgcgcggtctatcttcctagctatggctaacaatccaaaacaagcaaacttcaaaagaggggatggatgaaccagcagctttgccctccatgccacgcctcgaccgaatcagcattacacctgctggcaaagcgtgggctgcccaaaaggatctgggcagagatagagatagacaactgtggacctctagttacaggagtgggattgtgggaagcttgctcatctatatatggaggattggtggtacaaaatctcatagtaacctcagtacctcacaccctgaggaaggccctaaaattgatcattatcctggtggcctgggagctctggtgtgaaagaaacgtcaggatttgtgtggcatatagcaaccatgccaaccaccatcatcaccaagatcaacgaggcataaactttgatcgaggagggggctacaaagctcacagagattatcccctccggagagtagtccccattgttctttttgtgggtttgtgttgttttaacatagacctagtaaatatttcgggccccttagaatcacaggaatgaaaaaacggaggaattggaaaaacatataatcttgacaggaatacaaatgtaaaacagaggattgcaaaatacaggaaaaacataggaatgaccgttttattgagccggaagaaaaacataggaatttgaggagagataaaagactcaaattcttaacatgaggaacctcatgttaaatttcctccaaaacttgctgggaagaggcattccatagaaatttcatgggattacataggattcattcctttgattcaaagggctatttaggaaaaattcctatagaaataaaattctttaaaattcctatgaatttcctttgaatcaaagaggggccttcgtgttgacggtttttttcctccttctctatcaatataaaagtgacattaaagcttttggccgtccttaagaaaaaaggtgaaggttacattttggagttatacttggaataactactactcctgtcgtaagtatttgacattgagaacttgagatagttggttaaaattttaaaacttttatactgaaattgttatacacatatacatcttataaaaatgctacataattttgtaaacctattatattttataaatttattttcatataaaatttatgatcaaagtatttataaccggtaggagtttatacacttacctattaaaattgtacatatgcattccttttaaaattggtgaatattggagcacaaaaaaatggcttgaaagttggtaggcagagtgcatccgacattcaatagtcctaatcatttaaaccagcctaccttccaagaagaatataatctattaacttaataaaaaaatataagaaagtataccacgtttgctcttacgtcttagaaattcgtacattaattgaaataaaaaaatagagtacatgtacaatacaatttagaaaatactgaaatgtattaaaaataagaaataattaatattgtgataagactacatatagaaaaatacaatttaggaaaaaatctaaagcttggataaaaacaagtaatattaagagaaagagtccacgtagaaatacaatttagaagtagctagtgtttacattaaaaataattttttatggagaaaagaattcatgtaggagtccaatttgaaatttttttaaactcggactaaaataaacaatatatatatatatatatatagagagagagagagtccacatagaagcataatatcaaaatatcttaaattttggttaattattattagaggagatagctctttgaggagtataatttagaaaaaaaatagtcagtgaagaaatacaatttaaaatatttattaaaaaatcggaatataaataaaaaagattaaaagaagagtcacgtagaaatacaaggtcgaaaaaacattaattttggattaaaaattgaagaaataattaatattccgatgagagttaatctagaaatacaaatacaatttagggagactataaaatgcagattaaagatttaaaaatgattactattgtgcggtaaggaccaaagaacaaaatccaattccatcttccgaggtcctggcagccaaccggagatatacttattctttcatttctttggtccagaaagggctccaaaccttgttcaacccatgctttggtacatattctactaatctcgtgtcgtgtggtgcagcccagatggattgaacttgagagcacagaagagttcctgtaggttacccaacctgctactacatatttcaagactagctaagattggtttaagattgcatttatatcagtgtttagttttgcaagtaggccatctgcttattgttctaaaagatttcatgtcatctgctccagcatatttagttgctatccacctgcatctatgaaaaaagttgccaatgctaaattaatctagccttaattaaatataaagttgcaaacggcattttcttcccatcttaatacaatctgtcagcttgtattcagccgatacggctaaaagaatttcattttctcagagatccggcgcagcagcatacgaattgaatgcacgcgtctaaacaaatactccatataacagtaaataccggaaatcgtatagtaagaacttatatatacataattataaaccattcatttagtaagaagactgccccagcagctgcttgtttaagtcttttaggaaacatatacaagtcagtaacaagaaatctaaaatgagtaacttattaattacaagtgcagtaatcgcagaaaaaaatagtattttgtactccctccgtcccagtacagtggacgtttttgactttgtactttcaacgtttgaccattcgttttatttgaaaaattagtgtaaatataaaaaaagataagtcatatgtaaagtacttttgataataaagcaattgacaaacaaaataaataataatttcaaaattttttgaataagacgaatgatcaaaaaactataaacaaaaacttaaaaagacaagtatgggacggaggtagtaactctattactctatcaccaccaatagtaacacactgctgatataggtgcatgaacctcggtccttgtgaagcatatccccagtaactcagaatgaggagcattatatatgcatgctgagcccggatgatatataattgcacgcatggcatttcatgatgcctagtggggcacatgcgtgcaggtccaacaaatgtctccctcctatgcagggagagggtgcagacagaagcatctccattgccacaattatacctgtagatcgatgcatcatgatgaatttgacatttttattcgatgggcatgtatttgagatattgacattatgcaacatcagaatctacatttgaaagaaagcacttatatcttgccatcttggaatcgaccgagatacgatatacacccttcccttcttgtgggtcctcaacagagagcatcagaatctcactcacctctcaatcttccaagccaataacaagtgtgtacagtagagctcacacaaccacacacttatgaacacgagtacagccgatgccctataaatagccgccaccggagcacaacagatatcatatcaaaacacagcagagatcgatagatctcttctgaagtccaaaaaaaacttcagtctagctgcacactagttagcaagttacttagcgttcaacttccaaagaagacagtagctagctagtttaatcaaatccaagctgcaggatgtcttctgctgggtcacgtagctcgtcccgcaacagcaacatggcgtcagagtggagcaaagaggagaacaagctgttcgagcaggccattgcctactacggcgagggcgcgcctgatctctggcacaaggtgtcccgcgccatggggggcaccaagacagccgacgaggtgcgcctccacttcgagatcctcgtggacgatatcaagctgattgaggcaaggcgagtcccgttccccaagtacaatacacagggagcatggaactgaccgactgaggtaatataattaactactcatcctgattcaatgctctcacgtccagtaataataaccgcgtgttgctaattaacttgctatagctcttcaaagggagtagtcagcacgtgttgtgataagtttagaatcctgctgcttagcaacacaatctgcagtttcaatctagcttaattgtaagctgatagctactgtaacatctcataagaacacatatgcagggagcatattagatgtcagccatggaaatcatgccctagatggttgaacttgagcactataagctaggggttagtcagttgtcgttttctttgttgttctaatttccaaatgcactgcaacatgagagtatctgtactttctgtaacagataaatctggtgaaactaacagctagctcataatttgagcctgtggcaaaccatcatgcacacaaaattagcatgcagttctacgcactatagtatatatgcaccatttcgtgatttgttggtttgcacataggccggtataggaacacgagctagccctaatttggatatatagtgacggtttttcccctaatgccaattattcacgtgtgatctacaaccagaagaataattctctgataccaaagaaaagaaagtttgaatcatgcagtctaagcaccttgagcagtacgttgtgcttaaatcagttccagactagctaacagccaacaggtgctttaaacatctctttttcatgtcagttcatctggcaaattaaaaggtgatttctgtcttttcaagaggcacaagtgtgatgtgtccataggaaaaggcaatttattcaaagttatcctgtactctcttggaaaggggacacaaccattgtacgtaaccctagaagagggagctatatatgcgtacctcattcttctcaaaataatttaatttgtactaaatagataagtaacctcaatataccacacctagctagcatgcctacatagaaagtaaatctattatatactaaaaatccattaaacttcctacaaacgctcataagctgccacatagcgctcctacaaacactcctaggccgccacgtggcactatctaatctcaccgttgattttcacttaaattgatagacccgttaatttagaccattagattagatctattattaaaaaggtgatagtttttcctaaaaaaaaaatgcaactggtgtccctacgcaagtataattgaaaaaaaaaaataaagcttcctgctgttaggcggaagaaaaagaaataaacatctatgtacgataaaaaataataaagccaaaaaaatgtgtagttagtacccttggaaaaaacgaagatctaatgtaggactttgtataatataaaatataatattacataatatatggaagtataggcttgtaaactatatctataatataaatatcaaatatcaaatcaacggtctctacgcattatgttttaaattatttttaattatatgcccaatttatgatccattgtattcgttaaattatataaatatcggtatataaaagtaatgttgtggtcttaaatacatcatgatacatcggatcgacatacaataggtaactttagagactaaaaatctagctatgtggcgctcctacgatcggttctatccaccacgtggtgctctaataaattagagaaaaccttatgaattgtgagaaaaaaacatgcaatcatttttattggtggacctactatttttaaattattagattagatttatttaaaatacatctaacctgctcgaataaaaaaaaccgcgtgaatagttgtacgtatatatacgtacttccgtactttgctactcacttaaaaaaaggaaaaatatgtaattacgattgaaaaaaaaagattagccctaccacggtcccacctaattgttacgagttacacgtacatatgtactgttcacccaaaaaagtgaaaaaatatctcaaatgtgccatacctactactactcaccggattgagaaaaaaattctcctgggcatgtacaaaccccatcatcgactttcacttaaatcatttagagaaattagaaaaataaaatctccacc

SEQ ID NO: 9445 - DNA, 9815 bp, Oryza sativa
gttcccataggttgagacatcatgcccccctgctgctccactctgtgcaaccaggatgttgagttccgccaccacgtcgtcatcgtcgcagccgtcatcagtgaaccaacgctgctccttcgtcacccccttccaaaccaacttctgtcaccattaacaccacctgcaggcaaagaagtcatcgccgtccttggaacccaagccgctgctaccatgccgtcatcttgttgagaccacgtctacaggtgagctcttgatgttcatcctccattatttccttccatttttatcacccggtggtagcgctatgtgttgttgtttcgtccatcacgaaagcagcccctgtcaaccttcctcctttatatgtatttaacagagcccttgccttcttttcttttcattcacacatgtccaaaagctatcgtactgctgctttgcctcggccaccatgcccacagtgtgcatgtgcgtgcaccactgttaatctctctctttagatgacatatgaaccatagcagttggtacacaaaataactccaatcaacctgaaaacacgagagaatattcctttctatcttctattaattcaattttccattcttgctgccacctctctattgtgatcgtaaaggcggccgtcagtcatcaccgatctgtttgcgcaccatgatggtcgctgtcgcaatggaacccgagctgaaccacattgtcgccatcacgttcctatgaatgtcgctgcggtcggtaatctccaatgccctagcagcaccgctgctcttatcctccacttccatcgtcttcacctgcctccggcatggtctctcatcaagttgctattgtctgccggtgccaccgcctcactgttaaacgatccggtgttcctaccacttgtctgtttgtggtcatcacggttccattccaaaattactacaccgccatcactgttttcttcaccggagtagtccatgccagcaggagcacaatcggtgcatacaccatgctctgctctatcttctctcgtggcttgttcctggcgttgataacaacctcgagctcaagcaatagttgttgcataagcatcgcctccgttttcgcccttctatttccccggtgttgtctctacaatattcctcccctcctacgtccaacgttgtcatcctctaccatgaacccggtgtctcttcttcatcccagtgccggtgcccctttaatttttattcccacatgctgagatgccgtcgcattgtttctatgctcccattgctaccgaactactagtgaccatgtcgtcgtcatcatatcgtccactctggagggccaacacagctgctgtcctctcgctgccttaggtcggcaagcacgtcacaccgtcacctctatcattgtctcggagtctggcatggcatgttcgctatctcactcccatcaatcagtgaaccccatcctttagccacgaaaatgattctaataaaatccacaaatgccggaaaatatttcttattttccattcttccaattcaatcttttgtcgatcatatcttcactaatcagcatcaccgctctctttcatgagcctgccatcatcttctcccggtatgctcttgcttctttcacctacttcaatccgaagttttgccatcaccatgccgttgacgtccacgctgcgaggcattatgtcacacacattctggtcaggccagcctcttaaaacccaaaatcaatccaagttgtctatccccacaaataaatctcagccatccacataatcattccacaactctcctccttataaacaattctccattgatcatcctactaacgagtggaccccacccgttagtccaccaaaaataattgttttgtctcataaattccagataatattttctaaatatttctctttctttattcacagttctctaataattgaaacttcgagaggtcacatctcttccatccaaactccaaatcgacccgttgtttttcctaaataattctaaaattgagctctacttcctgatttatttggttatttcatttgatgttatttttctattttttttcttttgtttgtttgttttctcctttttcgatcgtgtagatgttgttgccgaggaggttactgttgcaggtgaaggtttcgtctgaagatctcgtgggtaaaggcaagtgtacccttgaacatgttgatcccaattttaaaaattatcttattttaaattatatgcattgttttgttttacaaattatcgtgtgggtagttataacctacttgttaattatttcatgccttgaattattgttgattatccttgattatttgtcacctagactgtatgagagtcaaacatggggtattggctcagggtagtagatttgcttagccctgctcacacttttacaaagcaaaatataatattgactaatgatctacttatcactattttttttatataaactgtgtggctgtgtgctatcttcttggtggcatgtgttgcacggtgtagtaatgatctggtggaaaatgttttagaccggggtgatggtggatctgtgtgaacctaggaggtaagccatctgtgtgcgtgcttaccgatgacctgtgtggtcgattgagctgtgtgctccatttttgttgtgtgcttgaggtccttagtttagacaagtcgcccaggtcagttaaggactttacttcatgcgccattgatctgagccttaccgtgcaaccacatgtccttatgggaaggacctagctgagtacactgcttagctcttgcactggcggcccaggtggctagatgataggtttttggattgtaccatgggacctttcacctgtgtggtgaaaggaggaccgcccatgggggaagccggtgttagggcgaggtagaggaaacgctttgttactctttggtgtttagcggcactgaactgtatcttgtgggtaaagttgtacaacctctgcagagtgtcaatctattcgaatagtcgcgtcctcggttatggacatgctcggtgatttcacatgaggggtagatttgtgaaagttttacttttgggaaagagctgtgtgcaggataaattaatgaatatagctgtgtggtcctgtgtggacgcaatatcctttttgggttggttggttggttaaaaataccgtgattgcaaatgttgtttaaatgaaatttatatctatttattgtatttaaattcacaaatgcctttacgcaaatgaaccctagctttcctttgaagccttgtatcatatattacatattcccgtacacttgtgagtactttatgtactcacccttgttgtctcacaaaatttcagagaatgccagttgtttctagaagttctgttgctaaggatgtcgaataggttgcgtgccccagttgattgcctatggtgtgtcgttggtgcctctcgcttcttgtcccactgtttatctctgtttggccctgcgtggcaaagaaattgtaaaatctggtcataagaccaatgtaaaaattatatttgtttcctatttattaatataatcgtgatgtggttgtgatattatcttttgttactgtgtgtgctagcgttgatctgggactagcacattatacacagagggatcctagttggggtcccgacatgccgaatccacttcgattccaatgttgaacttggttcatggtttaccaaatttggtcattaacagaggtgtaccagtttacctaccagacacatctctctcacacgttaccatgtgctacatgccaccacgtcatttggacggaagtcataacaaacccatcgcttaagaccgccctaggtcaataagacaatctatgccctcgtgcatcttaaacccgtctaggacttcatttgcgccctggctaggaccttatatgtcccaatccgtgtcttatttgtttataattgtggtaaacgatgtattaagccttacccattagacatgtggttgtacggagtatactttgcaacagagtcctaaagactggtccttatgattgccaatgtgcaactaacaaaaccaaacacctcgagctaagttgaaaacaagtttgagaatattgaggtagagtccatcaggtccaggctaacaagcctctaatccatcattaatcaagattatagtgtcaatcctaaagtctatatcattacaaattaattactccttcgtttcatattataagtcattttgactttttaaagttaaacttttgaaagtttcaccaagtttacagaaaaataaagtaacatttatagcaccaatttagtttcgttacatctaacattgaacatatttttgttagtttctttgttctgtgttaaaaatattactatatttttttatagacttgatcaaatctaaagaaaattaacttagaaaaaagtcaaagtgacttataatatgaaatagaggaagtaaatgtttctaatagagcattgctgagtataatgtaagcaccccatacagagttcttactagttgtttttttacttaggattgtcaaacgtaattagataatatcaattaaatcagatcataacaaggaaatataggaaaggctaagtaaaatagttataacgtggtatatttaataaagcgaatacaataatttaaattaaaatatttttcacaaattagcattcaatatgattaaggagagcctgacttaccttgctcaacgaacggacttaggagactcatgcaatggactggacttgcacttcaggaacctccgaacgacagcaactgcatgaacgacaaaacaaggctatagctctgagaaaaaatggtaacagcacatcaaagcaacatacatgtattctttaagttacaacaaaattaagcaatttaaacaaggctatagctctgagatatggctatctgaagtttatatacagtttaattggatatttccgaattgtttaattattattataccattaaattatgtgtaatgcattagccctcgaggagagaaacgatcaaacgactggcatgtgagacccacaggtcaaacggtagttcaccatggaccggtttaccaagacggtccacgggaaagcagagtgagacccacgtataagttttggagaagagaccgacgagtggatcccacgggacaccatctaagcagccacatgtgtgaacacccagctacacaagggagggatgcgacaaccggcaccggcggcccagcagtgcaccgtatggcgaggaccataggagtgagggatcggagagcagaacctcaccacggacacaacgacagttgacgcagcgaggaggtgacaggcggcgaggtcatgaccacggcgagcgcgagcaacaatgacggcgatgttcagcttgacggaaaatccctgtacgggactttttctaataatttagaattcaaaattaataaatatgaagtcggatctatatatctaagactctcaccttcgtattccatcaacataattaaaaaattatattaataattataaagcttccataattccatatataactaacatatttataagagtactgctacacgtactaaaatttttttacaaaacttttactaacaaatttctcaaccgtttaatttaactagatggaagttgcaagaaatctagatttactcacagcttgacacatcagagtttgtaaacattttgtaagaaaaaattagtacgtatagacttttcctatttagaatataatcataattttaatatttattgtatctggtaataatagcacgtaataatagctctcaccttcgtattccatcatcataattaaaaaattgtattaataattataaagcttccataattccatatataactaacatatttagaatataatcataattttaatatttattgtatctggtaataatagcacgtgcaacgcacaggttagtgactagttttattaattctataagcctactctcactctttaaaattataacaaaatttggtaaggctttaaaccaaacacgtctaccaaaatttcataaggccaaaatttagtaaaatttagcattggtagggttgaaagtagctgcaaagtaaacaagcccgtatagtaaaaattctgatatttgacattgcccaacatatgtagtaactatatacatatataaatctgtacagtattataatacaagattatgatcactcacaactgcatgcagggggcaccacaaataagagaagacggagcagtgcctttcttcttcgaacatgtacaggaaattcactaggaacatcagtgatcacagttaaaacaccattcctctaataatcatcacatcagcattcgcagttagacgagctgctcccgaagcagctgttcttgggcgtcatcttcctgacgctgtcctgcaggaactggagcgtgctgggcgagatgtaggaggtcctgtccatggtgttcaccttcggcgcctcgagtatggttcttggaggagacaatgcatactgcattgcccagattgcaaggggccgcatgtatatcagcgacctgtagtggccgtcgatcgtccatgcttcaggggtttggaaccagtacctggttatgtcgaaaattcgtggttagcagaagcggagtaaataattgcatctttttttaaaaaaaaagtagagtggggattagagggatatattaaaggttatggctcgttttcttttacatatgccaccagtatatcattttcatggaaatagaaatcgataaatttacgatggaagttcttataggaagttaagaactagcatttcgatatgactttgatcttaggcaattaagcagctgcagcaagaaaagcgaataaactctaagaatagtccccaaactcacttcctaaaagatgaggtacagtgatttgtatgattatatctggcaatcactgaaaatataactgtcttatataggttaagatagggcatcatcttacatctatcagcagaaaaacacaaagcgtgttattggccacagatgctaggacaggaaacataaatatagtgaaacaagagggcatacccatagccttcttcggaccatcctgcggtgaaaatgccttctgcagtagtgaaagcctgatcgtccattccatggagcagcatagtagcagctaaactgtacgttactcctgtccagatttctcttgactgcatacaagtctcgtctaccttaccatttggatgcataccgttcacagctcccatacgccctccttttaccctcatcacattatagtcaaatattttctgaagggtgcattttatcctaccctcatcaaacagaggcggcaaacctgacgatgcagtataccattgtccagccagttgatccgcatggatggagcgactgttgtaacttgttccgctgtcataattaaaatatgaaccattccataactttgcttcaaatacgggcttagcttttgcaaacttcaacatgcacctctcagcataatcatggtgtccaagggtgcgggccagcgctgctgcagtttgaagggcagcaagccaaaggcaaccacagtaggcacttactccacgaactgtccaagcatcatatgtttgatcaggaaagccatcattctcaatcataccatcatcgtcatggtcaaactgttccatgtactccatagcagtacaaaccgcaggccagacatccttgccaaatgacatgtcacctgttgccgcgaaatctctgtaaacctgtagcacgaacttgggattgagatctttccatctacttgtgtcatgtatgttgtacgcattcaattcatgccaaggatcatgggccccaaggtcatgggcaacagcaccgattactttgcgagtgccccaagtaccatcagcaagaaacctgactctacttttatcttcgcgcagaacagctgtagcaaaatcacgttgaatgctcagctcaatcttaggaaacagttccagaagagcaaaagaggcatagaagtgtacatcataagtgcaccacatgaagtactctattccttccaggtataaaaacttccctacattttccctgtcatcaattatatgtgggctaaaaccaatgagtggaactgcagaattgcgactgctatgatgaagtggcaaatcattgtcctcagatagccttgagttcatcatttcatcagcatcagccatcaaagatgcactatctgtgagtaaaaagatacatatgccaaaaaactaacatcattacataagtaattaagatgctatataacgtacgcatacagaaaactattctaagtaccatcaccttcccaagtgaagatataatgggacaaaaagaaattcatgtgctagacaaagaactgtattaacgttttccccaactgagcaagcttttagaacgattttccttcttgttccagagtaacttgcatgaagcaactatcttgctacataaaacaatgagagctagttcatgaggaactatgcaatgtctttgtttgttccaaaacagctgcacattgcaatagtactatatttgtatggaccaataaatagaaataatcgtgttgtacttcattgcaaattttgtatgaatatagatccacacattgacaattgaactttttatcctttatactattctctctccagatgggaaaattgaaaattgaaagcagggagaaacaaaaaaacaaaatgttaggatggtttgctgttgacactcgcagttgggatgcagataaggacatttccgtaagaaaccattgacataaacaacttgctttctatctccaaaaaaaaaatgaaaaactgaatagtaattctattccattggtttttatgttcaaatccctcgagtttactatgtggcttgcaaaaataatttgcctaagagaagggaaaatgaaaacagtactagtaggaagcctatgcaagacatacatacctatccaaacagttcctccagcaactaggaagtacagctcattgaagagagtaaccttgtacctgcaagaatttaagcaccagaaagcacaaggatattatcttttgtgtagactaaagaaaactaagaacttaacacaaagctctataacttaacacaaggataatactgccttgcagcagccaactggtaagtcatgtacaagtacacaccactccggaaacctctcatcatggagaattggcctctgccacttatcaatttcctcttcccagtgcttatactctggcaatcatatcaataggcatattttcataagggcgtaacaggataaagaaataaatatcaaatgggatgaaagtagcagctggatgaatcaatcaatcaaatcagggtcttcaagaatgagaagacaactataatcaccataatgctaaatccatctcaatatttgcaaagatgtgtatataatgtataatagaagtttatggaaaacatactcatcaaagaatcttgcaccaagtttatagctgaccttggagaagttccataaaattttgtatacctcctgccagcagggaatgaaatagaattttatttaactagtggaccttgtaaaaaaacagatattttcgatatagaaatataaatgcacatcatttggaccagcttagaagaccaaaaaaaaaaaaaagataacatatggaatattctgtaaaattaaataaattcagggagcaattcaagaagaatgccgtgtggcttggtgggtgatgcgccgatcccctgcatgttcaagataaaatgcatatagatatacaaaatagttaaggccatgcaatagtatacatgggctgcaggaat

SEQ ID NO: 9446 - DNA, 12816 bp, Oryza sativa
aatatcgggtctagtacctggactagcctcatcaaaagaaacctcgcaagtctccacgattttgttagtccccaaaataagtacacgatagccacgagtatgtgcggggtaaccaagaaacaatccatcggtagaacgtgcctcaaacttatccaaatttccagatttcaagacaaagcacttacaaccaaaaacacgcaaatgtgaaactttgggttgatgaccaaatcgaagttcataagaagtttttctaagtttagatctcaagaaaactcgatttgaaatataacaagcaatgttaatcgcctcagcccaaaattttcttggagttttatactcatccaacatcgttctagccatctcaaccaaaacacgatttttcctttcaacaacaccattttgttgaggaacacgaggaaaagaaaattcatgttcaagacctctttcgttgcaaaattgttcaaaagaagcatttttaaattcaccaccattatcacttcgaattcttttcaaagaaccaggaaattcaagatccaatcgaagaaacaaaccacgaaagtgttgaaaagcttcgtccttagttgccataaagaaaacccaagaatatcgagaaaaatcgtcaacaataaccaacacataccactttcctccaacagattgcactctagctggaccaacagtgtccatatgtaatagctgtcccggtgcatctgtcatcacagaaacaataggagcatgtgaagtagaaaccatcttagcattacgacacggtgtacaaaccaaatcaagatctttcttaagtttaggcaaaccacgaacaagatccaaaccacttaacctagtgagataatcaaaaccaacatgtccaagtctacgatgccaaaacatcacatgtttatcaaacttagcaaccaaacatgttatcacaggtgaaacaggattttcaaaatcagctttaaacactcttccatagcgagaaatattcaacacagaatcaccacaagaatcaaaaactttacttccagttttcttaaagtgaacctcaaaattttcatcaacaatttgtgaaactgaaagcaaattgtattttaagtcctcaaccaaagctacattctttaattcaaattttttatttactttaaccaaacctgtagcgagaacggcacttgtagcagcatcaccaaagataatcgattcagtcttggatgccttctttagggaggagaaccaatttttatcaccggtcatatgccgcgaacaaccggaatccacgatccacacgttctccttctttgccaccaaagcctacacacaagcagaagtcgaaccctcagtactggggttagatgataataaaaatttagaaatccagtactgagacacacgaccagaagatccaataggcatatatccacgtgcaaaatcaattttagaattttcagaaaaattcctctgaggccggtctgatcgaggtacagtggctggtctgaccgagggtattcagccggtctgaccgcgggacccactgcggtttgaccggtttcctcgagggaaaacccgatttttgccactttgattttgcaaaagcaatttctctctcctttttctgtttacgagctaatctgaaacaaaaaccaacaatatgtccatctttgccacaaaaagaacaagtatatttttcacgatgattagacacattgatagcattagaagatttagcaacacaagcaacaacaggagattttccatgcacaacattggattttgaagaagatgcactcatagtagacatgataccagcagatttaaacacagttttgttagtatcaggtttaaccaaaatctcaccacttctagcaccagcacctaacacaacaggaggatgtctagaattatgagcataaggattaaaacctaaaccacggttatgtgtgctaacctttgattgatccaaaatcatgttgaggttctttttaccatcagaaaatcttagcaaagaatttttcaagtaagaaatctctttttccaaattagcacaattttcacaatctaccatgacacctttgcttttacgacatttagggcaagaaagcacttcattgtttttcacaatatcttccatgtactcaacacgacctaaagcatcttttagtttcatcttattcaaattacatgttgagcaatccaaaacatcatgaggttgttttaactttttagccgaaatcatgttaaacatcaaactagcatgaaaagcaatttgatatttttgcaacaattttttggttaaaaacaactcatccaaagtgcgtgtatgcaaaacaaaactacaagcaagagaagatctatttttcaaatcatgtgcagcattaacatctctaatttttgaaatctcattcattaaaacctcacaattttcacaatcatcatcattaggaataagagattttaacctatcaatttcaaatttaagagatttaatgataaattcctgttttctatacatcttctcacacttcttattttttgcactcaaaatattaatagcttcctcaaaagcactcacctcattatcttcatactctatatcagatttaccacgcgccatgaagcaaacatcggagacgttatttcccttatcatcatctccactttcaccatctatatcacttagtggctcgaagacggcgcaaacttgttgaaaagccttcctaagattctccatcttcctcccttggtaagaacccttcgacttgttgttgttgggcttgttgttgttggtcttctcactatctttgtcttctcttttgcctctcccaagcttaggacaatgcgaacgaagatgatcaattgaaccacattcaaagcaacgatttggaccacctcttttcctgttcctggcattattcatagctcgagcaattctgttagcaaccaaagccaaatcctcctcctcgatttgttcgagttgatcatcggatgtggcattaaaaacagcaagaaaagaggacttagatgaagaagcatcaacatccaaagaggaagaagaagaaaccaacgcactagacttagaattagcttttcgagaaagaacattcatctcatgtgttttcaattttgtataaagtgaatccaaagtcaaagtagacatgttaacagactcctgaatagatgtaactttcatctcccaaatagacatgtcgagaccattaaaaaagtgacgagaaatctcagattgtggataattagcatcataaaaagaatcaacagatctaagatcactcaaaattttattaaaccgagaaagatagtcatccaaagcttcttcaggtttcatctcaaatttaatatactcctttttgaaaagatctcgacgaagctctttaatgttatttgttccttgatgaaaattactcaaagcaacccaaatctcatgagcagtttgaagatgagcaatacgatcataatccgaacgagaaataccactcaaaagaatgttacgagctttgcaattttgttcaaaagcagttttttcagcagtagtattaatagcttcaggaatcacataagcattagaaacttttctccaaatatcataatcttcagccataatgtaagattgcatcctactacaccaatgagaaaaatctgttccatcgaaaacatgaggcttagttgaaaacctagcgggagtagccatggcaaaaactctatatcgataaaaatctaaagaagaaaacaaggctctgataccacttgtaggatcgaatcacaagaactaagccaaccagaggggggtgaatggttggtatacccaaaaaccgaaaacttttagcggaaataaaagttatcctcgaaatcgatggatcgcggtctgactgaagtagttgcaccggtctgaccacctgatgaacgtcggtctgaccgatgtagatcgattggtcgaacagcctgccgcgcctgtcgccgctgccggtctgaccaccgtgtacccgccggtctgaccatcggtagatcgccggttaaaccgccgaaatccggtaaacacaaatcgaagaactcttaaagtggatgacgactttattgattctctctgtgtttacaaagtgcaccaacaacactccttacaaaaatttctgactaaactcgaaaccctaactcaaaactcaactcaattgctctctaaagcgataccgggaagcctcacgctccccctctatttatacatgaggtaggcagcctaaagccacgaaccatactcatactaggagtcctaaacaccttaggaaaccctctagtacaagaaagaaactttacataaccaatcgtaccaaatttggactccttccaaattcgactccgcatcccatatgcacacaataactccatcgtatgccatatggaatctccatcaaccacgtgcatcaactctagccttagtatcccacatgatctctgaccaccacggacgtcgtcttatccccaagtcgactcccggtccatcaccgcaaatactctcccgagacatcgagtcacctacacatggaacaaacaaagaaaccatattccgagaccaagctatctccaacttgactcattagcagcaaataatagtattacatacgtatagtatccatctaaaagtcataatcatgaaataaactcggatatccaaataaacaacccgaaaccgaaaccgacacagtgtcggtcggtcagaccgtgggctggccggtccgaccactcaatcaccgccggtccgaccggctaccagagcccagtctgaccggtcacatgaaataataaacctgcgatcacctgtgaaatccaatcatctccaaaaccacttcgtgaataaattccaaataacaaaaccaataatctccaatgcccaattgttcatcacagaatagtaataaaaaactcctttgattttacactattgaccgacgtacatgtcccttcttcttttatgtgttcatcatcgtcaaccattcgtgacatggccacatgtcagccagtaccctccatattttaatgtatgacgtcgttgacttttcgaccaacgtttgaccattcgttttatttaaaatttttgtgtaaatatgaaaatatttatgtcatgcttaaagaacatttgattatgaatcaaattacaataaaataaatgataattacataaattttttgaataagacgaataatcaaacattggacaaaaagtcaccggcgttatacattaaaatatggaggaagtacaaaacaaaacacctccgagggatttttagcacaaatgagcagttttaactggatcaaattgacatgtggttccaaaatgacatcatggtgaaagttcttcaaaaatggcatgtggttatttgaaacgatcgtcatctttgtgggtagaatgcatgcttggcttcgaggctaataagtagagacgattggttaaatatactactttttgtgtatatttgtctattcgccctccttttcttatcgaactctattagtctccatttggttgtttcattagaatgtaaaactgtttggattagagaaacttccttgccaatgcagactgaactaatagtggtgagatgccacactctcgcatctagagttttgaagaaaaaaaaatgtgatccatttggaaaaccggtaaccagataaaagtttcaatccaaattatttaataataaaaaacggttgcaagaggaagttcatatcttcagtggcggagctagaaaatttatatcttggatcaattatcattactgaatatttcagtgggatcatttatgcaaatttgaatggatttatatggaaaataaaacaaaagattctcaaaggtgattgtgaaaacgctatgggatcaaccggcccgacatcataatatggattcaccactgcatatattcttgtggaatatatacattattatatctaatcttactgtttcaccaaacatcgattgggctagcctcgaactaaaggtgacaagcgcacaactccattttttttcaatcatttttcctttttcgccactgactgtgtgtgccacctttttcttttgttttcttaattactccttttctccattataaatgtactactacctatgtagtgcgattttatatttaaatttgacttattgcagatggtacgccgacggatctcgaccaataatcggcaggatttccatcccacagctcgcatctgtataatctgcatatcttataggtgtagtatgtaggaatttaaaatgtgctgcatttaatttctacgtttttcactttcctgcattttgtacaaccagtgtgctctaaaaaaaaaactactgttcctgctttgcggaatcacataatgtaatgcaagatgggttcgtcgttcggcgaacatagtagcacacaggaaggtgtttcaaacaattgtatcacgaccaggatttctgtccaccgggttttcttttgtcttgctagtagacgattgtaaagagtttgagtgactcctagctttggtgtgtaaccctaaacataatacatatggctcaatgttgttgcatactctctccgtcccataaaaaactaacctagtattagatgtgacacattatagtactacaaatctggagataccactgtccagatttactgtactaaaatatgtcatatccagtcttagacattttttcgggatggagggagtatgttgccatgctacacgcacgaccaatataaatgtgtgtatttgactctcctggtcggttagtaactatgctactgtaacaatattttagtattcttatgcatgcacctgaatagtactagcaatcagattgattcatgtacatatgggccccatacaaaggacgtacacgtgatggagtatttccaccgcgcatcacacaatggcttctgcatgtctgcgcccgtgtggaggagggtgcatgcgtactgcggtgccttgcaggggagcgcacggcgacgggatcttcgtaggtatcgcgccgatcccgtcgcgatggcggatggtgtaccgatgtatagcattcctaattcaaaatagcgcaatgaccacgatgaataactcattatggatagtttgattcttggaaccaaacaatgcttccacacgccactagcccactagctctaggtgtctccctccttactcttaactattacttccctgcgcgtcgctccaaggcaaggggcgacacgggaggcgattcttcccccccccccccaccaccccaccacacctcctcctcccccgcctcaccaccgctagagcagccgccggaaaccgtgcggctgcaaggacggcggctgcggggcctcaccccttctccatggaggccacggaggtcggcacccacgaccagtctggggacgacggcggccgcgaggggggtgagctggagctggcgcgcctcgtcgaggtcgggacgcctgcggcgaggagggatgcagtttggcgaggaggggagaccgcgacggtcgtggtggctggctggtgccggcgtcaagctagagggctgccggcatacctccttggcgtggcagtggctaggcgccgtggccggcgatgggtgacgccagggtggtgtgggaagcagcggatccggagtcccctaggccggatccggccatcctcgcatagatctggcgtagcagcggtgcgacgcggcttgtggcggctcggcggcgtttgcgcggcagcaaggcgtgcggccggcctggaggtgagtggcggcggcgtgcgccgagccgggcggcggcggaggcggctcggaggttggaagcggcggtgacggcgacggctcgggggcgtggcctgccccggcggtgtggcccaccccatggtgctggcggtggtgctgcccgggggcggtgcgctgctgtgctgcctggccgctcggcggtcggtgcagccctttggcgcggctaggcctcggcagccgggaagccgtcacggtgaccttaaagcgggcgccggagccagggcggccgcgtttccggtgtcggcgcaggcccagatggtagtgcaaagggagctggcagcggtgggtcgtctttctcgttgccggtcggcaccctcacccttcctagagctcctccccttctttgcggggagtttctaggctggattgaggggccagcttgtcagcgggggaagctcaggctgccgaagcaatgccacctagtccagtgttctccttcggccagatctagcgaagaggccggcgggtggtggaacggaagggtcctgggccagctctcagcgatggtggtttgatgaagtcgaccgacggcggggcgtcggtgcggtgtggtggcagtcttgttgttggcaggattggatgctggctggcggatgggcgtcggtcgggtgtggcggaagccatgtgtcctcggtcggattgggcgacggaccacggcggtaggggttccgagcgagagcttagcccaatttctttgggacaaaagtgactacaccttcgggtgtggtaactctcctgagggcattgttgaggtacccctcctcccgcggcaaggagctctgggtgaaaacctagtccagttttttggacggatgatgacggcgtctttcggcgttacgaccctcgtgaaggcgtcgtttttgagtcttcgtgtcatggtggtgttgttggcccggtggcgatcggtctagcatagtgatggtcggttcgatgcttagcttctctctctgtagcgtgtgtttggtcggttggcacatggtttggagcgtgctctggtgcacatccttcctcgacagccagccgtcgatgtaaaactttccttgtaacatttttctccctatcttaattatattgaatgacctcctttggtcattccggcaaaaaaaaaaaaaactattacttccccatcctaaaatatagcaacctaatattggatttaatataacctattactataaatctaaatgggatatacttaggttcgtagtttgagattatatctaatccggtactaggttattattatattttagaatagatgaagtattagatagtctttgcctctccttaccgtcaatcctccctacttacccattggcattcagctgtcagcacagcttagcatccttgaagtgaaagtaggtggctccaaatcagccggacagcgacttcaactgataaggtacatttgtgaaaattacaccaagactaccaactgattgacctttagcctcacatactctacatgcagtaatcaagtattaactgtattatgtgtctaattatggatttatgttaatgtaaaaaactgcgtggtcaagttatgcctgattgacttaaaaaaaagtctgaattgataatagcacttatatttatgacaacgaatacatacgctgaagctagctcaaactgaattctacactagataaattattttcatgaaatgtgcattaagcttagcagatgaacaaaaaccacctctactgaaggttggatggatcatggctggagtgattaatcaagactgttgcaggagtcaaacggaggatgatatcagactgattacaagtttctttgtgtggtccagttcctggattattagttacccttcaagcaaatggcattcaaatcaaacgggaaccattttcagatagctcaatctttttgcatcgtatattgacgtcgcattcacctttttattccatgatttgacagaatgagtgtttctgtttctattgttacaagattcaggcattccgcacacatcgtggataattatttatcaacacactataagtttacaactcgatgacaattggtgagcttgtcagatcaacaatcctagccatttcgccgcctccttttctcccaagacgacgagcaattggggtaaccaagtttatcacatctttctcaaggaagagaggagcagggccactctcatctgacgatgaactcctcccaacatatggaaatggagacgaaatctgtcctgacacaccgtctagtattcttccaccctcatcatcactggacaaacccgacgaacatcgaggcgatgttgccgatccgtccgattcccttgtcgtctcatgaattccactccatgacatgtaaccaagctcatcagtggaacattcagcatcactaactgcagaggctgcagttctggtttcatgttccaatggttgtgcttcaaacaatgggttgtcttcttgtcccatccactcatcatgttccgatgattcgtccaatcctcttgcttctgctgctccaaacacactccaatcgatcggagcgaaatcgtcgtaatccgattcattgcctgcatttctaatttcttcttcaggcaattgaaccaaaccatgctctgaaactgaaagttcgtctcttgcaggcgcatgcgcatcatcaggttcttgatgattcttcttcggaggcggctcgtcgacgttgttatcctcctcagaggaaacaccatcggtgcagtactggagatcctccagcgagcagacggccgtcttcatgtggcccggcagcggcgggcagccggcggcgaacttggtgttcttggtggagaagaagttcaccgtcaggttcagactgaacaaacacaatattcagcaacaacaacaacaaaaaaacattcagctacagtttggttgcattcagttcagagacagccatgatcgcgaagaacaaagtaaggaaaacttacttctcccaggaggggaggttgagcatggtgtaggcgagcttgaccttgctgccgacgccgccgagcgacttgaagctcgcggcggccttgcgcacggccagcgattccgtcgggtgctgccacgcccactcgaactgaaatcacaccataagattttaatttgagcaagaaaacattggcaaagacaagaacaagaacaagaacagctacacctatctccatgattgatctcccccaaaagacaaatgattggattggatcggattttggctggattacctggagggcggcgacgttggtggggaagccgtagatgcagaggaccatctcccatgggcggccgcgcttggtctgccacgcgccgcaccggatctcgccgttgtgctgccggatccgccgccgcgggttcaccgtgaacctgccatgccagccatccaatcccacgtcaatcgcaagaagaagaagaaggaagaaaaccgcggcggcggaatcgcgagacgagacgaggagccgcgtcggatgtcgtacccgatgtaggtggagcccttgcggcgcgggcagagggaccggagcaggtagcagcagaagaacctccctcctcctcctccgccgcggccgccttcctccgccgccgccgccttgcgtggcctcttcttacccttggccgcctccgccgcccctcctcctccgcggcaggcttcctcctgcccgtccacggcctctgccgccgccttgcgtggcctcctctttccattggccgccgccgccgccgccattccgccggtgtgatgtgatgtggtgtgatttgctccgctctcgttgattttgaccgttggaatctgtctgggggaaaggggaaagagccgttggcggatgcggggggcaggacacttgtccatatatgggccgggccgtgttaagttgggcttacgaggtttcggccctgatcgaaatgttttcttgtgggacaaaaagttttattcgtattgcaccctcctttttttctgataaaaaacaccgttaacttccaaacacatgtttaactatttgtctaatttagaaagtttatgcaaatgtataagtgtcgacgagtgatactcgcggaccggatgagttgagtattagagtacgttggaacgagagtttacgtagtatgacatcaagtagacaaaagataaagattatactggctcagaccccttgtcaggtaatagccttaatccagtttatatgggattgatgatgatgagaacagattacaaaggaagtagacgaaacagatggtaccgatgggatcgtagtcgatgagcttgacgagatctcctggcgacttggctccgcgtactccggcatcgtaaactatgatgggtgtgttggcggtgaaattcgatgccttacactcctccctgggggtctctttaataccgtggatcatgttgaccccctaagaaagatctaagaatatttgatctgataatctgatacagtataacagaaatcatatcccctccaagtaagactttggaaatcgcttatcgcttaattcgtagagatattttccataacttaggacggattcctaacggcgtacatatataaagacgatccgtgtacgtgaaagtataccttatcggtatattccataagtcgtaggatagaaggtataccttatccataaccctgacaataaggtataagtagaaaaactcacaacaaaattaataattaattataattacatatttttttaataaaataaatagtcaaatatgtgataacaaagtaaatggtgtcatctattaaaaaagaagatataattactttagcagctgtgatatcgggcgtacctcaacatactcatccaagccccttctcacaaaaaaaaagaaaaaaaaagaaaaatactactcctcgaaacttgtaaaacaaaacaacttattcgtacctgattaattaaatattagttcaagaagatttgaaaaatatattaatataatattttaaaacaactttcttatataattttttttaaaaaaacatatcgtttagcaattcagaaaagctagcgcgtgaaaaatgagagtagaagttgaaa

SEQ ID NO: 9447 - DNA, 44349 bp, Oryza sativa
aaaagggctaataaactaattaatggatatatgtttgtattattaaaaagtaaccatagtaaacatagataaatgatggcccaaatgaatttccatgtatgtttaggatggattttgtgcgaatctgtgtttaccatgttatgccattgttgttataggtaaaacaatgtagagatagatttaaagaggtcgggggcgaaaataaataacagttggaatatgagttaagaaaagtgctcagttaatttatccttcgatataaacgacataaaaagtgcttttatttttaaagtaagggtagttttttttattttggtttcattttttaatatctaagttaataagatatccgtgtaatgtttagctgtgctatgtataactgcattttttttgcatttttttatcattgtgggtaacagttgtcgttgtatttgcgcaggagataatgatattagattgcatgtaaaaacatggatctatggttagattacctagtaaaagatgacttgcgtgcaataactccaagatcttgcaatagacgaatttttacatcctgcgacataaaaaatatgatttgtcacttatctgtaagttgaaaggtaataatagaaaagggtaaaaagaagaacaacaaattatattagcgttaagataagaggctgtgagatggagtaatgatttatgggcttggtttggcaagggtagatctgtgagtgggaaagcgaagggagggattggagagatgcttaaagaagcgattaatcagtgttcagtgttgattttggtgatggtgttacgggtgttgtgattttaagcagatgagaaggatggcttgccgcggtagctgaagtagcgttggaggtaggggttggaggaagaactcactatttttttttttggagtgcgatggctggcgaaagagacttttcggagaagagatttcggatgcggtggagatgaatgggaagaggtgaggttgcgggcgttgctgttggtggaagagatgagaggagcatatactccctccgtccaaaaaaaactcaattcctgtgtttccgtgtctaacgtttaaccgttcgtcttatttgaaaaatttatgaaaaaaattaaaaagataagtcatgcataaagtattattcatgttttatcatctaacaataataaaaatactaatcataaaaaaatttcatataaaacggacggtcaaacgttggatacgaaaaccgaagaattcgttctttttgggacggagggagtaagatttatgtggatatggagaaggagaaggtaacggataaggataaggaatcgaatatttttttagaaaaataacatctgctgcgtgatttcgatgcagaggaccggtgggtgcattgatggccatattggtcagagtataaactaatttgtgcagttctaaatccgtcctaaaatatagaaaattttaattccttatctattgcatgattagttgtatttttgttttgcatttaggaaattctgttataggatgccgtgattttatggttctaattgcaacttactgtacaaagtttttttgggaaggcattttttaaattagaagtctgcttatgaacattacatctatcagtataatagtttcttattaaataaggaaaataaattttgggaaatgttggaaacatccttaaagtcaaatgttagttttttttattctctctttttatacaattcagttatcaacacgaccacacatcctaataatttgctggtacttagtggtttttattatttcacgagtgccttcttcgatttgaggtggatgagcaattgctacgagtatgtggttgagttgtttattgtacgtgttgaagtcgaacttgacgggtatgcgcattggttttaattaaatatattattttttgagacaatgattttaaaaatggcataaaaatcatccgaacgtgagaaaggggcatgacattattggaggtcatctgatgattgattaacttgacgttaggaagcgcttttatatgtgattattgtctgtggcgaaagtgacagtcaagggaatggcgttagtaagtagcgtgggaagagggaataaagagagaggataggtgggagagttagcaagcaagacaggtgaatatttctgacaactaatatgtttcttaggctgtatttaattgggtattattattttaatggatatggtgtttattaattaatgtataatctttaatattgtattgttttagaaggtgattagcaaacacatttgcaatgtagatgcaaaatagtagtggaacatggggttctgcatatttgtattgtagatgcaaaagtagatgagaaaaaaatatcccgaacaatgcttctctcacatccacatttcacattcacattaggtgcacgaaaagttgaaagccaaaacaaacctctacgtacttggtaaaatttcctactgtttctatagctaaaactgcttactgcagcgataacactaactaacataactaagaaacagagacacaaagataatagaagttgaatgtagaataagcatatcatctttgttccagataaaatggttaaactctacaggcactctcagtagcttataaataaacaagctactgaaaatagagaatgaccttcagaaacagaaacaaaactccctctcccattgtcacatccattggcatgttcaccccttgcattcttgaacctcttgatcgtccctctccatggttctgctgaacaagaagtcaattaattaagctccatgacatgttaaagctagctcaccgaagccatgtttagaagataccaacatgtcacgtgtgaatcagttagagaccatgatttataatagcaaagcattttgcattgataggatcagtgaatgtgcattgcagaatgccagtatgcaagaaaaaatagggacaaaaaaaccgtactgtactgcttaacaccttccccagaacaaaatgattttagaaagatttaataattatcaaagttagtacatgtgcttcaatgtgtgcctttttgttttcctatatcagtcattttagagtgtggggagttcatgcatgtactcattcactattttatcccaggtgagaaaccatatctgaacacacacttgaacaaagttagataactatttatcgggaaattgatgtactcaatcactgttatgaaaagcaagaaatcactttgaaacttaattcaagtaaaaaaagttctatgttgaatactttaacttggctttacacatcctaaaagttcaacaactatttgaacatatatcacaaaaagaactcgttgtaattttattgctgaaatatcaccttgtcaagtaagaaatgccgtaaaagtccatggatgacgtgctgcttaatttctcatgctaacaatgttaatagttgatgaaactacatggcgatatttgcaattaaaaactcatatatacatgctgacaaaacttacatggtcaatgcaagtcctcatgttgtcgttttctaactaatggctaacaaaactacactctgcaaacaaaactaacatattttagatgattgccctcatgctgcagtcatctaactaatggctgacaaaactaatatcttactttgcaaacaaaactaacatattttagatgattagaccctcatgctgtaatcatctaactaattaatggctgacaaaactaatatcttactttgcaaacaaaactaacatatattagatgctcaggtcctcatactgcagttatttaactaatggctgacagaaataatttctcagtttacaaacaaaaccagcatattttagatgcttaggtcctcatgttgcagttatttaacttatggctaacaaaactaatttattattttgcttacaaaactaattgctgataaactaacaaaaccaggtaataattgcttacaaaactatgttagtggatgacaacaatagtatatcacttccaacttccaagttaacagaatggatcatgagttcagaacaagacaaaactaatttggtatttaaataaaaaattcgcttgtttccccatctaatgtacaaataaccattattaactagaaaaatatcaaaatggtgttcccccagctgcaaatgttggagtcacatgaacggtaagcatagcatactatggagaccaacattctgaaatacaaaaaaggggctatttgtgtccttgtcggtgaaagtgcatctaggcccctaatgattttaatgattgattacaatgcgattggagaggactaacattttatttaagcaagtgtgaaggttgttatgtcctcaatgagttgcagagtgatgcataccccattgaaagcgacgtcatgatgagttacggcaatgagcaaatggtatattgtgtattttactttctttgcatcttagaaaagccgtactattaaggggggtgatgcattgacatataaggagtgatgtgtgtgctcaaaatcaattttttggaagcatttctccttgcttgtgtgttctggaaattttcggaagttccgaaaatacacagaaccaatttttcgcttctggaaatttttggaagttttcgaaaaagattttcgaaagttttgaaaatgactgtgaaggcaaaaacggctcagtattttttcggaaatgtccgaaactgttttttggaatttccgaaaatgtctgcgagtcaaatatgcttctggaaaatttcggatgtttccgatagtgtttttcggaagttccaaaaatctccagaaggcatttttggttctagatattttcggatatatccaaaaatatttttcagaagttccaaaaattggcattgactttgtgattttctgttctggaaatttttggaagttccgataatgattttcggaagttccgaaaatcgcaattattgtgctccaacgggcagatctggagcagtagctataaataccccctctctccttttgagtgggttgttggtgacattggatattcttgtgtccttggcttgcttctctctctagtcatttaagccttgctttcttgtttcccctctccactcgggtttgattccaatttggtgtgtgtgagagagtgtggattcgagtttgtgtgggtgcttcttgtggtcttcgtgaagatttgtaagcacttgcatcatctccgggagttctttgcatcatcttttactcttggaggttgaggactcctagaggagttctggctaggtgtcgctcctgagccaccgatctacttgtggttggccgggagaagtttgtgaaggccggatctcgcctccgcaaggaaagagatacccttaatggaaggaggagtgctttgtgcaaccttttgaggaaagggttagcaaagaccctgctctttgtgagctcctcaacggagagtagaatcccctcaaggatttgaactccgggaacaacttcgtgtgctacatctccggtgatatttcttcctccatctcctctagctttgcttgtttgtgtcgctataggtctagttgttgtttgtattttgattatcatgtggtaggcatctagatctagaatttacctttgttttcgactgctctgagatttttcggaagttccaaaaattcctgcttccgcatttacttatgttttaaattagcctattcacccccctctctaggcctaattgaccctttcagtcggaaaacaactttgtttatagagagcgaagctgtgcccacactcagtgaatcagtgaatatataatgcagtttctgcctccggggcgaaaacctatcagcactatccgacaacacatgtttttgagtattgtattaatatatcagttattatataaagtgagcgtagctcaactagtaatgttcctagtggtggaactaacccacccgggttcaagttctagacttgatatgggcgtgcacatttacgtttaatcattctttcaatggtaggcgacaaacccgtcggtagcgaggcaccatggtgacttcgttagtctcaaactatgctgactcggtctttcggatgtgctgaaagagttgagtgcgtgcgtgttgtgagcgcttgcaattgtactatgtttctcaaacttagggtcccctccaaatatatactagatgataccccgcgcgttgctgcgggatactatgtgaaaacaaatagtatgatcgaagggaatatattaaaataaagccaatctaccaaaggaattctacagtaattctacagtttgattggaatataatatgtctgccatataagttcaaatgacatttatgttgttcagagagtatatacaatatagcctgtaggaaagaaaaaaaaattgtatggtttgtttgttagagattaaagaaaagtgcttcttgctaatctggtataggaagtgcataggcaagtgaactgataattaggtttcaaaaaaaaaagaactgataattacttgaaggtgtgtcaatccataccgtgagcgagcttgatgataccagctagtgatgttcccttcgatttgctgtaaacattaagaaaacatatattgactctatttataagatgaaaccaagtttttatatcagttagctcatgcaagacgaaggccttagtctgaagggactgaatttgaatcatgtcttccatccaatggtctggtgctggactgaaacgattcaagttctagctgaataaacaacagtgcacatatatagtagattggggtaatgaaaaacggattcgatcccccaaaaaaaaagttaaccatcaaagatggataaggtagtttttacaaaatctctatatatctgaatatataataaaataatgatggtcagcttgacaaattgcaatttcatacattcatatatcgatggaacacaaagtactgaattaccagattgtttgctccgcaaaaggagatggaaccctaaagtactgaattgcttgatcgattgatccagaacgggacaatatatatgcctttccgcgtgatacttcttccacctgcagtaaatttgggcatcataatcataatttacacacagaaaccaacaaataaaatgtcaagtaaatttccacgggcacattacattccgaaccaaacaaacaacagaaacagcaagagaaaattctgataaaacgaaggagcgtaaagtagatacacaaataagaaacggtatgcgaggaaatgagggtgagaggaataaaaatggcacctgccaggtcgccaatgaaacggaagagtgatgatgatgcaggtatatgcccatggaagatgtaatcacatatgtaggagaggatatgaagcaatccattttaatggcaaacgttatcaactatcgaatgaggaggcgagtagaccgggaagcaacgggataggaagctgcgccatacattggtgggcgccggtagtttcctgagcggcggggccgaaccaatgtataggaagcggagtggtggggggaagaaagggtgctgcatggggggtgggaggtggggagtggcggcgattcccttgcccggcggcgcgagaggggagatgcgggagaggagaggagtcggagcgatgcggtggggccattcgcgcgagagagaagtcgttgatgcgggagcgctcgcgcgggggagcaatgcggtggggctggagaagcgagattagatccaacggttaggaaaagaatgatgacgtggaggcaccagaaagcagagaattcagtagtggggatgatttgtataggtatatagatacaggattactcaacacacacacacacacacacaaaagaatcacaaacttacccactcatggacaccattaataaataggtagaacaaaatcaacacacctctatcaaattggaaaatgaaaaaataaaatacattcccacgaagcaacaacaaaatcatataaaaaatgttgaaaagtgatcctgcaactccacttgatgtaactctaatatcctatcgatcagtgttatatctgcctgtagccatgttggattggtgagtgaagaacaactttactgtaagcagatgcaagagaaatatgtaatattgagcactgcagttgtctttttagaaataatacttttttaatagggaatcacaaaaatagaggttgtcagactaaaattgcaagtataacaccctatcgaacaaccaatgttcgacaagggtacatattgaacaactataatttgacaagggataaaaacataaaatagaaaaatcactttgcgctactatgcgccactgtagcatgcaggacctatcgaacatccccatttcaatagtccacctctcttccatgtactttttattttttttaagtggactaacaaccttgtcgaacaaccgcagttcaacaggagttcgacaggtacctatggaatggttttagccaatcaacttctatttttgcaattttttattaaaataatattatctctaaaaaagtttccattttttttgtctctatagacgatctggactgcttgacaaagcaaagaacttcattgaggaaaacaacatcaatcatgtggcttttgtttggatggggctactgtcagcttgccgatttcactagcacaaggactatgcaaatttggcttgtaaagatttgcttcacttggagcaatatgatgctggatccaagctatacaaaactgcattttatacattcaacggtgacagatccaaccatttacacattcaaccagtgacagatataaaagaactaatacctgatagtcatagaccgacaccaccggcctcaaatgcgaccataacgatagtgtgcatgacgagagaggaggacaaaaaaaaaaggatggctcatggaggataactagagggtgcgattgcgcatgcaaaggtggagaggaggaacgatggtggctcatggagaaagagcggtggaggtggtggtagggatgaaaacggatcgagtacggtcgaaaactagctctaacatattcgttttcatatttttttctcagaattgaaatcggaatcggaaacccggatacgaaaatggaatcgaatattatcgaatacagacacggagcgaatatgaatcgaaacgaatacggtaatgaataattatcaaaatatcaagacccctcaaaataagcttcttaaaacgaggaagagatatagccattagttttcaaacacaaaacatcagtattttcaaattttatctctatttataagggcaagggggagatagaaaatgttatgtttactttccatacaaatttatgttatcataaaacaaataaattaatgtgtatcactcaaattttcgtaggcacattgaaatttttaaaaattggttgaatattttaaattttgggttgaacatttcaattgaaagtttttaaaaatttgagtggttatttttcagaattgaattttttcatttgtttgtatgtggaccagttaagaaagtttttaaaaatttgagtggttattttttagaattgaattttttcatttgtttctatgtggaccagttaaggacccgcatggaaaaattgattccatacgggtgacttaagaatccatatgcaaaaataaattttgaaattttgaaactaatttatctcactcatatgaactccaaattggatgattcttttccctaaatgtttctaaaatcatgctctatcatgttattgtgttcttatcttctattattttggccatttttctcttgtgactttgttttatcaattaaaaatttgaatttctaaacttcaaataatattttgaagctataattaatttcagctgaaaaagtcatgaacataaaagttgtagagctcatcaagacatacaacttttattttggtcatttcttcatccgataaagtgatagtaacattgttcacaaagtttacttctctcttatagtttatagaaccaaataagatagatgtaaattttatataagatagatgtaaattttatgaacaatgttactatcactttgtcggatgaagaaacaaccaaaataaaagttatagatcttgatgagttataaaactttgttgttgataactttttcagttgaaatcattaatattttaaaatattgtttgaagttgttatattttgaaattcaaattcaaacggttcaaacaaagtcatatagaaaaatgaccaaaataaaagttgtagatgttgatgcgttatacaactttgttattgacaatttttttcatttgaaatcatttactacccgaaaaattatttgaatttcttatattttaaattcaaattttatatagtttaatcaaactcggatggagaaatgaccaaaataaaaatgatagatctcaataagttatacaaatttgtatttgacaacttttttcatatgggttgattttgtgcctttaaattcattttaaagagccacatgttaaaaaaaaaaatcgatttttacactgaaaaaaatccaccatttttttcacctcaaccttatcttctctttgactcttcctctcttctctctcacacactttctactctctctctctctctcacttcctctcatccacagggcgcagggcggggcgagtggtggccggccaagggcggtgcaccgcgtggcgggtgaagcatctaggcccccggtgttaattttggtaattaatgacaagcgctaattgtggactaaccgctaattgtgctaattttgttaattttgctaatccaggccgatggggccctctgacagcacttcaatggctagttttctagccgttgcagagtagcacggtctgaccggccacatatctccggtcagaccggcagagcacaaagttgggggatttcgcccccaaaggctagttttgctgggtgggagtataaatactcccccaccagcagcaaggggaccctcttggcatctaattcaattgcatacaccctttgcacctcactcacactcacttgagctttgtgttcatccatctagtgtgttagagggttgattagccaagagtcaagtgcatttgcttccattgtagagctagtgtggcacttgatcatctccacgccgggttattgcttgttactcttggaggttgccgcctcctagacggtttgtggagaagttgcccggtgacctctccgagaagtttgtggagaaggcccggtgctggtttgtaagtggtttggagttcaccaccttcggagtgaaggaagaactaccctagtgatcgaggcttgggtagtcctctccgtgggccagctcccgccttgtccaccccttgacgaagggggtgtgcggtggcttcgtggttgagcggtggagttgggctcgcctcaatggggagtaggaaaccggcgagtttccgaaccttggtgaaaaatctcttgtctccctgtctcatttgattgtcacatttacatttgtgcaatttacatttctagagacaaacttgagatcatatcaccctaggattgctaaacattgacataggagtttgatttactttcctagagatataattgagccactatcaccctaggtttgcaaaacataacttagttgcttagttagagttgaccctcaccaagcctagcaacttaggttagttttgattaggtgtcatttagttttaaatcgtctattcacccccctctagtcgacatctcgatcctatagcaggcggcggcggcggcggcgggcggcggcagcgggcttgactgccgcgacctaggaagcggctgcagcgacggcttcggtgggcggcgacggcttcggatgggcggcagcggcaggcggcgagggcggcggatccggcggcatcgccctcgggaggggccggatccgctgccctaggaggtgttcggcgctcggccccgcgacggccggcggcgggcgggcgcagcagcgcggatctagctagggtttcgggattttttttgttttttttttgctgaaaaatatctccggatatccgatgaaaaattccagatagtttccgaccgatttacgattccgtcggataccacccttactgttcgtttttgtatccgagaaaaaacccgaattcgtttccaaatccgagaaattccggatagttccgaccgaatttttctgaatctgaaaattggtccggacggacggaatctatccgaaccagtttcatccctaggtggtggtggcggtgcgtggagtgatagttaggctgtgtagcacgcaaaacggagcacacataattgtatgattaattaagtattagctatattttttcaaaaatagattaatttgattttttaaacaacttttgtatataaacttttttttttgcaaaaaacgcacaatttaacagtttgaaaagcgtgagtgcggaaaacgaggggaggggttgggaacttgaaggaaagaacacagccttaagggtttattgttgacatgatcgctaaccaagtttgttaattttttatacgtgggcaactagtcattagtcattataaagattataaagaaatagctagatttaaagtagtaaaaatattgagataaaggtgagagtacttgtattaactttttttgtcactttagtgataaattcttaattattaatagtaagtgtgacaaatagtaaaggtggtgtttggatcagggacttaattttagtctctgtatatagacactaatttagagtattaattatagactacttacaaaactaattacataatgaaagctaatttgcgagacaaattttttaagcctaattaatctataattagaaaacgtttactgtagcatcacaaaggctaatcatggattaattaggctcaatagattcatttcgcgaattagtccaagattatatattttattaatagtatacgtttaatatttataattcgtgtcccgatgtgacacggcttagtcccattattctcgagtagaatatgtcccttccttagcggcgtaaagaaagaaattcgtctcctccgctcctagcgccgccgagtcgcggctgaacagaacaagggagggaggggcggcgatctccatctggcgagcagagcaggggaggggatcctcgtgagcatccacatcctctttctgattcatctctctcccatcgggacacttgatatttcttgcgttcttcgttaaccctagcttctcttctagatctggaagaggctcttctttttaatttcagagccttaaccttaatacaagtaacagtttgtttgttccccgatccgcccctgctgctggtacttgggctatttgattcctgcatagtttcagagctagagctagtgttgctctttacagctttgggcggattcgcgatggcggatgaagagtcgtctgacttcaccttttgcaaggttttatttataacttgcctccctattgcttctatgttcagctacttgttatttctacaatcaatcagtcatatttttttttgacttatgtattactttcaattgtgtaataaatctgccgatcttctttgactgatttaatcacctgcttttaagcgcaatcttggttctggagatattttcttgtacaaagttctaccaccacaaattcttggaagaagcaatatgttagggatatattccactaacattatcttcatttttggcgctaatataaacaaataggtagtatctgactaacatgggatggtacaaacaagtgaaaaaaatagatatgaggaaaaggaaaaagggtaagatgtaacataagaaatcagggagactgaatggaagaggaaagaaagattcatctccgctgtatagaaatctcatatagtttgtccttgttgctgctgtaccaagaaatccaccttttgttgttgatatacatgagctttagaatttcctatttcataaaaaaaaagctatgctgatgtagtgagcttaagctaactaggtaagcacagggtacccacttgtgtatatagctccattttcatgaattatttgctactcccattttatctgcttttcttcatggtacttacattttaaatctggaatcatgagtacaagggacatatatctagattgtttgccatcttgaatctaccggatttattaaattttcatggatacttactgtccaaatggtctaaatttaaacttcctatgttgattatataatgaccatattcttttacaaacaattgaaacaaatcttcagtgacttgatatggtaacttgctgatgttattctacttatgtttttgttgtgtagatgtaacaaattctatattcaattttgttttctagatcgattttgagggagatggtggtctggagttccctaaagctatccctgtggcaagtacacctggtgatgctggtgcagataacttaaagactaagaagatcgaaggcaacatgcaggcaaacaattcaattaaagatcaaacatctaattctatatctagtagcatcaatcgtgtatcactcgaagactctaatggaaaagagtcagttcttagcagagagaatacacagtcaaatttatcatctcaaccaaaatcttcaaagaaacctgcagcgcgtgcaaaagttcctttcgagaagggctatagccaaatggattggcttaagctgacccgtacacatcctgatcttgcaggtaaattgtagctgctactgtttcttcatctctgtatgtatgattattactggatggctagtgtacatttgaaaactttcttagttaatgtattgttactgtctgaggcactataatcatgacaactcaggatatcttaatatggtcatagttaccataggaaaaacacaagcttaagagtacacacaatttttggtttcattgttggataggtgaggtcaaatgaatgagtttgcagactagtatgcaccatgttaaatgtcttcaaaaggtcctgaactacattttctactatatcagctttcgtttttcatgtggcattatcaaaactgatgaggtcagaaaagaagagggggggggggtatattttttgggtaatttgtttctagctaatacctcatggacctaagaattggtttgaacttctagctattcataagacaaaatgtcatttaattaattaattgtggtatgaacaaaaatattatgtatttcatcctcagataatccatagtgattttttttctataccattaggattcgtacattatttaagatacaggattcctgcttgtgagatcctttagtcattagtcactggattgcattttagatttggtatgcaaaggtgagaaaaggaaatacaggtgggggatgcacaatttcagcatttaggggaagagcgcgtgaacagtggcaaaatctgaagaagtttgtgattccagcggcattgaacaaagaatgcaaaaagcagtgccaagtaccaatggtgtagactgatgttttcctaatttaaagcataaatgattatctacagatgttgaaatctgaaaatgtaaatgcaattttattatttgtgactggagcatcgcccgtgagctatccaccttttttgaatataactgcaaagggggaaaatatgttggtgtgtcttgcgcctgtctatcagctgtaattcatgaacctgtttatgcttgactgaagcatatgcgtccactgttgttaatatttttattttactccttttttaactgtgtgttacttgtaatgaattgatgtttgctggtgaaataataccgatttcctttcatttggtgtggcatttttatagggctcaaggggcagttaaaccgaaggttgatttctctagaagaagttaaacagcataaaacaggagatagtatttggactgttttgaaaggtcgtgtgtacaacattgctccgtacatgaaatttcatccgggaggtaaccataagttttaacctgatgtggaatacttgtttcagttcttttcgtagctgctgttcaccttcacaatttctgcagacttcagagtgctatatgcttctattttatgtgtaacaagtacttttatgggcatttgcaggagttgatatgcttatgaaggctgctggaaaagactcgaccgctctgttcagtatccttctattattattgttcaaacatacttttaaagttgcctgctgcctgtcgtagaatttcaactgagttttagttagaatcaaaatatgctttgacatgcatgtttgcatgctaactatactcatgcatgctttgttcattatattaggtcgactgttctgtgcttattgtgaccgttgaacttatgtgcaccttgaggctagctagctgtcatatctgcagggaggttttgtccatgaatatataattcttgatatggttccttcactcccctatagacaaatatcatgcatgggtaaattttgaattcctcctggagaagtgccttgttggattcctcgatcccaatgagtagatgcgccattgagcctgaggccagaactccacttcctctttcttgtccgcgacactagtccctgatgcgtatccatcacatggagacagtttaaggaatgtaaacaagtgttttgcttcattgctaaggagatatagatgctgctgaacattttagaaaaaaaagaaaagttagaaacttgatcaccattgttatgtacaaattccttcaccattgattgctgaagaaaacaaagaacatttccatccatatgaatgtaatgtcaagaagatacatgtgttttagatgaagggatactgtggtgctgttttggctctttgcagccaacacatagtgctctgtttctttcacattacaagacgttttgggctcatgcatatattgatatatgtgcttcatatatttatcccatatgagtgtatgaccagatccgagaaacccaagcgcaccatcgtcgtccatccgccaggcgatattcctaacgacgccatccagattccgcacggagatgcgacctctccaccggccggaaagcacgctgttgccgtcgtcgccggtctagggaccgctgttaggatcgacctgatctgatgcgatcgatcccaaaatattcagcgaaattcagaacttggctggaagctacctattaggaatcctaacacggcaaggaattgaaataactgctgaaattaacttgattaacgaaatatatgagtaggccgcaagaacagaaaaatggaataaaaactatgattttgatcttcgatatagttctaaaataacacattggcttatattgagtatatcacgagtaaaagacaaaaagtgacgcctatagtaccgtaaggatacacactgcagtctatctcggtgctcttgagcaacacaatcttcatagaatctcccctccatctgttatatttaaatctcagccatccaaccaatattagcatcctcctctgcttcctcagtattttggaactctaaaactctaaagaatcaagtgctctctatcttcatgtgcctctcaaccacaccccagtcgtgtcggtcttagcctctatgcttcacgactacacctcccatgtatccgtcgttcctcgatgttggtgcctttatcaaccgaccccgccttcccaaaaccaccacttttgctgctcgtcactatcaacctttaaattctaccccttcccttgtcataatgaagttgtaggaggatagcagcagaaggtagcggtgaggtaacaggaggtggcaacggagctgcaaataacaagacaacggtgggagctataggatctggcgcccccttggccagatctgacatcctcccgacaagatctggggcctctccaccaagggagactagttgaggtggctctcaacgataatggtgggcacagtgtggtggcctacagcaacgcaggtgcagtggtgagacaacgttggtgccctcgctatgggtggggactaaccggcgatcggacatgacgtggtccgagagaaggctatccatccgatgaggatgactaacggactggaggtagagcccttgtgggaaggcggcaagaggcgtggggatggctgcgtgctagcagtatgttgctggtgttttgaaggcgatggagctgcaacatcaaggttgagggaaggttggtgccaggcgaaagtcttgtctgatggtagtcaggacacaataattgtgacgctgcaggcaacacgaatcccctcggggtgttgtcgtggttgtaggatcgaaggcatcttagaggggagggggttgaataggattcctaggagacttggctgaatttaaacttaaatttcagaagataaaaactaaccaatatgcctaggtttaagactactgtggcccattgtttaaaattaaagctagaactcctaacagttctagagcaaaataaatattgaaaggaacaagaaactcaacataaagagaagaaagttcaaacaaaagacttggcatgttttaaccgaggtatcagatattcaacaatctctactaatcgtcattggaaatctacacaagagtatagctccctcccaaggccatgaagtccatgggcgctctcatcattgtggttcttctccactcctgaaggtgaaccccgaaaccttcaccatcacgccgagtctcccacaatcatcttgagacatcactggctaggcacgctaagatgccaagagtaacaggaagaagtcttcacttgaagcccttaagaacaaggcctaaacgagtaaagaaaattatcacagatagctgaatggcgctcttggactctcccttaggttgcttagctcaatagagttccaaaaggcactaggtagtctaaggcaagaggtatttatagccttaatcgagctcattagctgtttgctaccattggcaaaaaccagctgaagttacataggatcggacaatctggtactagacggccctttatactttccaatagtaacaaggcatatagccgttgggctataaactgtcgggcaatccagaaacacgccacgttcaaaatcaatatctggtagtagccggacaaacatgtgtccaaattgttcgacaatgtgtcagaatgtcaaacaattgctagatcagcttgattatctatcggataatctggctagttcatttacactgtccgaccaacatatgaccacagttggacaacgaactagccagaaaatccgacactgcaccggattgtccggtcaagttactctagcgacttgaacaagtactatctcggattgttcgacacaacttggactattaaacttgtacatgttcagggttgtaggaagacctgcacactgacaattgtctgaggtttttacccacttgatttgagaggccacaacttagtatgcaccacaccttaaactctagcatttcccaaaaacttcaagctactagttttcaacccctctttatagcagtctttaacttaattctactacatttgtcccaactcctcaaatacattaccgatgtttcagttgcagtagtatgatctcgttgatcttatcttgactgtcttttttgggtataggcaaaacgtccacacttccatcgccggagccctaatctttttttaatacttaacaactgagattagttttcatgattatattgtcattaaccaccaaaacatcacatggggtctagattcttttagaggtgcccctccttccttcaccaatggatttctctatgttaaaatcttatccaagagtccttgagcagcggtggtactctagcgtctcaacctcctatgacaccctgtgtcaattaggatgtgacttgtgtggtccataaaagctatgtgcgcatgtttagtacagcgttgctagtttagcaagggtgaaaccaatatataagggcttgttcctccaaccatagcactttcgggttaaccgttttacatgaagcgaagacgaaagtgtaagtgggtggtatatgtaagtgagcccgctctttagatgagctgggctacacggttctggttgacgggttgttacatctccttggaggcatcgtctttggagatcccctttgcctttccgctttgaactgttggtcctggactgctctggcgctctttgtttgtcatgatggggtgggtatgtgtgcgggaagagtggatcttattctctgcggctctcttcctcctcaacccaagatgtttggtgatcaactgcctagcaaggttgatgttgtttaggcgattgcaattgctcatgtcttcatgttggtgatgggtctgtatgagggacgagcggatctttcttctctctcatgttctccctatgcaatccaattttgggatgttaattgggagcccatgcaccattttagtgttttgactttgtcggtattcagtggagtggctatgttgtaggctagtggtgaccgggtcttacatagcggcagtcagcttgatgctaggtttcttgcgtagcgttgtcagcgcatggttaagctagctgagttttttttttttcctgtcttcttctcttttttttttggaacttctgtcttcttcttttagttttctttgtgattataacctctctcagggctctagtcttatactactttttttctctactatattaataaaacattgcaccatctagtgttgttcattttttaaacaagacaattagtataagacatcgttttccaagattcaatatgatatgtttatgttgtagatttagagtttcctatattgcaacgcatcaatatttttctagtatatattataaatatcaaaattttaatcatatgttgatgttattttttttatcatggacataggttaaaataaatatcaagctgaaatattcccataattcataaatacaaagaaatttgattgcgaggtgattgatgggacatgtaacattgtacaaatgcttataatatatggacatagtgcttataaatttcaaatatttgaactaagttaacaaaatactaaattaaaagtacaatatctttctaatcaatatactcggtggtcagatccttctatttatcgtcaaatttttcttaaagtgaatttggtcaaatagcacagttaaatagatcatatatacaacagcaaataccagttgtttctggtcaattcgcaagataaagttataattcataccgataacaatgtaattctctgcaatctgggtcgtagcaatagcggaagaagagcaacagatttggacacttgcaaaccgacacggtgactggtaacgaaccgcctgcgaaaatcgtctcgacaaacaaaaaaaagattgccgccacccccacccgtgcccctacccacctccggccgatctagggttagggagagggagaggaagggccgatctactgcaggggcgccgctgcccccgccggggtgggggcggatctgggagggaggggaaccgctgccgccctcccccagactccctctagctggatctgggagggaggcgaaccaccgctgccgccacaggtcctcccccctctcccctcggccggatctgggagggagccaagcggccccgagtatcaccgtcgccgtcgccgtttgctgccccgacctgcgtctcgctggtgccgccgccgaccccgcgcctctccgtcgcgtgtggatcccgctgcccctgctcgtcgccagtcgctggttcccccgccgcctgtcgctgtgagggatctgagggagagagaggtgagggagaggagaagtgagggagagaatgctgaggacttagaaaaaaaatcttctccagccttgtctatttatattccacactcatttttgtaggtggaccacataagaggtttgccttcaaaaataaagagtatttttgcaggcggacagcgagatttaacccggtttacatttttgtaggcgatcatttgggcccgaaggttatatccgcctgcgaaaaataaatacgtacccaacgtcggcgcgaaaatgctttttctagtagtggtgatacatctccctagcaggttaggaaggactttaatccattcctaattcctgatcgttgattgctagtaaagttgtatatatatgcatttaatagttaatattacatgtgcatgtaaaatctcatcttcaaactcatcacacgtatgaaaagaaaattatattgttacggttaaaatataatttacccaatttaggctaaaactttacagaggtataataatattagaagtacatgtacattttttaaagtatgcataaataattatattatattttgaaaccgatggagtattttgtatcaaacctttttatccatttaaaatggacacttatcctttcagcaatgttgagatagacaatagtggatttcatgtttgtgatcttatatacagctttcggccttcaccgagaggtgaaaatttctcgtaaacttccacatacaagttttacagtataaattaatttggttcctaatgaagtcttataactttatgcattccaatggtagctaggactttccgggttcgaacagagatgaaaatttcaaataaacttcaaaaagaaaatcatataaattggttgttagattaatgtgctatacccaattaaatcctaataaattccattggcccacattaagtgctatgggtaataacaccaccttgcaaatctgagtgcagaggtctcaacttaaatacggagctagtggagagtctctgttgaccggttgagatggtgcgcggacaaccaggcggggcgaggcgaggcgaggcagacagcagctgctgctgcgctctctcgttttgtaacggacggtaataaacacggagaattgatttcgtatcaatgattccgtcagttacggaattaaacgtcgtgaattgattccgtcggttatggaattaaacgccgtgaattgattccgtattaacgagcgcgtcggttacgaaattaaacaccgcagttgatgactccgaacgttactctcgcgcctgcatatatatactccgcagcaaccagaaggacggacgaagttcttcacgactattgcacttcgagttcctcctcctctgttcctgagctgcagaatccttccccggttctgttcacctgcgcgcacaggtgtacgggacgagcaggtgcctccggaactccgtccgcttgagaacttgcacgggtaggcgggcgatcaagttttttggtagcgcttcaagcgcgactgctcttgttcttcgcggctactgctgctgcatcggcgccttcaccaagatgtcaacggagattggagacaataagatgaacgacatcaacggaggcaatactgcctcaaatccagcgatgggacgttctcggggtatactttcattctcccgattctattagaagtttctttgttaatactcttcgcaatggtagcattgcgttactatgtaaatgttgatgcttatttcatattaagcatactcaagttgtatacatttagcactgtcactagatctactaatattgcaaatgtcatgtttattgtcttaatattttggattaaaatatgccgaattatgaccaaatttccaacaatccaaaaacttgatgggtcttttttggtagttggctttgctgcatcactaaaaccacgtgctttcgatggttcaaattataaaagatggaaagcgcgtgcacttttgtggttgacggtgatgcattgtttctttgtctcatggggcaaaccgagtgaaccgcctctctctcctgaggaggaggctaagttcgaggctacggattgcttgttccgtggagcattgatcagtgtgctcgccgataatattgtggatgtgtatatgcacatacctttagggaaggacatgtgggatgctcttgaggtcaagttcggggtttccgacgccggcagcgagctgtatgtcatggagcagttctatgactacaagatggtcgattaccgttctgtagtggaacaggcttatgagattcagatgctggtaaaggaacttgagaacaacaactgcgagttgccggacaagtttgtggctggaggcattattgccaaattgccaccttcttggtcggactttgctacttctctaaaacacaagaggcaaaagttcagtgttactgatctcattggctctttgggtattgaggagaaggtgagggcaaaggacaaccagggcaaaaagatcgagggaggttctagcgctaatttggtgcagaagaagaacactcacgcatcccacaacaacaacaagaaagtcaaacctgacatcaaatccaaggctacaaccaattttaagaagaaaggcaaaggaaaggcaaaaggagattgctttgtgtgtggcaagcctgggcattgggccaaggattgtcctgagcgcaaggacaagaagtctgcaaacatggttattagtgagggcggaggaacattgtggtatgataaatttttagcaacagttctctctgtctgtcactcacctgattggtgggttgatactggtgctaatattcatgtgtgtgcggacatttccctgttttcttcttatcaagtcgggagaggttcctcctagttgaagggaaacggatcacttgcggctgttcatggtgttggtacggtcgatctgaagtttacttcgagaaagatcgtgcagctgaagaacgtgcaacatgtcccttcaataaagaagaatctagttagcggctctctactatgtagagatggttttagacttgtgtttgaatccaataaatgtgtcgtatctaaatatggaacgtttattggaaaaggttatgacagcggaggtttgtttcgcttttccttggatgatatgtttaataaagttgtgaaccatgtaagcgatgatgatgatgagtccaatgtgtggcatttgtgactttgtcatgtgaattttggttgtatgacacgcttagccaatatgagtttaattccaaaattcactttagtcaaaggctctaagtgccatacttgtgttcaatcgaaacaacctcgcaagcctcacaaggcatctgaggcgaggaatttggcaccactaaaacttgttcattccgatctgtgcgaaatgaacgacgtgttgactaaagggggaaagaaatatttcatgacactgatagatgattgcactagattttgctatgtgtacttattgaaaacaaaggatgaagcactgcattactttaagatctataaggctgaggtagaaaaccaactggaaaggaaaatcaaacggttgaggtctggtaggggtggagagtatttttccaatgaatttacttctttctgtgaagagtttggaattattcatgaaaggacacctccctattcaccccagttaaacggggtagccgaaagaaagaactgcactctaactgagatggtgaatgccatgttagacactacaggactttccaaggaatggtggggtgaggcaatattgactgcgtgtcatgtcctgaatagaattcctactaagcataaggaagtaacaccattcgaggaatgggaaagaaagaaattaaatctctctcacctgcgcacatggggctgtttggccaaggtaaatatacctatagccaaaaagcataaatttggaccaaagaccgtagattgtgtgttccttggttatgctatccacagtgtgggacataggttcttaatagtaaattctggagtacccgacatgcgtgttggtacaattactgagttcagagatgccacattttttgagaatgaatttcctgtgaaaaatgcacatagcacttctagtcaagaacctattttatcccctgagcactttatgccgatagaacacattgatcaaacgcttgaggaaaatcctgaggaggataacattgtggcaactcgaaagagtaagagacaaaggactgcaaagtcttttggagatgactatattgtatatcttgtggatgatactccaagaaccattgaagaggcatattcatctcctgatgtgactattggaaaggaaagaagcggtacgcggtgagatggactcaattatgtctaatggtacttgggaagttgtcgagcgtccatatgggtacaagcctgtaggatgcaaatgggttttcaagaaaaagcttaggcctgatggtacaattgaaaagtacaaggtaaggcttgtggccaagggttatacccaaaagaaggcgaggattttttttcgacacttattcacctgttgctcgcttgaccacgattcgagtcctactcgctctgtcagcctctcatggtctactcgtccatcagatggatgttaagacagctttcctcaatggagagttggaggaggagatctatatggatcaaccagatgggtatgtactagaaggtcaggagggaatggtgtgcaagctgttgaagtccttatatggtctcaaacaagcgcctaagcaatggcatgagaagtttgacaatacacttacatctgttggctttgttgtgaaagaagctgacaaatgtgtgtactatcgctatggtgggggagagggagtgatcttgtgtttatatgtcgatgacatattgatctttgggaacagcctcaatgtgattgaggaggtcaaggactttctgtccaaaagctttaaaatgaaggatttgggagtggctgatgttattcttaacattaaactactgagaggagatgagggtgagattacacttgtgcaatctcactatgtggacaaagtcttgagtcgctttggttatagtgactgcaaggcagctcctactccttatgatcctagtgtgctattaaggaaaaaccgaagaatagcaagggatcaattgagatactcccagatcattggttcattgatgtacttagctagtgcaacgaggcctgacatctcatttgctgtgagcaagttgagccagtttgtttcaaatccgggagatgatcattggcatgctcttgaaagagtaatacactatctaaaagggacaatgagctatggaattcactatgccgggtacccaaaagtgctggagggctatagtgattcaaactggatatctgatgctgataagataaaggccacaagagggtatgtgttcacacttggaggtggcgctgtttcctggaagtcttgcaagcagaccatcttaacgaggtcaacaatggaagcagagctcacagctttagatactgccacagttgaggccgaacggcttcgtgagctcctgatggacttgctggtggttgaaaaaccagtaccggcaatcctgatgaactgtgataatcaaacagtgattattaaagtgaacagttcgaaggacaacatgaagtcatccaggcatgttaaaagaagactgaagtctgtcagtaagcagaaaaactccggagtgatagcattggactatgtccagacggctaaaaatctggcagatcagtttaccaaggggctaccacgtaatgtgatagactgtgcatcgagggagatgggcttgagacccacttagagttgcacaatggtggaaacctgtccattgtgatcgcagatcccgtgaatttggatggtgaaacaaactattgtgtaactgagagaagagaccctaaaatgggcttatcttcatgatgcacttctcttctaatctgtatggtagtatggtatacaccttaatgtgatccgagtggcttttcataaagcagagatgttggcctacataacatcttagaaggaacacacctatatgagtccgactgctagtcacagtctatgagatctgggtgatatctagatactcatgaaaaggccaggagtatgacttatacgctccaaatagaggggatgcaaacggcagcctagtaccagttaagggtttgagtgaaacctgaatcgcataagactgacaattcaagtcatagtccattgtttagttgtgatctggtgtagctcttttcctaggtggaagttcaacttaacagtctccaccgaaacactggtataacaaacaggatcagaaccgagagcatttcctgtgagccatgaaatttggtggggattgttagattaatgggctaggcccaattaaatcctaataaattccattggcccacattaagtgctatgggtaataacaccaccttggaaatctaagtgaagaggtctcaacttaaatacagagctagtggagagtctctgtagaccggttgagatggtgcgcggacaaccaggcggggcgaggcgaggcgaggcagacaacagcagctgctgcgctctctcgttttgtaacggacggtaataaacatggagaattgatttcgtatcaatgaacgcgtcggttacggaattaaacgtcgtgaattgattctgtcggttatggaattaaacgccgtgaattgattccgtattaacgagcgcgtcggttatgaaattaaacaccgcagttgatgactctgaacgttactctcgcgctcgcatatatatactccgcagcgaccagaaggacggacgaagttcttcacgactattgcacttcgagttcctcctcctctgttcctgagctgcagaatcattccccggttctgttcacctgcgcgcataggtgtacgggacaagcaggtgcctccggaactccgtccgcttgagaacttgcacgggtaggcgggcgatcaagtttttggtagcgcttcaagcgcgactgctcttgttcttcgcggctactgctgctgcatcggcgccttcaccaagatgtcaacggagattggagacaagaagatgaacgacatcaacggaggcaatactgcctcaaaatccagcgatgggacgttctcggggtatactttcattctcccgattctattagatgtttctttgttaatactcttcgcaatggtagcattgcgttactatgtaaatgttaatgcttatttcatattaagcatactcaagttgtatacatttatcactgtcactatatctactcatattgcaaatgtcatgtttattgtcttaatattttggagtaaaatatgccgaattatgaccaaatttcccaacattggtctcattccaactacagtctaaaaattaattgattcgaatggtagagctttcggccttcatcgacctgtgaaaaaaaattcagatgaagttagaaaaaaaggtcatatgaaagttccttatattccaatcatctcatgataaggttagtcagtcttggtagtccatctttaaaaaggatcctctgacttaacatatactccctccgtccatataaaaaagagaaaccctgaatttccgtgttcaacatttgaccgtccgtcttatttgaaaaaaatataaaaaaaattaaaaagacaagtcacgtataaagtattaatcatgttttatcatctaacaataatgaaaatactaattataaaaaattcatataagacggacagtcaaacattggacacggaaatccagggtttgtttttttttttaagggcggagggagtacgcggttgagccactgtcacgtaggctgtagcaaagcgagattcatgtgtgtcagtgagttagctgtacatgcagttaggaggatgaactttctccgtctttatacctgtgaagaagagcagaggaaggaatcgaaatcaatacgatctcacggtctctcactgttggctacttgtacagttccaactccactaactcaactggttagaatatttgacagaataacgcgtggctaagtcgtcgatcggatctggaaaaccaatgtccgtaggccggtagttctacaactaaaattttcagttcggtcaggtgacatcactgttagcataacaacgaaaattcaatagcataacacaatgaaattcaatagcatataacacaatgaaatcaagtagcatgtgcctgagcgcatgtttgtcatttggaagcccttaagccctagtgcagcatttactgtaccacctccgtatcatagtatataactacctcttctattgaatagttacattgtgcgtcttaatagtaatgttgaattaaaagcataagttggcaaaattacttctgaaaacgatcgagcaggccgcgcgaaatcgtttaacgattttcgtacaacttgggagaaatggaaaattctgagcaggaaatgcggatgcatatttttaaacagatggaaaggtgccagtagaagtattatgaatttcgtccctctgggaaactagtttaatattcttcgcatttaattttgttataggatatcatgacttcgtggaatctaatattttataacagatttgctagaaaactaccacaagtttttttctcccaaaactttcagatttgtgaccattggatcgccaagaaatttgtgcatgaaggaaaaaaatgctaaaagtttttccacagatgtcatacgtaagatcctagtgtgaactaaccaaaccataattgaatgtaagttttatataagttatatcacagttacattacagttacaataccgtcataatgcaatgtagttataatgtaattatacttcaattatgctatatttacatctaaaaatttttgactcaaaaaacctacagcagtttttagagatactcccctgtaataatgaatgtagtgtccaactgcaaataacgatattttaaaagtgtattacctcaaagattgatttttaccggctaaaatcgcgaagtcgtaatgtcctaaaacaaagtttgcccaacattagcaaaagaaaaatgggagaggtattagcataaagtatttaagtactaccataacaacgaaattcaatggcataacacagtgaaatcaaggcctaaagggaagagattaattcgtaacaaaatataaccaaaagacataatatttactcctttaaatgttccttggggtggtggtggacgtggtgaggcactcactgatatttgggccccacaaaactagctcagtaaacaaaagtgttctatggaatttcaccgcatcttcctccctctgtctttcgatttgtactggtccacttaaattactgagtcattttcgttctactgaaactgtctcgtttagggggtgtaaaattttagcgtgtcacatcaggtattatataagttgtcgtatgaggtgttcggccactaataacaaaactaattacaaaatccgtcagtaaactgcgagacgaatttattaagcctatctaattcgtcattagcaaatgtttactgtaacaccatattgtcaaattatggagcaattaggttatgcaattagttacttttttagcctatatttaatacttcttgcaggtgttccaacgctcgatgtgacagggccttggtactatgcaaaaacattgtcgtgacgaacgaggcacctaccaaacagtattttctccgtttcacaatgtaagtcattctagcattttccatatatatattaacatcaatatgtatgtgggaaatgctagaatgatttacattgtgaaacggagggagtactatttaatagcattcatccaggcaatgctccatgcatcacaattcacaaattgaatgagttgatcacacccatactagcacgcaacaacatgatgatgccgctcgttgccctcctcctgatctcttccccaaagctgttggcagcccaacagcagctacccttctgcagcagcagcagcagcaacgcgaacaccctcgcctacatggcagagggcacctacaagaccaacctgctcaacctcgccaaagacctgatcgccaatgtcaccaagacggggtcgcactcggccgccggcgccacggctgggacgacaggtcccgacatcgtctacggcgccgtactctgccggggagactccaccaactgcagcagccgcttacagagagtgctcgacacagccagcatcagtaataatggatctaccagtagtgagagtgactcccagtcccagtcgcacaagagtactgtaaccttgtacgaccatgagttccaggcgctgctaagcttctctgacacggacttcatctccagcttcagcaacgcgccggcgtgcatagtgagcaattacctgaaccctgctgtccctcagagggatgctgatcgcacgcggttcagcgagcttttctctgagctcatggagaggatctccgacgccatggtgagtagtcgggccagctacttgacgggcaaggggaaggggtggttcgacggccaggagagtcagccagtagtatacgggctggcgcagtgcatggacggcatgccgccggagcgttgccggagttgcctgggcggcatcaccgaccaagggaaggagatggtcagcaatggcctgacggaaggcatggtgctcggggtgcgctgcagtctgtggtaccactaccagacggacggagaattcttcgccggcgagccaggggtgttagcgttcctaaacatgccttcttctagagacggtactatacatgcctgctggtacttaattaccttcaccttcaataatttgtgttttgttgatttggttcaattaacccgtctttcgtcgtcagttttcaccgtctaagaattactgctcaacagagacattgctttcatctaattcactagtttccattaaactagccgtgtttagattcaaaattttttcaacaaactttcaacttttccgtcacatcaaatgtttggacacatgtatggagcattaaatgtggacgaaaaaaaacaattgtacagtttgcatataaatcacgagacgaatcttttgagcctaattacgtcatgatttgacaatgtgatgctacagtaaacatttgctaacgacagattaattagacttaataaattcgtttcacagtttaaatgcggaatctgtaatttgttttattattagtctacgtttaatacttcaaatgtgtgtccgtatacttaaaaaaaaattttggcacacgaactaaacacagcctaactttcataccttcaaagtgtcatgtcatgtggcctcttattcaaaaaataaaataaaataaaaagtgtcacgtggccttagcttatccttatcagtcaaaattcgaattttcaaccttatatttgaaaccaattttgggtttcttcatcgaagtttatttttcagcctatgctttaaatcgctaagaacacatatataaaagttttattcacaaattatttttcgtttacaaatatgccgtttggctaatttcatgaataagccaaacgatagggcctagtttccactagttataactcatatcaatggatgtgcagaaagcaagttcgggctctgggctacaattggatcgttcttcctcatggtatcattttcatgtttctttgtgtatatttggatcaaacaggagagaaaaagaggtaaatatataactaaatattagactcacaacgttcctcgtttgtgtaaggatatatgcatctgattcgattatatagctaccagctactgtgacaagaatagactgtttcactgttttcttttttcagaagcaagatttaaactacgactgatatcgatggcaatacaaaatgtgataaatctttggaggattgaagaaggcaactcaggattttcattgtataatttctctcagataaaagaagctacacaagacttctcaagggaaaacaaaattgggcaaggtggttttggatctgtttataaggtaattgactaattgtatacttgcattggtattcaacatttttaatatttatattgtatatttttcaaatgaactttgatttttttaatcagactatttctgctgtaattcctttatctttttttttcaaaaatatttatgttacatgccaatgtggcactcaacatcgtaattgtataaatgtcagttttttaaaattaaaaaacaaaaactgtgtcctccacttaatatatgactctaatgttctttcttttcagggcctattacctggtggtcttgaagtagcagttaaaagactttcagcatgttctgtacaaggtttattagagttcaaaaacgaaattcagctgatagcaagacttcaacacaaaaaccttgttaagttgcttggctgttgtatcgagggagaacaggaaaagatgctcgtctatgaatacttgcaaaacaaaagcctggacgtcttcatatttggcatgtctccaataagactagatatttctacatactacagtttgaagttacaagtattttggcaattttcaataacctcattcatattttgcagattttgtgaaaggagcacaattaacctggtcaaagcgtctacatataattgatgggatagctcaagggattctatatcttcacaattattcacgattatgtgttgttcatagggatttaaaagcaagtaacattctcttggatagcgatatgactccaaaaatttccgatttcgggatggccagaatattctattcaaatacaattgaatcaaataccacgagaatagtaggcacgctgtaagtacaaatgaatatacacagttatatatgttctccattttgcgtctaattattagttcctacaattccgtacattgagaaaattagaaattttctcctggagaagcatgcatataagttaattatgaaatttgtgtataaaaattcctatacttcatgtgccttggtaatatataacaattctacttctgtaatattcagtggctacatatctcctgagtatatttttgatggggtttgctcgatcaagtcggacgtcttcagttttggcgtcttggtcttggaaatcataagtggaaagaggacttctggattctatccttacgatggcaaactatacaatctcatttcatacgtgagtaaaatgtactacagattatcctttttgaaatggacagtggaaccgggttggtcccgatatactccaaattgagaatcatttgctttcataatatcatcattctttttttttattggtgtttttattgacagaaatacacattcatatattgttttctaataggcttggctactttggagatctggacaggggcatgagctgatctgttgctgtatagaaaacaatcatgaatcgatacaaaggtgcattcaggtggcacttttatgtgttcaggagagggcagatgacaggccttgtatcgaccaggtggtcactatgctaaacagcgagggaatgaccttgcccggaccaaatcagccagcctacttctatgtccgctctagtggcagctcagatgttttatcatgtgacagcaatataagcatcacattagaaagatagattaattgtcatcatctccattcaatacagaatgatatccaaaactatgctgtatacactatctttttgtcttccttccggagtttaatcgaattgtgttcagaacttaattattttttttctatttaataatgtaaattagtgtgacaaaacattgtgctcctatatctgatgatgttctcttgtgattatcatattacaataaataggataaacctggattgtagagtatttggcgcatctgcatttttcgaagggtctcattgattggcttattcttatgcttataagtcaaaatttaaattttagaacttggttttgattctgatttttttttattatagtttattttataacatttgcttttgagtcgctagacacgtataacaaattttacacacaaatattttttatttattaataaacgatttgaatttaacatatgaataagcgaaacaatagggctgaaaatctaaataggaaatctaaatgcgagccgtcagccaccgagtagcatcgattcctaatttcttcaacatttaaccaaaaactttccaatcaggttccaaagctttctgatgggggaaacaagaggagctttcaagtttcgagcaacaaatggagaaatttgttgggaaacccaatactggaatccctaaactttcatcacggaaaactaaaagttttagaataatctcacctcagatccgaagatgttttcaactcctcattgcacgcccgtactcgagagcagcggcggcctcgccgacggcggcgttggacgcgacgggtagcgtggcgcggctacgattcgccgcacacgggaggagagagaggaaagaggattcgcgctcgcaccgcccttcggagtcgggagttgggccgcgccgccgtgtgctgtggtgggccgttttgctggctcgcggagtaactggcccagttttactgttgaccaccgtagcaatattttagggatagatgtaggacttcacccagcccaatccggcacacgtttcgctcgaattttttttatttacaattttttttattaaaagttttacaaaaataattttccattttgaaaattgacggaagtagtcgcctaccgccctctgggagggcgatttttaaaaatcgccctctccgagggcggcgaaaatgacgtggcagacggccgttcgctctcgggcgacggccgtcaacgaaatttgcaggcggcccccttgccgccctccgctagggcgattttatactgtgcggggggccgcctgcaaatgggcggcgggggggggcatggaattttgcaggcggcccccttgccgccctccgctagggcgattttgtactgtggggggggccgcctgcaaatgggcggcgagggggcatggaattttgcaggcggcccccttgccgccctgggggagggcgatttttgcctccccctctataaagcccagtccctcctctgtgaaatttcattatattcactaaaaatccaaaaaaaacgaaagagagagaggggagggcagcagaaggggagcggcgaagccctgctggttcgctcaattcatcacaagtatgctcccatacatcttttgcatttgtactaatatgttatgtttgagtatatatgttgcgttttagttttagttccatatattttagcacatctgtagcacacagcacatatgtgtagatccagagcatagaatataatagtatgaattgagacatagacagtagtgttaattgtaagatgtagtttagtttgatctggagaatgtaacgtaattttagaaatttagagaacaatattgtagagaatgtaacttagggcgtagtacagaaatgcgaggttaacgcagttattgttttcatcaggcacaatgtcaagtaaggtcacatttcagatagttcacggtgaaggaaatattagatttggtccagatggtgttgatctgtcagattttgtaatgacatctaagggcatcgataggcctgcggagagaacatttcagtcaatttatagttggttgttgagaggatttagaatagaccaagaagtatacacaatgtcagtgtcagttgtagtgagtcgtgcaacagaaggttatttttgggaactaatgccgatggacagcactgatgcttggagacggtatgtggaaatggcttttgaacggtcatggcccctcgttatatttgtgtcggtagaagagaaagatataaatgtttcaatgcaaaccgaagatgtagagggtcctatcaatgcaggggatgttgttggaccatcgatgcaaaatgaggaaaatcaaccaagggaggagcaggctatgggcatggcggatgagggggagagagtcggtataattgttgatgaaatggagagggaagattcggataatgaggaagtggacgacgacgcatcatccgatgaggaaggtgatgtaatggccactgattgggcaaatgaggacttctctggacttgttatatcagagggtgatcatgtaccctgggagtataaggagaacgaggtaattgagggtgcaaggtatgctcataaggatgagatgaaggaggcggtgaagcattgggcagtttccttgcagagagagtttagggtggtcaagtcaacaaattatgtgtatgaagtgaggtgcatgaaggaagattgtccgtggcgtgtccatgcatataagggtaaatggaatgattattggaaagttagcattgtgaccgagcacaagtgctacttacaaggggtggagaagtatcaccgaaacatcacttcagcttttgtggcaagtgagatgtacagcagtgttgttggtaacattggctttgaaccaaaatcaattattaggcacatcgagaacaaattcaagtacaccataagctattgcaaaggcctggagagccaaacaaaagatcattgagatgaggtatggcacatttgaagcttcttatgataatttgcctcgtttgttagccaccattgcccagaagaataataatacgtactatgacctacatacatttacatcggttgatgatcgaacaaagagtgtgctgcaaagagcctttttctcattgggtgcttgcatcaatgcttttgtgcattgtcgacctgttctatgcatagatggaacttttatgacaggtaaataccgaggtcagatattgacagcaattgggtgtgatgggaacaaccaggttctacctatggcttttgcatttgtagagagtgagaacactgaaagctggtactggttcctagagagagtgcacattgcagtggtgcgtatgaggcccaacgtttgccttatacatgatcgtcatgcgggtatgttgcgggctattgactacttgcagaatggttgggatgagaagggacttccagctaagtggcctgatgttcggagtcggtggtgcatgcgtcacatgggtgcaaatttctacaagcaattcaagaacaagcatcttatggagctctttaagaggctctgtgcgcagaaccaagagaagaaatttaatgagttgtgggacaagttggatgagttgacaacgaagcaaacagatgagcaatctcgcagaccactagttgaaggtgacgagcctcccatacctcttggtgcattacatgatgacccaccaacaatgagaaggaggtcagggtcgtccatcagaaatttcactcagtggattgagaatgagcctaaggagaagtggtctctattgttcgacaccgatggatctcggtatggcataatgacaaccaatttggcagaggtgtacaactgggtaatgcgaggagttccggtacttccattggttggtattgttgaattcatccttcacggcacgcaagcgtactttaaggatcgatacaagaaaattggtccgtccatggccgataacaacatagtgtttggcaacgtagtgacaaagtacatggaagataaaatcaaaaaggcacggagacatcgagttgttgctcaaggcacacaagtgcatcggtatgaaataatgtgtgttgataggagcaggcgtggtatctatcgcaagcaagccgtgcaggaatgtgtcttgaaggcggatggtggatgtacctgcagttgtatgaagccgaagcttcatcacgttccttgctcacacgttcttgctgctgccggtgattgtggcatatctcccaatgtgtacgtctcaaattatttcaggaaagaagcaatctttcatacatggagtgaggagatatatgagttcaggatctcaggatcttacacaacgctgagtgcccaagttttttatattccagatccatctaagttaagggtgaaaaagggtcgacgccaaactagacgcatcagaaatgatatggatgagtcagaagcaggtgggaggactttacgctgcagcaagtgtgatctgctcggccatacttacaagaaatgcccgaagaatgcagaagttccaagcggcgcagatgctagtccatctggacaggcaagtgatggtaggcgaccacctggtgaaggaacaacaagcaggcgcgcaagaccaaggcgtcgtcgcgcagcaggcgattccatggtgtaacaatgctttcgatttaggaaataaaatgctgttgtgatgtaatgagtgttcggactaaatacttctatcgtgtaatttcaattcaatgttgttgtaatgagtacctccgactattgttgtactagtagtattgcgaattattcggtgttgtatcataatgttatcgtgatgagtgttcggactaaacacttttgtttgtttgtactcttgtttaatatgtgttagtaatttgcttatgaacatttattacttatgttgaactaattatttatatgtttctgatcaacctatttgatgcaggtatggcgtacgacacaccggcgctgttgaaccgtgggattgacaggaaccaccgctcgttcctgtcagcagtcgagggtgcacagctcggcaccttccgtccacgcacgtcgcgcgagtggttgcgtgtcgacccccgtcacgttccttggtacgcgtatgttcacatttcaactcaactttgctttgtgttgtacttatgtttgaagtttgctctatacaggttgcgtgcggcaggccttctaccactttgtaggcttgttgaggcggcggcggacgaccgtgacccagcgaagcggtgggatgcagaccggtcactccttgccgctcttatagaccgctggagacctgagacgcacacgttccaccttccctgtggggagatggctccgacactgcaggacgtgtcgtacctgctcgggctaccgctggcgggagcagcagttggtcccgtggacggtgtttttgggtggaaggaggatatcactgcgcgcttcgagcaggtgatgcgccttccacacctaggaccgaccaccacccttcctccgtactctatagtcgggcctagcaaggcttggttgctccagttcactgtaagtaaataagttgttattatcatacgtgcttatttgcgaccgaatgagtgttttgtactaacatttcattcttaattgtaggcggaccttctgcaccctgacgctgatgattactcggtccgacgctcccttgaggcgtacctgttgtggttgttcgggtgggtgatgttcactagcacccacgggcacgctgtggacttccggctggtccactacgcacggtccatcgcggatgctcagccacaggacgtgccgcagtggagctggggttctgccgtgctagcagccacgtaccgtgccctctgtgaggcgtgcacgaagattgacgcgggagcgatcatcgctggctgccctatgttgcttcagctttgggcagccgagaggtttgccataggtcgaccagtggtggacagcgcaccctacggggttggtcgcagcgcgcagtggccagaggacggtcccacgatggggacttactggtgtcgacgtggggttagtgcaacttcgctgcgttataagtttatcagtcgtctttttttttcttcacataacatgtctaattccgatcatgtttattgcagcgtcgttacgctcacgtccaggtgagacgtggttacccggacttcgtgttcgagtttgaccgtctccagccgagcgacgtcatctgggagccgtacacagaagaggccgtcgctgcgagagcaccgctaggactttcgtccttgtgcacacgcgaccaggcttactggctcaccatcctgccgatggtgttcgacattttcgttgagcctcactgcccgcagcgtgtgatgagacagttcggacttaggcaggtgtttccgggcaacgtgcagccgaccgtcctccctgccgaccactcgtgagttcggattgttcatttctaaatttttatgataattacttcatcgagccatataatttacctctcttcacaggttgactcgacggggacagctagcaggcgcactttgggctccacgtgtacagcagtacgttgatgactgggtgttagctacagaggaggtgatcaacgagctcttcccacacacggaggagaactaccgtgactaccttcgctggtaccttcctcgcactcgtgcgcgtgtgaccttcactccagacgccccagagccgcacgttgccgctgtcacggacgcgtatcccacgcaccgtgaccgagactacttcgtggcggtacgtccaatttgtattacttcttacaattatttcatttatcttgcataatataggacaactactgaatttgttatttccatcttgcataggctgatgccgcacgggatatcagtgccgatatcaccgcagtccaagtgaggttgaacagaggtttgcacttgactgacgttgagtagagggtgaccttcgaccggatgcaggagaagatgcgtccggtcatgcgcgtcttctcctgtcgcagcgccgtggacgtcgtacctccagctggtccggtacaaccacggcctcgcgcgcctaccgtcggagcaggacctcgacctacggcacctatttcgcacggtactgctcagcccagaggtttcttaagttttgtttctgtttttgtacgaacacatcaccccgtcgtaacttgatgatccatcctcgcaggacctcgtttgccttcgagcgcccctagctttggatcagtgcgacctacagcaccggtttcgcacggtacagttcagcccagatattagttcatttttgtttcagcttttgcacgattatgtcaccatgttttaactgcacgtttcctcatcgcaggacctcgtctgccttcaagcgcgttcgcaggcacgaccggcgcttccacgagctccgcaggggcgttcgccacctcttcgggcgcgttcgccagctcttcctctcacggagcgtcgatccctcgcccacacggtactttactttttattaatactgttaaatacctgtatgaaactgatggtccttgtccagcaggatttgcagccgggatcttcggtactggggcctcttcgtctcacgccggtaggactggtcctactagccagttctacgacgacgacttgcacggtgcagaccaccacgacgtactaggctcctctcagcttggaggagctccagaggcgcacactcaggagcagccagaggtcacacctgtacaggcaggacgggttggccgtgccgtacccccggaccgactcacgtactcccacgggcacattagggcgcagggtaggagggacaggggtaagaggcctcgtcagtagtgttctacctcttcagtccttatgtgaccgtttcttttggcttacaaacttgtaaagcagtactacttttgctattactactgcagtactacttgtgtttgtctcgtctacatagttcttttcattcatatggtgctagaacaacttatgctcacgacaacacactttcggcgctgcacggtagtgtcagatccagtagcgcgcacagtccacaacagcacacatgaaaagcggcagctcgagttatcactatcaactttcggcgctgcctgtttacataaagtgaatcacgcccacgcgtgattgtcttgtcacatctaatgaataatgtatctcattgagttcacatatattgcagtgaaaacgacgctatataattgacaatctgaaggcaacctcttcatattttctttcccactagcacacaacacacgaaaatggaagcctattcattggtaatacgtaatctagatttgagattatgtagaacattcttcactacaattttacattttggcagcaaaccaaatatgatcaaatgcaattttaccttaccaaatatttggtcgtgaagaaaaatttggcactaacaatccaaatatgccctaaaaattaataaaatatttgtacggtaacaaaatatttgtacggtaacaatccaaatatgccctaaaaaataataaaattgtattttaccagtcttggagattttaatcttgtatagttttcaatataaaaagatttgataactattgatatttatacaaaaatatagagcacagtataaaatcgccctagcggagggcggcaagggggccccctgcaaaattccatgccccctcggcgcccatttgcaggcggccccccgcacagtacaaaatcgccctcgcggagggcggccaggctgttcaacgcaaatttctgagccccggcattcatctattaccaacggtggagggataaacttcactatttctcactggatctgcagctttatctaacgttcatactatggactgcctttcaggtagagtccacatatctttatcacacaaaaacgaacacatccaactgaggttcaagtcccactctggatcaactactacaggtccaaatactctacttattacttccaatgaaagcctttcgatgaaactcattaattattttttcttctattgagagacaaatgctttatccactttttgtcccgcggtcaacacaaaatgcattgctaaagatatgtgctgctataacaaacggatgaagctatcaagggaagtggagaactacgt

SEQ ID NO: 9448 - DNA, 71438 bp, Oryza sativa
ctagctagtatttttgcttcttcttgtgaattgtattctgagaacaataggtcatttgcaatttgcttcctcatgtttgggatatattctggtctgatcatatctttcaagtgcatccttgggttccaccattccatacacttcatagcgtagattccgcaatcatgccttgatgagacaaaaacaaaaataaatcatttaagaaaaacaaaatcatgggaaaaaaagggaggagttttggacaaaaaagaaaatgatatgtaatttggggatgtttgttggggttgataggtagttacccattgttttggcgagtaatttgtgggtattggatatcaaatttactaaagtctttctccacatctgagaattcttcccacattgcaatgaatcctggtatctgtgtataaacaagaggagcatgaaaaaaaaaccagaaaaaaaatcagtggatgcgtctataaataaattgtatggaaaaaaaagaacaaaatttgtatagctcaccagtagcccttgaattttcttatgatatttgctgttttcatcataaatggagtccaggaagacaaagtgatgccccttgatgtccacagtaaacacaaaccaatgattgtcatacaggcatgggaaaataagctacataacataaaaaccaagggggcatcactttatgttaatcacacacacaaaaaaaccgatcaattttatgtttgaaaagaaaaatgtacaaaccaagtcatagtagtgcagaggtttcttgttcctagcaagtgtaaacgcttgtcttgcgcaattttcatagtcttcctcttttccagcaccttcccaattcttcaagaaataaacctgtggaaaaaaaggtagagaattttgaagtgatacaactggagatgagaaaaaaaatgtatgtgatacaaagtatgaaaaaatcacatacactacttctgtggaagaagtaaaaattcatgtattcattttctttgttattctggtcgttggcaatcttcttggcatacgcgttgaggacatatgtatccaccactccccttggtgataaatatttagacaatgatgaccatgtgacttttacattgtccattagaactgcaaatttactgtaccagaaataaagaagataaatgcttttagtaatgcttagtactcttaaggcagaaagagtacaaaacaaaaaagttcagattacttaatttcagaaaattggaatagtcagcacaagctctttgttatgcatattatgaaaaaatgcaaaaataatttgtaatgtcatagatttttcaccttctttgcatgccttgttgtgttaaacaaaaagtgataaactttcatttggttgttaatgcaaaattcagctgctcctaccacttcaggattatcatacaaaatataaaatctaaagcaaaagtgggaaattagtgcgacatgtatcacttcagctgtgcatgttcgactctgtgttatgaacaacgtttgtaaaaactacagaaaaacaccccacctcccattcctttttaaataaaaaatgcttgaaatgatcacaaaatctaaaaaaagcaaatgtaaaaaagcaaccattataatgttgttttgtgacacttactttttatattgttgcgtctcaccaatgctgagtatgttgttgtagtgattgagttcagctgccgagatggtttggtgccgtgtgtagttgtcatatggtgagctcttgtatttacttggatgtacaattcttttagggcgataaagattgtgtctggtaccagaacagttgccagaagcatttagtgagtcgatgattcttgtcattgaatattgtctttcttctgtttgagcatgttgatttggttccctcatttatgttattcttggagaattcatacctatattaggtgatgattgtgaactctgcattaaaaaataaaacaagtgaaaaatgggaaaaaagagaatttattgtaataatgtttaagagtataagacatagttttatgtcatgctgattgaaaaaaattaagcaaaaaattgagaggaaagtacttacaatttgtattaccttttttgtagcaggtgtccttgcagaagtaatgtttatgtgcagtggtgtttgagggctactttgctcattgtttatttgtggttgctgcaaggatgaaaaataaaagtaaaagaaaaaggacacctgaactgagaagaaaggatgtgaactcgaaaggaagtggtgaactcaaagaggtagtggctctgaactgagaagatgatgctctgatcaaaattgcaattttggactgaccttccgaaaaccaacaaacctgttaggttgtgctgttatatttaaagtttaggatcccaagatagtattatatttttcaaactgccagctttttgctactagtttattcctccaatatctacttctatactactacctccatctcataaatataaaaagaattattccttttttgcataagattaaggatagcaacaaaaatactataataccaatgttaaaatatcagaagttcagaaattgttcagtaaggagcatacccaaaaaagggttgatgtttgaaaaaaaaagacaagtaaaaaaaatcagaggttattaccgcacgttgttcaaccatatcgatgttatctgatggttcctcttcatataagaattctgcgaagtcatcttggtactcgttttcatcacagtgctgtccctcaagcctcctattccccatgtttgcagtgaagtttgctaacaaaaatcatccacataaaaataaaaaaaagtaacaagaaaaaacatctaacatgattgtgcaaatataaatttggttagttaatctttttattcttcctagacattttgattcgccccccttgattgttactacttatgtctataaaataaattaatgatagtacaaaaaaatcattttatgtgtacagagaaaaaaggtcaaagttttacctgataaatgttgaactccaactttattgtttatgcatgttttgggtgtgttcatgtacctctccccctgcgtcacctgaatgctgctatgttcaatgtccatgatgtttgtgcctgatgttgtttgggacaagaagtgcccaaggctggcacttttgtttgtttttgatttatcatcaaaatgatgtaagcattcaaatttgggttgatgtgtgtgagttacatgagaagaaatgaaaaagttacaaatcgggatagatcaaaaaaataaggtacattttttgtacattaaagtgcaacatagatataaaaaaatgttagtttatcagtcaatcaatgctgcaaaaattgacaggattaaaatcaaaacaataaaacaaatcagtacacagtactggtagaaaaaaatgtgacaaaccaaaattttatgacatgtggagtttagattttgttcttgatgtgtataagataagatgacactgtaaattaaaagatgacccaaaaaataaaagtgatttagaaaacacctgtatgctctagtttcatctgttttctaaaatttgaggtgttttctaaaacaatgtctatctgcttctaaaaaaatcatccacacatatataatatgtacaaacaaaattatggaccagtgtacaatgcaaaacaaacattatataaaaaaatagaggtgtataatacacaaaaataagagaaaatgaaaaaaaagcggtttgttgctcacaaaacaaacactaaaaaaaactaaaaaatactagtgctttaaaatgcatgatatatgtttgatacatttgtgctcttgtttggaatgttgtctgattcatcttgtgtaggatgttggctcttatgatcttctgaagagtttgaataattcacaagaatgaacttcgtcttatcctaaaaatattaaaaaagcataataaaaaaagatataaattgattaaaatcattgaaacaaaaatggaacaaaaaaatattttttttaaaaaagtacattatgtagtcgaaaaaaatcatttcctattaccgttgtgtgacctgttatgtcttcaacatcatatggaccctctatatcaataacaaactatgtagagttgctttcaagatccttggtgggctgcacctttttttgcaaaaaaagaaagacatgtagtgaaaagccagggggaaaaaaatataatggtttgaaattttgactcttgcctaattttgaattttacctcctcctttttggctggtatagtacagataggttccacgaaaagaccatccttgtttgattcttccttgtctggttgagtactgataggttgtgttgcttttaagggctgaaaaaaatgaacttatattatgcaaacattttttgtaattttttaatccatgaataatgtattgtgtataatgatatgacataaaaaagtaatagtgtttttacctgtttccttactgctttgcgaatcttttggtcagaagaattttttttcgatgggctaattgatacaaccgacaaaggggatgctgaatgtaatatcttagctctagtcctggatgccacagagttgtttgattgctgactacaaacaaagtccttactggatgcttttttatctggaaaaggattgttttagagtgaaattatgctaaacaagacattgcttaagcgtgctaaacaaaagataaaaacataccagaaaagaaactgggaaaaaaaattgacaccaagaaacaaacccaaaaaattatgtttgtttcttggtctcaagtaccgtattcgcctataacatgaatatttatgggagcatgacacttttgttacacaaaaaaaatgaacaaaacaagatattgctatagtacaaattgaacaaaaaaaacctgcatactgcgtttctttgcaagcgttgtccttgttgctgtttgactttgagttttcttgttcagtttgttttgatggtggtgtggtttgtagttgggaacatataacattctctgaaaaaaagtttgtttcagaaaaaaagtattactgtcaaaacagatattaaagaaacatctaccagtaagactgcataaaaaaatggagtagatggtgtgcagtgagattatattttcagattcaaaaaatttcagcttgcaaagctacagaccgtggcatagctgaatcctggagcatattatagcttaaaaaattggtgataaaaaataaaactaatcagtgtgatccatgggtagcctactggaacaaaaaaaacaagatttatgtgaaaaaaattgaatgaacaacggatagttgttcgctttgaaaaaatttaattgagcaatagactaatagggctctgtatgaacatcctaatatatcttctatatttgtgaaatacagaacatatatttgggcctggtaacttatggttctggtaacattgagtactgacacagaactaggctatgcttagtcatgttccagattttaaagaaagtatacatgccaagtaaaaaaaaatgctatagttcagaatgaacattttttttggactggatagattgatattagtggtagggaaattttgcttagcattggcacaaattatttgatctgttgtgtttgtgtgctatttgtctaaaaagaaaaatttacaaactaacagaataataacatatacctgtagggggtgctcctttgctagtgctggtgttgttgatgttagactttgtttcatgctctacagttgattttgtttgtggtgtctttggtagttgggaacagacatcagtgttgtttgggtggttttgttctaggggtggggcattaccattatgtgctacattgctgccaccctgctttcttccctccttgatcttctcttctctactcttctcttctcttgttatggtgctatctttttgtgtgaataggcttgcttttgacatgtagacgcaatccaaaaccttggcagctagttgtgcattttttccgtatgttgtgtcagaaagttctcttgtgaaccacttgcaaactgtggaaatgtcatcaatgagctacatttaaaaaaaaaacacaataggagtgactatattggagcatacatatacaaaactaggaaaacaatttttttaaaaaaacagagcatttggaggagcaaaaaaattacccttgggttaaatgatttgctatggtattgctggagagcatcgctgcatgacatgttgctattgttgccctgttactcaatgcagcgggcccctgaacatattgcgtcataacttaatttcttcattgctttgatatgtgaaaaaaaatagagtatgatctaagaaaaatgaaacaaattgacacaaaataaaatttttctgttgtttttacttactggtcgctttccaaaatctcctgttttgcattcatccatttttgaatactcttttatcattccgcctttccaaacagagattcttggtggtggaccaattggaatatttctaaatccaaaatctttgaaatcaagataattaatctaaggaaacaacacaaaagaaaaaaaataagtcaatgtttagaaatattatgggtttaaaaaatgacttaagtaataaagaagagaagcatacagcaagtaagtgtccgcagccgccaagggttttttgtgacatcctgatttttgtttcagggtttataaattatttaataaattaataatagaatttatattaagtgttctttaatttacaagtgaagtaaaatgtgggaaataaaattttctaaatctaaagcatggatggatttaatttttttattaaattctccatgattaagtcaactctctgaaattttctcggatttttcagagctcaattcctaaatgatacaaagaacagttcagtaattatttgatcattaatgatctaattataattgttaagtgcttttcttgtttaaaatccttaaattataaattgttgtttaaaaggaattattagaaatgattttaaaagcctaaaagagaagatctaattttaatttgttaaatctcaatataaaattgggatagataaaatttcattaaatactttgcttaattctataattcctagatttttctgggatttatttgagctaaggaagtatttttaataaatggaattgcatttaagaaataatttaaattgaaaaatgtttttaaaagtcttcttttggctttgggccgaaagtcggcccaaaacctctctctttccttttctccctccccggccagttggcccaagtcggcccagtccgcgccgccgctctcctctctctctcagccgctgacaggtgggtcccgtctgtcaggcttgtcttcctcctccggccgccgccgcccgaaaccctagcgcaagccgccgccgtctccttccaaattcggccgcgtctttccttctccggctgaatcgtttgagggcaaatgatccttgagatctcctcttccttttctcttttggaatcatcgcctaattcggtttggaaactcgatggattcgagatcgaatcggattcctctctccctcccgaaccctaacctttccttctcgtcgccggcagccgtgggcctccgtcgccgctcgctagcccctttaaaaggacccccgagctcccctctacccgtcgcctcctttgccttagcctgccgtcgcgtctagcgccgcctccgcgtagccctagtcgccgccgtcgttgccgtcggttcagccgcgccgcgccgccgttgcagccgccgtcgtcggtcgctgttgccaccatcgggatcgccaagttgtcgccgtcctcgtccgccccttcgccgccgccgaagaccgccggagcaccgtcgccgtcgtcgacccgatctccgccgctgcttcttcctcgtcgccggcgccgtccgttgctcttccgccgtggttttggtcaccggtgagttcgccgcgtcgccctctacccgttggtgtcctccgtttgcgtcgtcgcgccgtcgttcgccggcgagcgtgcgccgcccgagccgttcgctccgccgagccgccgccgctgtcggtgacgtcgtcgctgacgtcatcgtcgccctctcccgtgagccgccgtggacccattcgatctcggccgtccgttttggatagggttgatctcggccgttcgtttccgtgaaccgctgccgtgcacccggtccaccgcaaaccctagccgctgacgcaataaatccccttttccttttcaaaaataattcattattgcgtcataattcaattaaaatccatataaaggttttaatccgatttaatctttaaaaattcataactaattcatttgaactcagtttaatgtggttcaagttgcaaaaattataaaataaagatctacatattaaatttgtccataaattgaattaaatttatttaattctttttaaatgggctttaaatagatttaatcttataaaattcataataaattcatatgaaatcagaatgaggccgttcaagtctcataattcatctaaaattatgatttacatgtttgtttactttttatgtattgtttatttggtttttattagtctttttcttcgttttgcgtgttagcttgtcgtttccgtcgttccaaaggttcgcgagtgcgtcggaagtgttcaagaagattaattgaagaccgattattgcaaggcaagtcacacagatcctaaacacaatcctttgaacatgttgatcctatatttaaattctctatttatttcaactgtgcatttattttcgaatgtcattgggtggaattaacctattctttgttatggcccttttgttcttgattactttattccttgatacctagggttattataatttgactagttgagctttatatatcagttcaactagatattagatgtgattgcttagccatgctcagaaacattagcacactattgggataacttatgattcattattatttaatgatggtttaatgatagttcacgatggtcaatcgtgattggttaattaattacttgccaactaaaacctgataatggtgggttgtgagcacatggttttgagagtcgtgctcatgacaattaaggaccggttcgcgagctactattgtgaaacattaaccgtgccaaccacaagccagcgtgggcaacggctttaccttttgtatagcatgattcattacggagcaccagactgagaagtggcggagataagcccacgggggtcgctggggagtccatgccttgttttataagggggtgattatgatccaggaatggtgcactgtggtgagttgtgttatgcagagggtattgtcacagcctctattcgggtactttccagtatcgcgacgcatggtagacatgatgttgaggctgtgtcttgtgggtacagtggtacacctctggccagagtaaaactattcgaatagccgtgcccgcggttatgggcgagttgagcaatgtttttcgtgattagtctcacacctctcacaataattatggatgttatacctgataataatttgcttagctcctggtttggagattagatctgtacagccgggtatggttgttcaggatggttgggcctgtgcagcatgggtgtgctgttcagtgttgattaaaatttctgattaattactccactgttttacttctcttaaatgttttgctgaatgctgcttttgcaaatgagcctatattaggccatcctttggtattcttgtgcacttgcatatttgctgtgtggcttgctgagtatgtcatatgctcaccttgcaataatcaatcaacctcagttgaagaaaaaggatccagaaggagaagacgtttggcttataccccagttgagctgcctgtgggagtggagccggagcttcgctagattttattttccgctgcaattttcttcttggtgaggactaagtgcctcttaagtaagtatttatcgttttagttaatttgatgaatctgtatattaaattgtcagtttgtgtacctcggctgattcctggacgaggattttatgcacaaataagttcggaaattactagtgaatttccgggcgtgacatttttgatgtttgttcctttgattttctctccttttggaacttggctatgtatgtcataagccattcataaacaaactttgaccagttccactttgagctggacttgacatcaatcagaggttcaaggtattttgggttggggtgagtgcctgagttggggcaaagaaaggttgatagtgcaaccaccatgaaacaacgtaggacatcatcttctgatagtttgttcacacccttgtcactaagcaacttagtgccaaagaaggaaattaagggttttgtgctcccataatgctgatgaaaaaaatgttttcctgcatcattgtcatgcttgatctctaaacctccatttgggataccaagtatgaagttggtggtgtttggattgattggtatggatctcccattgacaactatatctgagcagctgacgtcagtgtgactagctatccatttgacaaaagatagtggtatagcacacctttgaaagtttagaagagaaccaaaagcagaattctcaataattgacctttgctcgttgctgagcccttcaatcaaattggaaaagtatgtgatgtttagtctgcttcttggttttggggactctgcacttccagatttatcttggtcatattcaagttttgtgcaacataaactaattagcatactgggttgtggaaaaaaatgtttaggaaaaaaagacagaaagcgataccttttgtttttgtctccttactggtttgtctgacctacctcttttccttttgatcgatcctgaaaactaacagaggcaaaacaagtataaagttattgatagctgtctgtggtagtagaaaatgatattttggaaaaaaaaggaagaaacatatataccagatctttttttgagatgtatttgtcagaatcgctggtttcttcctcttctgaaatagagttggcataatcggaatctgccaccttgttgtccgacttgctatttgatgaacattcatcatctgatgatgtactgtcacttgccatgctgttaaaaaagaactagagaagtaagtacattaaaaggaaaaaagagggatcttgtcaaatgtcttgatattttcatgtgtaaccaatcaaaaccaaaaaaaaaaaactctcaatgtcctgataggctgctaagccacatgttaaactgtgccaaaaaaaaagaaccagtgccaaattgaaacaaaatgtataattgtgaacccgtttgatacccctcgcacgaaatcttaaaaaaaaagcaaacaagatgcgagtggtatcttggtgctaactcattttaatcagcactgaagaatttttagcaaaaaccaacttgcatgaacttaacatcggcaaaaaaaataataataaatgttttttgaagctctataactgcaaattaatgtgttgaaccaaaatttgattacagttacatatacttgataaaatgtcaactacaacatcttggtattgcaaaaatttgtgttaactattcgcatgattatagttgcacaaaatcataattaaagttgcacgaattactaaccaaaaagttgcacaacattaaaaaatggcaactgtaggaacaggaaggtgcaatttttgcatataaaaaaagtaacaaaactggatggatatgacattattcaaccgcccacatgtcctagcttaccggcaaatcaaaatcttagcagaagaaaatgtattcttcttgccctgcagcaagctcctccccccccccccggtagaatccaacgctccctgaaaacaaaaatcgtagtgagctactacatctgagcatacaatcagtctgaagttgtgcttgtttataaccaaaattaggaaaaaaatcatatagtagtcagctaaaaaagaattagttgcacaatttaataattgaaaattgcatatatttataacataacttgcgcgaaatgtatagtattagtttattttgctatttggactatgctgctgggatgtagatggttcaagcgggaaaaaacagtacatgagaaaaaagaggcacacttgctgtcgtgtgttgatgagaaaaaaaaagatacaacataaaaagtagtatgggttgcaaaaagcaaaaacacatgaaaagttggacaaaattactaagaaaacaagttgtctaccaaaaaaagtccccagttgtatgcatgttttcccaaacacaaacgctatttatcaaagtaaacggaaaatttggctcaaaaaacattagttgcacaaacttattacacgacttgcacggaaaatcaaaatggctactacaatagtcagggagtgcaactagcatagatacataattttcagaaaaagaaacaatgaaaattttaaggccatgtgctgatcgaaagcataggttttagttaaggccatatttaaagcagcaaataagtgaatcattgatacaacataattgtacatagtgtatgaagagatatgctttatactgtcaatttatacagtactatagcaagttatactgtccatttattctctatattttagtttcagattaatcctactgttaacgaccaaatttggtaatatcagcatcggaaaaggagattagatcaaggtggagtcgaaggcggagattgatctgaaacagagcaagaatcggctgaagtccggatcggctacgattaggatcggctgggtctgagtcagactaggtgagccgatgtagccgattctgacagtataatttggtgtatgacattgggttgaattgaggtacttcaagatgattgccgcacatggatagagtcctgagaaggcaattgtatctattaattaggatgttttatgtaacttccttagatatatgtttgggcaaaagtctgccgcaaagtcggctagcccaagcactgttaaagaaaagatccagaagttggggttgactgacgtcaatgaaggaaacgtcgtgcccatcgatccagagaaattcacacctgaacagaagaaggattttgaagcaatgttgtagcatgcccgggatcagttcttgaactcattcatgcagacccgcaagggaacattggttcagaagtataaagtaaaggtagttgctgatgatcttgggaccagttcttccaaaggtgaagacgggaaacaagctccagatggctcggctcaactgagtgacaaaggtgctaccgacggttctctaggaagtcaaggtgacaactctcaagggatccatggagttcaaggcgatggagtgcatagagttcaaggtgatgctgctcaggggttgcaaaggggaaatcttaatcagaatagtgatgttgcacaagattttttcaataatttccaagaccgggtcgactatgctgtgcaccatgctttgatcaatcagtctggggtgttagtcaataccttatcaaacatgatgaagtcaatagccgatggatcaatagctgagcatcaggctgtaggcccagtttatttgcaaggaggtgtctttccaaattatcggctttgatcactgatgcccagccatctattcagccagtttcccccgtcgcaccatcatgtcagccgacagcgccggcatcgacccccttacctactccgtcagcattggcaccaggccagctggtgaaccctcagttgttaatgagagagcagccacagcatagtgggcaggttgtgaatcggccgacgcaagatcaggttgctgccatgtttctgccgcctcaacctgctgttgatccaatacagcagcagccgattcaatagacactcccgattcagcaggttgtacaacagattcaggtggccattgagggaggcaggattaagtttgatgattccaaaaagccgatgagggtcgatgataaccaatttcccgttaacatggtacacaaagctggccgaacagctgatccggggcgcatgaggggttatcaagtaagttcggctagaattataaacaaatgtcaaaggaaatatgacaagcaacaggaaaggcatcatgaagaagataatggtggctttgatcctcattggggctgtgagttcttcaggttctattggaatgaaggtatgaggttaccatctatcgaggattgtcctggatgcagtgatgttgcagggggttcaagccgattgtacgatggaggcagttggccaaaacagacaagagtgcctgttcatcagagattgggcccagtaaaccaacgtggtgattcggaatatgacgaaaataagaagactcaatggtgtcctcctgttatttttacgaagaatcagaaaagaagggttcaaagattgaggagtagggaacgcttccaagaggtcgagcaagaaattaatcatcggctgaagaaaccaaaaccgaggcaggagtggagtgttaagaatcaggctcctgtagccgatgatgttgcagctgatgaggcaaagaggttggcaaaaggaaagagtgttgtgacggcaccagttaacatggtttttaccttgccagccgaattcaggatcggtcaagccgatgtcgacgaggtggaagaggaatcggctaagttggttctatcaccagaacaggcagtgttcgagaaacctgaggggacagagaatcggcatcttaaaccattgtatataaatggctatgtcaatgggaagccgatgtctaaaatgatggttgatggtggggccgcggtgaatttaatgccttttgctacgttcagaaagttgggtagaaatgccgaggatctcatcaagacaaatatggtgctcaaggactttggtggcaatccatcggaaaccaaaggtgttctaaatgtgaagctgacagttggcagtaagactattcctaccacgttttttgtcatcgatgggaagggttcttacagcttgttgcttggaagggattggattcacgccaattggtgtattccttcaactatgcatcaatgcttgattaagtggcaaggcgacaaaatatagatcgtaccaacagacatgtcagttaatgttaccagtgccgatttagctctttgggagatggatggccttgattgtttatctggaaaagtttggaatggagattttctaaaagtgtccgattctgatatacagccagttgaagatggagaacccaagctattattttgagggcgtcgtggagggttcaagtgtctacactaaggatacggtagatgatctcgatgacaagcaaggccaaggttttatgtcgaccaatgatttggaagaaatagatataggtccaggcgatcggccaaggccaacatttattagtaagaatttgtctccagaatttagaaccaagctgatagagctcttaaaagagtttagagattgcttcgcttgggagtattatgagatgcctggactcagccgatcaattgtagaacatcggctacctatcaagccaggggttaggcggcactagcagcctccgaggagatgcaaagccgatatgcttgaacctgtcaaagctgagattaagcgtttatatgatgctggttttattcttccttgccgatatgctaagtgagtttctagcatagttcctgtcatcaagaagaatggcaaggtgagggtatgcattgattttagagatctgaataaagctacaccgaaagatgaatatccaatgccagtagccgatcagctggttgatgctgcgtcagggaacaaaattttgagttttatggatggaaacgcagggtataatcaaatttttattgctgaagaagatatccataagacagcttttagatgtcctggtgcaatcggcttatttgaatgggttgttatgactttcggcttgaagaatgctggagctacatatcaacgggctatgaattatatttatcatgatctaatcggctggctggttgaggtctatattgatgatgtggttgttaaatctaaggaaataaaagaccacatagccgatttaagaaaagttttcgagaggaccaggaaatatggcttgaagatgaatccgacgaagtgtgcttttggtgtatcggctggccagttcttgggatttcttgtccatgagaggggaattgagataactcagagaagtataaatacgatcaaaaagattaagcccctagaaaacaagaccgaattgcaggagatgatcggcaagattaattttgttcgaaggtttatttctaatttgtccgagaaattagaaccttttacaccattgttgagattgaaggccgatcagcagtttacttggagggcagagcagcaaaaggctttggataatattaaaggatacctgagttcccctcctattttgattcctccacagaaagggataccttttagattgtatctgtcggccggtgagaagtcaataggctcaatcctaattcaggagttggatggaaaagaacgagttgtattttatctcagttctcgactcttggatctagagactagatattctcctgtggagaagttatgcttatgtctatatttttcatgcacgaggttaaggcattatttactgtccaatgaatgtactattatatgcaaggccgacgttgttagatacatgttatcggctccaatattgaaaggaagggttggaaagtggatattttccttaactgagtttgatcttcggtatgagtctccgaaggctattaagggacaagctgtagccgattttattgtggaacatcgtgatgattcaatcggctcggttgaaatggtgccatggactttattctttgatggatcggtgtgtactcatggttatggtatcggcctagttataatttcccctaggagggcatgttttgagtttgcttatactattacaccttatgcgactaataatcaagctgagtatgaagcagagcttaaagggttgcaattgctcaaggaagttgaagccgatgctattgaaaacattggggattctttgctggtaatcagtcaattggcaggggagtatgaatgcaagaatgatacgttaatagtttataatgagatgtgccaagaactgatgaaggaatttcggctggttactttaaagcatgtatctcgagaacaaaatatggaagctaatgatttggcccaaggggcatcggggtataagccgatgatcaaagatgttcaggttgaaattgcagcaataacagccgatgattggaggtatgatgtgcgtcaatatttacataatccatctcaatcggcttctaggaaattaagatataaggcgttgaagtacattctattggatgatgagctttattatcagatgattgatggagtgttacttaagtgcttgagtgccgatcaggctaaagttgcaatcggcgaagttcatgaaggaatttgtggcactcaccaatcggcccataagatgaagtggctacttcggcgtgcagggtatttttggccgacaatgctggaggattgcttcagatattataaggggtgtcaagattgtcagaagtttggggcaattcaacgagcgccggcgtcggctatgaatcctattattaaaccgtggccatttagaggttggggaattgatatgatcggtatgataaacccacgatcaagtaaagggcataagtttatattggtggcgactgattatttcaccaagtgggtggaggccattcctttgaagaaagttgattctggggatgcaattcgatttgttcaagaacatataatctaccgatttggtattcctcaaactattacaacaaatcaaggttcaatcttcgtgtccgatgagtttgttcagtttgccgatagcgtgggtatcaaattgttgaattcttcacgatattatgcacaagctaatgggcaggctgaggcatctaacaagagcttgatcaaattaattaagcggaagatttctgattatcctcggcaatggcatacctggttggcggaagcattgtggtcttatcgtatggcttgtcatggatcaattcaagttcctccttataagtttgtttatggacatgaagctgttttgccatgggaagttagaatcggctctagaaggatagagttgcaagacagtttgacagccgatgagtattataaccttatggccgatgaaagggaggacttggttcaatcgcgtttacgagcccttgctaaggttaccaaagataaggaacgagttgctaggcattataacaagaaagtagtgcctaaggatttttcggaaggtgaacttgtatggaggttgattttgccgattggaactcgggataacaagttcggcaagtggtcaccaaattgggaaggaccgtttcaaatctataaggttgtgtctaaagggacatatatgttgcaagggcttgatggtgaggtttatggacgagcgctcaatggcaaatacttaaagaagtattacccaagtgtttgggttgacgcatgatcggctagtgttgctgatgcatgacagccgatgtgttttacatcgtcttgagatggccgatattgttatatcacccttagtcatttttctaattgtaatcggttatggtttgccgatatatataatggccgatattgttatatcgcccttagttgtttttctaattttatcaatgttgttgacattataaaattggggggcacatatatacaaaaaatgaaaaataatgaaaaattagaagttatgttaatcggcacaaaggattgttcaaacagcagggttttaaggtatcttagccgattacaagaatttctaagtcctattacacaaaagttattgagacaagtactgctggatagccgaaatagctctttgcctaatttgttcgacttcttcaatggcttgggcatcctgagcatcagtcctaggaatgatcttcagggacttggttaggtcagcaacattattgatagctgatttgagccttgctttttgctcttcgacagattttgggagatcggctagctttttgtgctccatatccaattcagcattgcattcttcaagctgtgccaagagatcgatcttgcgggcttcaagccggtcgatattggatttgatcggaccttcggatagctgatcgagtttgatttttcttcatgcacaagctgccgattgacttggattgtggcttcaatctctttacgctcacggcgttcggctaatcttagcttggctttttctagtttaaattgatgttgctcaagataagcggctggagttaggacatcggccagttcttcaggaattagagcttgaacttcgtgcaatcgtatcctaatcgatccatagtcgaccactaagctatccagagaagaggcctctagccgacgcgagatatcttcaagtgttctctttgcatcgtcagataagggagctacagctttgcttgaagtatcttattctgcctcatcaagataatctttgatatcaaaagaaaagagatcggctagaacctgcaggtataagttcagaaagtttgagagctaagtcaatatagtcgatctaaattcttgcatcaaaggaaaacttactgggatagcaggagcagccggttgttcttcttccacaatatgatgactccccacggccgatggagttcggtcactcgatgatttttgtacaggagaagaaggagtaggaggaggctataaaaagacaagtgttagacaaaatcggctgaaatcaactagtaaaattgggagtgtcttactggtggagctggtttgagaattggtgctgccgatttcttctttatagcagttttcttcttctgcaactacaaaacctatgagtagtcggctgaaaaataatgattacaaaagggtttgcaaggaaatatgttttactctgaagaagtgagtgggggcagaaggagttgaaggtatctgcttaggcgaagccgatggtgttttttcagtatcacttacttcggctgcagcctgatcaacgtcatcctcaatatcttcttcatccagagcttgttcaatggatggatccaaagcaggcaggtcgtcggttggcttggttttcttagacttggcctttttctttggagctagagtcaaggtgctcacagctgatgatctagtttttcttttcttggttacatcggttggtttcctgatggcgccttggaggagggttgagaccttgggggcgtgatagccgatgacagggggagacaatccgcctccattaggaatcagacctggggcatattcaatgttcctaccactattgctctgatatttaggggaggattctgttgtctaaaaaaaaggaacaaaagattagtcaagtaatgaatcggctaaccgttatgaaatttagtgatggcaaagtttacctggggtatgacgtcagggaatagatctgtcatgtacattgtggccaattgacgaaatagatgcaacttccattcaccctaccatctgtcaaagttcctgctcctgaatccagctaactcaatattgtcgatactgcctaagggaggtccttggaggttaagctgtcgatccatcattagagttgaagaaatttctcctcagcattggatcttgtcagcaaagaataagccgattgggagttggcctaatccaagttgtctagctgaactcatagggtgatagaattcataggagacttggatatttcttccttggtgaataccgacaggtaggatgcatgggctgattgcagctgtaaagacttccttggacgtttgatatctttcatgattgatgtcttcaaatctgaagtctaatgggagttcaaggtctgctgagtcttcataaagaaaccaaactcgggcatctttctggaagccttcataaaagctgcagaaccaatctttgagcagctcagccgatagttttgccccagcattggctagtgtggatgcatattcaacatatgacatgcatctgcgatgggtgcgttcttctccatcgtcttctacaattggcttcaaccttgggaattcagcttctgttacagatggccgattgacaactttcatgactaccaggtttagccaggtctgcagtagccaccatggtccacctgctccaactattgagccgacggctatcttagccgatgcatgcattgttcaacatttggtatagatagccgagaaggattttgcccaagggaaattgtttctttgattctaaggcttcggctacaaattgccaattggttgtgggaccacagctggatccacagaagagaaacttttctagccacattagcaagaaagctacgtgctcccgaggagtgacaggccctttgcccatgtatgccactacataatcagaccaccctcctatgcttttggtcttgaagtcaaattggttcttggtgttcatactcatagggttagccgatgaagttatatccaatccagtaatcatgatgatgtcgatcaaagttggagtcattggcccttggttaaataagaaggcattaatggtgttggaccagaaataggtggcggcagccatcagaggttcatccttagcagaattggctatggtgagagcaagcgcttggccgatcccaatctcatcccaatgggttttcttactagccgatatgcgttggtaccaggtggtccagctcttatcaggggtaggcttttcgagagatggccaagacttgaaggtattcttccagtgacccaagttagggttggctagtctaaaggggattctgttggtttcaccaatgatgaaatcagtggggtcaagattgccgattgggccaagaaaatagtggtttttgtgcgataggctgggaatcgcaactaggttggaaaggtgctgcaaatccaaaggaatcgggaagcagaaaacataatgagaaaaggagaaatcgatttcatgcgaagaaaagggatctagccgatgagaacttacctcagcgtactcggccgatgccgcagtagacaggctagcggaagacgacatcgccacaggcggagatcttatcaaaagcgaaatcgcctggggatcgcttttccgtcagaggaatcaccggagagagaaaggacaaagtttcgcttaggcggtgaaaacggaagtcatagcgtgagattttttgagggcaacggttggtatttaaagtgatagaataacggtcgaaaaatggcagagtgcgaaacttgcacggagtcggtacacgacaaatccgaaacattatcaaatatcccggacttggggggcaagtgttaacgaccaaatttggtaatatcagcatcgaaaaaggagattagatcaaggtggagtcgaaggcggagattgatccgagaacagagcaagaatcggctgaagtccaaaccggctacgattaggatcggctgggtctgagtcggactaggtgagccgatgtagccgattctgacagtataatttggtgtatgacattgggttgaattgaggtgcttcaagatgattgccgcatatggatagagtcctgagaaggcaattgtatctattaattaggatgttttatgtaacttccttagagatatgtttggacaaaagtctgccgcaaagacttatggtatcttagagtttgttagagatagtggtcgtgtccggtatggacagatcttgtaattcttgggtataaatagaccccaagccctatgtaatttttaacacacatgttcaatacaatttcgacgcatcgccacctttttgctttagttttgttttgacgagttcttgctttcgggttgagctgcatcggtttcgatcttcaacaagaggtaaaacttgttatgacgacttgtgttctcgagattagtgcttccatctttatgacactctaatcttgtccatataattcgtcaagttatcatatatcttacataatctttggcaatatcgtcatctaacctacaatcggctaacatctgttaatagaaggcagccgattaggttaaatagcgacgttgtcctagattatataggatatctaccactttatgaaacacccagcggcttgattgtctagatattgttcttcttttcatacttaatgctgcatcagttgagtttgatctattaagtcgtgcttagaatatcaatctctagcctgtcctctggttgctgattagggtagcatcggagtttcagccgatcttatttgatttaaccatattcgatctttgtgcttcaatgacatgttaaatccgccctttatgtcaagatcttattgcatttaagtatattaagcttttgtttggtatattatatttgttttgatatctttatataaagtagtatcggagtattagccgatacatgctagatctatctgatcggctatgctataaacatatataatcctgttattaatatgtatttcgatctaagtgatttatactgtctcggcattgtgaccgatctatcccaatcacttaatttaagtatatattaatataagaactatatattgttaatatctacagccaatcgaatagatttagctccttactatctatttataaccaccgtcgattcatatatgacatcggcccaaagataaatgatatgtcatcggcacctagccgatcggctatcatttatagatttaaccacgaattctttgtctctatttcttgttgattacagcatcaaatcaactggcacgctcatacattcgaaggcgagctttggacctgcactggtgttaagcagatctcccaggcctcgtgttttctatcaacacctactaattccgttaatctcactctcattttgtgtttcccactgtcatttgctgagttgctaatgtaacacaccgatgctttgcgaatttgcgattactctcctctctcaatgctctgctggtaatctcaaaaagattaaacataattggtaggagcagagcctggagttcattttcagggaggcttatctcagattgatcactgatgaaatggaagcaaaagtgtcttagtatgtcacagttgagcaggactaccgttaaaaaaaataatacatagcacacaaaaacaaaagatagctttttttgtatacaagcacaaaaaaatccaagaaaattgtggtctccctgtatagagtgaccactgaaatggactgattaactcaaaccctctgtgcacaaaatggatctgacaatgctgagggacaaaaggtaagagcatttgtagggatttaatgaaaatattggttagttgttgagctcgaattgctaccaaatccctaaacccctttctaaaatgctacggcacagaggtcatcactggcctacaggataaaacgactaaatctagagcaaaaccatgtgtgtgcctaacaaatgaagttagggagaaaaataattagggagaaaaaaccaggcagaggcacagcccacctcccgctgattatatcatacacgatgtgcagtaaaaaccctaaaaaaaattccccaactacaccggacaaaacatcaaagcacacacatcatgtgggtttcagatccagggatgctttgctcaacattggtccccccccccatcccgccctgctactcacgccctgcaccaactacggcgcacacgggttgatctgttgggtcggatcgtgggttttgttggcgacaaaaaaaggcccacggtctccatgtcttttttaatttgaacaagtatatatattggctatatgaaatattttgatttcacatgatgacttaattgttcaaaaatctgagtagtaaaaatatgtgtaaaattatcaagacgctgcaattgcatacaaatctatcgatttcttcatttgcaattatcaaagatattggaaattgttgacctaacttgttctgaattgtgctcccaggtaatcatgaaacatgaaactattgtctaacaaaaaaaatcataataacttcaaatttcaggagacgtgcaggagtctaaagttgccagatggctggagaatggcatggtaaataatccttaacatatgtttgacctccttaacatatgtttcatgaagaaaaaaattctgtaaatgatttaagctaatatctatttgacctcctctagccatagcttggtgttaatgttactactcagatatatagtcttgtttaggttcacaactagtttcaggaaactgggtgttcaggtattaaatgacaaaaaatataatctgttgtgctgaattaaattttcctctagtctcaggagaggcactcgcgtgtgggtttggcaaaaaggaaagctgaaaggagttgatattactcaaggtatttgagaaaaaaactaaacacaattgtacttacatttgactgatgtgaggcatttaatcttgcccctgcatattaactagagtaacagaagtaatatgaattggcacacaaatatattgacctctgaatcttgtacctctgctacgtgaggttttaacaaagtacacagatctgaatctgagaactgtaccttgcagctacaaagcaaactgctacaaaattgctgctagagttcagacaaaattaactattgacaactatctctgtctccaatgacagaactgcttataactatttctaaaaaaaaatgacaaaacctatttctctatacattatgtttcaggttgggagcaaaaactgaagtaagcatgttattcctctaattccagctcgggtggtctgtctgatgagtactccataatgagaatgacccaatggtaagcatgtaaatccagttattcttcacagatggggaaatgatttacattaaaagaaaataattagtgagaaaatgaagttaggagaaaataattagtggcaaggtttagaaccaggcagaggtgcagcccacctcttgcccactatatcatacgcgatgtgcagtaaaaccctaaaaaaaatttccccaactacaacgaacaaaacttcaaagcacacacatcatgtggtttcagatccatgatgctttactcgacattgggcaaaatcaactcaaaaacatatacccagtaaactccaaagcatcaaggaatgaaaaaaactccgcgggattcccccctccctcccccctcccttgaaatggtagccaaccagccctaaacaactcacaaaatccacatgatagaaatctggagctgaggggaacatgccgtcgcggcgtgagatttgaacaaaaaagagcgatgaaaaacctgcagtgcctcaactcaagcgcgctcgccttcgacggcacactcgcggtgccttctccggcaccgtccacggccgctcgcggtgcacaggccacctccccccccccctcgcctccccttccacctcctgccttggaagaatctccggcaccttctgctcacaggactccgcctccctgctcgagaaaacacaaacgctatctactcgaggagcagaagcgctttttagaggagtcacgggtgcgggcggatttttccagagctatttgtgggttgtgggctatgggctgtgggctgcggactctgggcttattagcaagggaaagatgatggcgcgcacaaaatcaagacacataatcgatggtcgatgcgatcgactgatcgattaaaattttgcaggcgactgcaaaatagcaaaagcgttgctaatttgtttaggagtaaattgcgttgacggaaaaaataacttggcaggtgggtgcgattaggtgtaaaaacttgaaaatcgagcgtagcggtacaataacttggctaggtgggtgcgctcatggtgcaaaagttgccacaccattgttccacctcagcgaaagtgccacattagcattgaccatctcattttacagaaaagtccatagtaacttttatattacaatcacttcttcagatgtatctgtttgcccattgtttggtagaaagattggaaagataggccctgccgccggccgccgcagcgtcgacggagcagcccgaggtcaccgagcaggcgacctcgacatcctacaggctcggcaacaccggcggcgccatgaccagtgccgcgtctgctgctggctccttccttccacattcgctgggcgcagatcgagtctccgacagcatcaagtccatgttcccctcctcatccacagccagcggcgccgcctcggccggacacgacgagtataggggatccccgccggacctcctgtcgcgacgacaagcaaccagcaggcgcagtcacgcaggagctatgcctcaatctggtgagcaattttgggactgacgaagtgacatttctctgtgttggctgcctctacaggggtttggatgttctgcaatatatttttttagataatggaatagaatatcccaacctttgctcaacgagctacaaccaattattacaaagtagcacacaaaataaaaagtttctcgcacaaaaaagaagacacttaccaacacaagataagaagtacacaattattaaattctgtttgtgaatctacatccaaaattggtaaacagttgcataaccattgcctcaagattacgacatgcaacttttaaacgctcgccctcttcatcacacttttgtagcagtgcccaagacctgagccagtgtgttgcctcgaaaattacctgcatatatgaaacagatggtgatttgtcaaaaatcatatcattcctactcaaccatagagcccaacatatagaagaagctcctatgagaataagtttcctatttttcttatccacccctagaagccaatcatcaaaaatatgagatatgctattaggagggtaaagaccaaaagagaactgtacagctctccaaataaactttgcaaaatggcattccataaaaagatgctgaatagtttcattcttcatacagaaacaacatctcaaacttccattccagttcctccttgccaaattatctttagttaacactacccctttaagcaagtaccacataaagatcttaatcttgatagtcatgttaagcttccaaagaatcttatttctctcaatataaccattgtttattaaagccagatacattgatcggacagaaaattggccattctgatgatagttccatctaacacaatcactctgttgattcaactgaatatgtacaatagaagcacacaattcatgccactttgctagattctgaccaactaaagccctcctaaaagaaacatttagcgaaacagatctcataacattagcaattgaagaacttttccttcgaacaataacatagagagatggatacctatctttaaacgccaagttacctagccatttatcttcccagaatctgacttgttccccattattcagaatccaggaacccatgtttaagaaagtattcttaactttcataagacctgaccaaaaatgagaatcacctagtttcctatcaacttgggtaatagactgattataaagatactttcttttcaataagtcttgccaaaccccttgctcatttattaatttaaacaaccatttactcaaaaggcatttattttgtatttctaaattatggacacccaaaccaccctgatctttgggttgtcaaaaaatatcccatcttgtaagtctgtactttttcttatgatcatccccttgccaaaagactcttgatctataataatcaattttttgaagaaccccttttggaatctcaaaaaaagatatcataaacatagctaaactagaaagaacagaattaatcaaaaccagtctacccccaacagatatatgttttcccttccaactactaagtttcttctcaattctttgttcaataactttccaatctttgtaactaacctttctaaaatgcattggaataccaagatatctgacaggaaaagtacctaacttacaaccaaagatagtagaatattgttcataaaagtcctttgcctggccaaaacaaaataattcacttttatgaaaatttattttcaagccagacaacttttcaaacacagataaaatcaattttagattcttggcttgttgtaaatcgtgctccaaaaagatgatagtatcatcagcatattgcaaaatagataaaccatcatccaccaaatgtggaattaccccattaatggtaccaacatctttagccctcttaattagtagagctagcatatcagccactatgttaaagagaataggagacaaaggatacccttgcctgaggcctttgtaagtttgaaaattattcccaatttgatcatttactttaataccaacatgaccaccctgaaaaaaagaagctatccattgacaccatttaggagaaaagcccttcattctcaacgtttgttgaacaaaagaccatttaaccttatcataggctttctaaaaatcaatcttaaatattaccccacttttatttttatgatgcatttcataaatagtttcatgaagaataacaaccccttccataatatttatcctaggaataaaagcagtttgagtaggactaattactttttgagcaacgccaattattctatttgtagcaaccttggtaaaaattttaaaactaacattaagtaagcatataggcctatactgttgaattttcatggcctccacacacttaggcaaaagaataatagtaccaaagttaagagagaataaaggcaaagtaccattatgaaaatctttaaaaagatctaacaagtcggctttaataccattccaaaacacttggtaaaactcagctggaaatccatcagcacccggagccttgttgtgttccatttggaaaattgcctctttaatctcattttcggtaaattcttgagttaaagcctcattctctaattgagatacttgagggatatcatcaattttactctcatcaagctgaagatcataatcatctggaggaccaaataaacctttataataagtggtaatatgcgattttaaattcgcatcaccccttattaattgatcaccatcctgtaattgaaaaattcctgtttttctatgcttaccatttgcaaccaaatgaaagtacttagtattagaatcaccctccaagatatctttagtcttagccctttgataccacttaatttcctcttctctcagaagcgtagataatctatttctataatacactctaatatcaatttcctcctgagtcaaaagaatggtttccgcttttttatctagcaaatccaacttatctaataactcttttttctcttttttgtagatgccgcttgtatgtttagcccatcccttcaaatgttgtcttaaacgatgaattttagcctaccaatgctccatgggagtattaccttcatcaacactagaccaaatctcttttaccatatcaacaaaaccatcccgtaatagccaacctaattcaaacttaaaactatgttgagcattacccggagacgaagaatttgtttttaaaagtaaaggagtatgatcagaaatatatgtaactagaagtatatatgcaagtgatgtatagttcctgtaggttcttttgtaagtactctgggagtgaattcattatgtacggaattatgatgaaagtgatctaaagttcctctgtgcttttattaagtactctgtaagtgatttccaaatgcaatcaaaagctgcctcacataatttgtttccaaattggtacgaaaaaaatcagaattgtatgcttctgtctgaatgagacatttggtacactttatgcccaacagcccaagcgataatctgtcataattttgccagcttgtattgaccaccacttgcaatgtagggaatttctatatgcatatatgatgtgggacattttcttgtccataaataaatccaggtagaaattttcatactgaaattcaggaagaaatcaacatgcccataacaaaataaaaggtgcaaaataaacacggttcaagaacagggaaatcagactaatgtagcttatgaaacatgtctatctggttggtatgaaactaaataaaactctctgactgaaacatatgctaatgttttccacataaaattgattactagctgttttcattttttctttgtctccttccttttcttcggttctgcttcattatttggcatcgatttcttattaggtggtgcatttctcttccttggctctgccatcctcttcctaattgttgccctgccctctttggttgcggtcgacattggtggctccactccagcccttctgtttgtggcaataaaatttgattccagcaatggaccaggggcaactctagaagagctgttgtttgtgttctgcacaaagtacttggaattgtggaaaaatgtttcacaaagttacaaaatggagaattgagaaagcattgcctaacctctctaatcaaggaagacaatatggtattgtctaactggttgtagtttggctgactagttagaatactagtctgactattcagaataccaggcatgacctgcaaaggcacaacatcttcttgaacaggctgtagagaaggagcactggcctgctgctttccactttttatatcttccttcctcttcttgcggtcccttcttattgtgattaactccttggcagtagctacagtgtatttgcacaccatgtttcgatatttttgttcctccttcaagctcttgaggctgctttcttctacatctactaggctttcgactttcttttcataaactggtgggttgaccttcactccattcatcttcgcccaagtagttttgtctctaacaggcattatattaaatccatatgcttccataaatttctctgttgagtaacaaaaagacaccacatcttcaggcttgatcctctcactcctcaagcaagaaattgcatggtttcatggtatccctgttagttgccatctcctacattcacaatgttttgctatgatgtcaacaatatattggtgttctttctcagtaacatggaacacccctttaccagcaggcaagacatagcatgtatttgctatttctgcatttttctcaacctttttctttatttttgggcatatatttcccgaccacttctttgcgcactcctcctgcttattatgtatcctattcatgatctggctcctaatcttctcaagcatggacaagattggaagctctctagcttcaagaatatacttgttgaacacctcagaattgttgttcagcaaaatatcacacttgggaaaaccactaaagaatgctctgcaccactgatttggtggtatttcctccaagtatccataagcatcagtactaagatacttcatcttttccatgttggattcccattccggtattgaactggaccttgcaattgcccacaattggttctttagagtctcccctttatgcaaaacatggaagttttggtatagatgcctaacacaaaatctttgttttgaatctggaaatttatccctcacagctggcaccaatccctacaatttaattaaaaataaggtgaattctagtccatcatcaagtttaaaaataaaataaaatatgatgaaatagagatgtaaggaatacattttgcctatctgtcataatagtatacggtgtcgtgttgtcaataaggagatcttctttcaaagtattcaagaaccaaccccaactagctctactctccacttcaacaattgccatggctataggatagatgcaactctccacttcaacaattgccatggctataggatagatgcagtcattggggtcaatgcctactgcagtcaataaatgtcccccaaacttggttttgatgtggcatccatcaagaaaaatgataggtctacaaccacttaagaagcctcttttgcaagcatcaaatgatacattgcatgtatggaagcacatattctgtagattcaagaaaaatttgctacctgaattagatgtcctaagctcttgtccataatcccataacatatcatactgagctatttcatcaccgtgtatagcctccatagctaaccttctcgctcgtcctagtttgtatcttgatggtgttacatttaggtctttttgaactactttagcaaaactcttgagtgtcatcttatcattatctctaaagctttcaatgtacctatttgcaagatatctagcagttacataattcagctcccactctttttgacatttgtgaccatccacatattgttttatcataaaacattttgtcctgctgtcctcagaggcatttaacatccatgggcattcttcagcacatttggcctctattcgtttcttggtgtttcttgcaaatttgattgcaactctatttttcacactatattgttttattgcccgcctaacttcaatagcatcattaaacaacatcccaaccttaaagataggtgactccatgtccacatcagccacaaagttcttaaatttcaacttgatgccccatcatcttcatcagatgactctggtagcaacaaaccttcatcatctggatcacatccaggaagctcaactactagcttgctagcctcagcattttcggtttggtcaacacaattgtcaaaaacatcatcatcccccttgtcagcctcataatcactatcaataaagtctggatctaattcactgtcatcctcatcatcaattttatcaccttttgcaacttgatcatcacaaaccttctgactcattgcgactctcctgggactagccacaataggtaaagtagttggggctgaaagagctacatcatcccaattaatcgattccacaatatcctgatgatccgtgtatgtacaaaagcaatgatctgaaccttggtactaatgcaaccatgctgttagtgcttgcatcagaatttattctccttagcccatcactaaatgttttcccaggcaataaccaataaaccttaaccttcctctcagaattatcatatcctagttgctcaataaaatcatcaagccataaggaagaccatgtgtcagtgtcgcaatgatcaaaccagtccaccttctcatccaaataaattctgctactgccaactccacaaaaaaacccaccatgatgcagttcaattgtgaattcttcctcctcatggcctgcaatacaaaataattggtgatgtgttatacccgcataaggaaaataatacactaagattatttgcagattattgaactaattatattatgctcataagggtacaaaatacatatagcaagaatttatcattgccaatgttactcttatatcgtatacagctacaggaaacaccaataattacagtacaaccaatctcgtggctagtaccattatatcacttcattgcattgtaataatgttgggatacgcgtaggctacgatagcataaaacaaaattttctatcgcgtaaaccaggaaccatgcaagtattagatcatagatcgttaccactcgacgcgctgcacagcggaagaagacgctgagaagtcgaaggaactctcgcgaagtagcgcacgtcgatgtagaggaagtagtcgatcgcaccggctcgaccttctcctcctcgtgcgttctcctcaccgtactcccacgccgatcagcaccgcaaaccagcggcgcctctaccggtatccacacgtacagggacggaacaccacgcgcagatgtgcaagcacccgcgcgcggctagggttttgctcgggaggaagtgatggctaggatttctcacgtgatgcaatgcctccgccggtcacacccctcacgaatatataggatccatcactcgggcctccaaggcccgtaggattcctatttggatccctatccgaattaagctcatattggatctccatccaatcctcttattccggcccattaagtgtgcgaccctgtaggttcatatatactcggctgtaacccgaaaactccttttcggtccacgcgtcaacagcggccccttgcagaacgtattgacccaccgggcatacataaagatcatatcggctgaacctctagtgtatacttgtaagaacccctttgccccacgatatcgattaagctcaaggctagatatgtgccatcctctaatagctcaatcattcactcgaacctgttgatagattatataacttgtgattgactcctcaatcacctttggcatggccatgcacttccataatctacaacatcgaggggctcagagatatctctccataggaggggcaaatcccatcttgattattcatatcccactacatatttcatagcataaccgaaaactacttttataactacccaattacagagtagcgtttagcagtccctaaataagttactacacatgttaggaaccatgataatctcaggtctaaggatttaacaccaacactaaatgagatcactgatgacacaacacatatggctcttgcagtgtctcatgttgggtctatccaacaacatgttcactaagatgtgtccacattattaatttggtatctctatatcatgatccatgagacatgatcatcaattaatacatgtgctgatcatctaaacatatttgttccacatatgatatttgatcagggatcctttagaaatagcaacaaacaacataaagagtctcatgaaagaatcacatattcattaaccaataaggagttatctatttcaaggaacaatgtcggacaaatatgtaaacatagtatgtgatacaatcatctctatgattgcctttagggtatatcactaacaaataacaaataacaggatattcaagtgaaagaccaaaataatgcagccatcgtacaaatcaatgagaccttaactttgcaatcatccatcaattgaacaaaaaatagaaatctacaaccatcagcaagtgatttaccataacaaggagcagaagctcaaagaactcgccgagtcagagccatcccaaagattgcggcaatcacgtcgacagcagtagtttgtggacttgaattggtttggttatggtttagggcttgaattagtgtggcacacagagccctcgtcgccgccgcgacgtagttgcacggtttccctcgtcgttgtcgccgccgccgccgttgcgtcgccaccagcacaaccacctctcaatcaggatcacttaagaaagatgaagggagatatttgtacgtcaagaaatcatattatggggttttctataaaatgagataggtctttcgtgtcaatgctaatgtggcactttcgctgaggtggaacaatggcgtggcaacttttgcaccatgagcgcacccacctatccaagttattgtaccgctacgctcggttttcaagtttttgcacctaatcgcacccacctgccaagttattgtaccatcaacgcaatttactctttgtctagactagtaaaaaagttgttacggaacttagaaaatcacattggcacttggcaaaaaaaataattagggaatttagagcttaattttaaattaaattatattttttatcattttatatttgacgtaaaatatttcaatattgcatcattactgcgtaataactctatcctttaaaaaatagaacggctcgaaaacggtaccccgttcagacggatactttaagtaatggcgtcatattcatgtcaaaactgacgtcactctatacttatgtggtatcatgtatgatatttattggtaccgaacatgatacccgactaccaggtgtgacacactatatctaccacatcaatgatgatgtcaatgttatggggatgctatacaatggaatcctgtttgaacgggattataccggttaggtatcaggacatgatacttctgaggtatcatgtgtcctgatatctaaccggtatcaggtgatacctattagatatcaggcgatttctactacatatcaaatgatacttgtgaggtatcaaacgattcctataaggtactatgtgatacttacaagatatcatgtgatacttataggtattggctgattcccgctgataccatcggatactcatcaatagtagagcgatacctaccagatatcaggtgatttctactaggtaggcatcatcgtcagtggccgtgtcctccgcgtttgagcatgtccttcaccgtcactccacatgctggagctcggtggtggcggccctacatcccatgaccgagatcatcaccggtgcagccacatcctccgccatccacattccacgccagagctcgtcaccagcagccgcgtcctcctccaccacgctccatgccaggctcgtcgccggtggccgcgtcctccgctgtccatgccccacgccggagctcgtcgctgaggctgcatcctccgccgtacacaccccacatcatcgagtgttcgcatcagcacggtcataggcggtagcgacgagcaagccacaaccgcgaccatgaagccatcatcatatcgtcttgtcaccgactcgccatgcgcatactcattctcttgccgtctcgccccgctgggcatcgtcgacgctcttcatcgtcttgccggagcagagcagcagcaacaacaggagtcatgcatcatcaacagctctcaccgaagcaaagcaacaacaggaggcacagcatcagcagtggcgcacgcggaggagaagacatggctcaaggagatggtgcgggaggaggcgataccatcccactcgctcgagacggtatcccgtggtataacatacaagtatgtcacatcatcacccacaagcaattactattgtatagtatattaaatctcatacaaacataacacatatctagaatacctcgtggtatctaaatttttcactaaacattatgatatctaccaaatttcacagtaaaaaatgtagtatttttgggtaatttcttaatgatgataaaattgcttatgctataagttttgtagcaacaaaattataaccatatgaaagtaaaatgtcaattcaatgatattattttcagcaaacaaaattcaattcatattatgatagttgttggttaaatattttaaaaagttgagacttaaaatgtgtgtgtgctttatatgattgggtgtagggagtagctatttgtattctgcctttgttgcaacgctagttgcctgttaaatgaggctggctcggtcggatgtgctactataataataataaattaactagaataataatgttcatagattgcacatataaatggtataataatttcggattttcccaaaaaaatttatttgaaacacaaacaatctatcccaatataacgataacatatcggttttgaatttgaagtactaactccagccgttcactaaaattgttcatacaatacaatatgtattcgcctcttctatttagttgccgattgacatttccccgaatctgaaattttggaatgccatattagccccttgtgatcgaaataacaaccttttctacctagtctcgtatataaatccttgctcccccattgcatgtctcgagacgtttttgctgcatgcattagttcgatttttcttttgcgtcaatttgggcaaagaagatgatgttaaccaataaaatttggggaagtcgttgatatatgactctaccggtaagagttcaattcttggcgaagtcgttgttatatgactctaccaataataatttaaattttgatacgtacatataaaggacgtaactacacagctaccactaagtttgtctaaaccagctaccactctatctatagagacaccatccacatgtacttcaaatacaattttctcttaaactactcatccgatctacgatccgactacaccgttgtgtttgtaacaattaaatctttacaacaagatcttacatgattatattttgatgaaaaatcataaattacttttataatatgtctaaattacttttagattttactaagttacttcttagatatataaaagtaaattcagtaaagcctaaaagtaatttacatatattatataagtaacttagaacaaaacgaaggtaactttgccatgtcatttaaagtaaatctgttggagagataaaaacatgactctatctagaaattgaattaatcagcacaaattatggaattaactaaaaacaataataaaagtaatcacctcagagcattatgaatatataggaagtattttaatcaaaagtaacctatatatatgataattatatatatgataatttgttcaatgaaaaaaggaattaattaaagttactttctttttgttataagttagttctataatatatgtaaattacgtttaggctttactgaatttacttttatatttctaagaagtaacttagtgaaatctaaatgtaatttagacaaatcataaaattaatttgtgatttttcatcaaaatataatcatgtgagatcttgttgtaaagattttaattattacgaacataatggtgtaatcggatgagtaatttaagagaaaattttatttgaagcttagatgataggaatattttctcaacttacttcatggattagtgctatagtaaagtaagattcttcaagttagcacatatctaaataggggtcactcgttatgactaaatcgagagtgctctcgatttagattttgcgacataaaaatattactccgtacgtgaatttgccatttagtaactaataacaacaattgggctgggccatcttgggccagagggaaaggccgagaggtagaccaaagcccatcaatcatagaggaggccacaaaaacatagccatgagatcgaatggtgtcacgcatggtgtacgtaaccctaagcgccggcgcggtcgcggacaatgtcgcggccgatccttcgccggcctgcgcagccctctcctctcccatctccggcgccccgtccgccgccacgacgccaccgacgtcccagcatttcttcgtccccgccacctgatcataggcccacgatcaggcaactcctcggatgccacaaacggcgccgccggcgagatcgcggcgaagaagcacctgtacctggcgatcgatgaccggaagaacgcgtacaacaggacatctctacgacggcggcgacgccgtcgacccatggtgttggcggagctcagagccgaacacgcagatgtcatggagtcccgtgcgagaaaagcacgccgtacgtgcaccccgggggacgcgcctagcttcttcctctccgcgatgaaccagtttcggtcgggcggcgtcgacgtcgaggtcaccttcttctacagcaaggacagcgacgtctgctggacgcgccgcggcgactggctgctgccgttcagaggccacggccactacgacggcgagctcggctcgtgggtcggcctccacactactccgacaccaacaggctacgcaccgacgggcgcctctgcgcctgccacgtcgtgtccgcctccgccgaagcgagcggcgagccggcgccagaggtgaaggtcgggaaggataaggtgttcgtccaggtccctgcaggctgggtgcacgaagaggccgagctcgtgtacatgggtaagcgagtactgcctcgttgcgtggctgcgccccgagggcgacgacgaggaaaagtgcctgtgcgacggggacaagtgcgtgctccacctgaccagggttaaacatatcggtttagccgatttgatcggtgctcacaaaaatgctgaaatttaaaacaaaatttagttgaatttgaaataatattaccaaaattcaaacaaaaaaaatatggccaaaataatatcgtaacggagggatccgaaatgaccgaaatttctaaaattttgttctggaatttgcaatcctacgcctgaccacgttgcaggtggcgtacgacggcgacggcgagctcaccgccactgatcgccggctcgctggctgctacaaattctccaagtatgagatgaactcccatacgagcgttctggatataacggacagctacgagcctacgacagttcactaaagaatttagtagctcatggtgaatctgagggttcaaaattccgaaacgaaatttcggtctattggatccctgatatgatattataatggacaaaaaaatattttttttaatttggcgatatttattcaaatttaactaatttttttataaaaaatcaaacaatttctgatcaaaatttttgaaatttcacgatatcggcacccacaatacatatgccgaaaaccagagattgaaccctaatggccatacgtgtatgccttatttgaagagtcattttagtgtcaattaatttgtagcagtgatccagtcaaaaggaacaaaaatttgcatagaaaaacaccattatggatccttattcctcagatcaaaattgctctcaggggcccaccattttagcaccctgctgcctgctggacctaggccacccaggctaatgttgcttgagttgcttgcttcctcgttagcttccctggagtttgtgtttttcctcagtagctctcttcgtcttcgcacgcagccacgcaccgtgtgtattcgttcctctttttttttttagccggcagctggctggttgtaaactagtactccctctgtttcaaaatgtttgacaccgttgactttttagcacatatttgaccattcgtcttgttaaaaaaaatggtacatgaaagtatatatttaacaatgaatcaaatgatatgaaaagaataaataattacttaaattttttgaataagacgaatcgtcaaacacgtactaaaaagttaacggtgtcaaacattttgaaacagagggagtatttgcttccttctaatatgtcgacacgcaagctttttgcacgttaaaaaaatcaaagttactctagaacaattaatttatatttcatcatttgttactaatatttattgacaaaacaatgagtgccagcctcctaccatttaggtgattcctaaacgcattctacagctctttccggctcctctccactgaattgccccctattgtccttctaggttcccacatgcctctctttcatcgaatggcatagccaggaatatagaggccctagcaatagatgggtgcatatgtctctcctttgtttagtggcaaagcctacgcatagagcccccgactagagagggacacctagagagggagtactccttccgtcccaaatataacaaattttggtcggatgtgacatattctagtattacaaatctagacatgacgcatatccagattcgtagtactaggaattgttacctccaatcaaaatcccttatattttagaacggggaaagtataacggaaggtgatacctgctcatatatgttagtgcctcaaagacaccttatcattatgacaaaggacgtgctcctacaagcacaaccaaaacccataaaagctagccgccaaaagcgaattcctattggttatcaatacttttcactgcaattgtaatgcataaccatttgggtggccaaattctttaaacgaatgaaggaaattttataaattttaggctcctaaaataactttgagcgtaccgtggccatggcactaaagttaaaagtaagttgtagatgtgaaataaaatcttaattataaagatttgatttgaaggataaaagtaaaccataaatagacaaagaatcccccggagatcaaaatacatagaagaactgatctccaaaaataagaaaattgagattatgccaacgtaaaaaataggctttgccaaaatgccatcctgcaaataggattggataaaatgttgtgaacagggtgatttcaccaccattccaccatttcatacaaattaataaaatgattttgctttttttttacatgagaactgacaaaagtgcccctctctccctatctattgtttactctcattgtggccgagaaataagctagactattgacgccacgtagcagcgccaatgctgagtcgccgccaccactcagcaactagctcgtgcagaatgtagacgagcacatcatcctgcagtaggttgagcttgtcaatccgtcactcctcggcttcttccatatgaggcttaaaatcatcagatgacaagtctgataaggagctagggttagggtttgcgactacaaattaagtagtgtcagcattaaggttgttggggttaccggtacggtggtggtgaagctgaaggagaatgtgatcaacggtcacgtccgatgagcttgttggtacaaggcagaggtacgcggttcctagcttcactacgtacaaggtcttgcggtctcagttgatgtcattgcgtcacaaacctagaaaatgatctgcttggaggtcccataaaaaaattgaccatgatgaaggggcaataggaatgggacggcccacgtttatgtggcatcctcacaagatttccacatgttttgaccttgatgacaatgatataagcccatggcgagctcatgcctccctcccgaagctcatactcaagctctgccggggagcttagacctagttgaaaaaccattttaattggaaagaaatggctttctagcgtagatgtctagccgtttaggttgttaatactaacattttatccaactctatttatggaatgatatttacgtgaaactcaatttttctaggcaaaatttgccacagggcatccaaaaaaccctgtaattagctggtggacaccacaaaaacacgaaattgctgtcgggcaaaaaaaactggtaattagctctcggacacttatggccttattttattattttcggggaaaacggagagagaaactgaggtgagagtacgattctgcccctgtgctacttcgctgaagctggtcgtcacaatccatcgccgccctcaccgaagctggtcggcagtccctccgtggcggcggaggtggcagcaccgaggccgtgagcgcgaggatggtgtggcggtgagcggcgccgcgggtgggaaggccttggtggcggcgcaccggaaggcctgcggagctcgtcggcgaggtgcggcatctccctctctttctccagctcctcctgcgcccctctgggcctcccgcctcacctcctcctcgcctcccctgacgtcgtccacgccgcaggcgaggccgcccctgacgagcttgtcgcagaccttctccagccgctccctcgacctcctctccctctccagctccctccgggacgccgccagctccctctccgcgtcggccagcgccttcccgagcttggcgttcaccctctcggcgcgtcgcctcgacctctgctcaccgtcgagctccgccgccgccacgcgcaccatcgccgcgaccttctccctctgctggctcctccactcccgcgcctcctcgacgagctgcgtcctcatccgtgccgtctcgtcgccgtgccgccggtcctccgtggcgaggtgccgtacgtgagcgcgtgccaggtcgagctcggcgcacagcgcggagagcagcgacgccgtcgacgggtttaggccatcgtcagggccccagatgccgacaagagccttgacgagctccttggacgtggcaaggctgctgcatatctccttcagttgcggcacatctccttggacatgtaatctaaacggcggcggcgacaggcgctgcactcgctggcgtgcggcgcggtgaggaagcacaggctggaagaggacaagaaaagaaaataggggagaggctgacatccttgaccacatagggcaatctagtctttttcgattgtttctctctccattttctccgaaaataataaaataaggccgcgagtgtccgatagctaattaccagttttttttcgtgcctgacagcaaattcgtgtttttccggtgtccactagctaattacaagttttttttggatgccccgtagcaaattttgccattttttatgtggcgtaattctaaataggattatcttaaaaaaactgctgcaagtttttttaaggaaaaaccttttcaatctaactatagtattatagtataattgtaatataattccactataattgtaatatgacttatatataagtgttataataatatatacaactttatatctaacttatataaagataacaatatagttatagtgtagttacgtggtagttataatataactatactatataattgcattgtagttacactataactattactatatttatatttgaaaggttttttttatcaaaaaacttgtgacagttttttaataattccgattctaaatttctccaaaaaatactaaccagctcgcaggagacagagacatgacccatgcgcagaagatctccaattgccaggtcagcctcccacggccccatccaccacgcagcccccaccccgactacgttcctagaccctgtcttccacgtgattcagtgccccacgtcactgatagctgggccccacccaactgtcggtccactgcacccgtggacgggtaacccgcagccttaaatctcggcttgtgtcagagccgctccgaaccccctctctcccatcgccgccgccgccgccgccgacacagccgctgacctcgccgccgccgacgccgatggagatggccgcccccgtctcccccgcgccgcgcaccgtcgaggacatcttcaaggacttctccggccgccgcgccggcctcgtccgcgccctcaccgtcggtaagtaataacgacgaacacctcgcccgcctctctctctatctctcttcggttgtctcctcttctggatctaacgagctcgccgcccgtgcggggggtttttgtttgtgccgcgcagatgtggatgagttctacggattctgcgacccaggtaagaccgaaccggatcggatctgatgagggtagagagagttcgggtggtggttttgtgtgtggggtttgatttggggttttggggatgtgagcagagaaggagaatttgtgcctgtacgggcacccgaacgggcggtgggaggtggcgctgccggcggaggaggtgccgccggagctgccggagccggcgctcgggatcaacttcgccagggacgggatgcaccgccgcgactggctctcgctcgtcgccgtccactccgactcgtggctgctctccgtcgccttcttcttcggcgcgcgcctcaacggcaacgagaggtaccagccacacgcttttcctccattagatctcgtgaaaattgaccatctatgaagaagaaaagatcacttacttggagcgtataattcgatgggtgcaagtgcaatcgaactctgttcttgccttgtgggttgtgggtgcagtgtaatgccgttcttgtgcttgccccgtgggggtttatggatttgcatattttatttcagctcaactggtccatgtgtgcgcttgtgctgtgttgcacatgtttattgtgctttatttcaccattcttttttctctttgctgtgaatgggggccatgtttctcactgtgtttgctttattttctctctttcttttcttcgtttgctgaattgattttattttttgccataaaattgcaaaacagtgctgtgtgtacttggtgatgattattactcctaccagtagtaattgcctttgaaataagttcccgggctgtctgaaaatttgatctttcacttggaacatgttttgacagatttcttttcagttttcacatccttgtcagaagttggggggctgacggtgataggctctgtgtacttcacagtacattgaaactttgaaaggtctcagtgtctgcacaaatttttgtttcgtgttacaattcgagtgttgtgctatatggatgacctttcatcataatgctttttagtcatttgggttttggataccttaattcatgtttttcaagagtacctattttatggaccatggcagtaaaagtgttcgcaaattaggatacaactaataaacaatcaaatgggcaagtaccattcttattcaacttaacatgccataaattgaattctttctttctattgagcttcagttgtgtttgctctgttccttcgttcttccttaagaaactttgggattacaatttgctttgtgtccttaattttcaagttctgcaaatactcgttgaatatttttctcgctacattttaattcctaaaatgcaatgtgtcatatggagtcttttgatggataaccaaagggtagatgaagttttatgtgcctaaattattagtactgttaggttgaatcattaattggcctctggtccttttttaatgttttatgcaggaagttttgtgttttttgctttggtctacttgagtacttgactgccatgcaaaccataagtcgtaattctgtgatattgcaatttttttcttagcaaaagttatcttgtttattctgtttttcagtttgattttttttttggttcagttaatcttgctagtttcctggttgaactttgcatttctattccagccatttttctcttctcttttctccctgagatgaggctttgacgctttgtgagcttaagtttctatcattttggcatagtaattctgcctgctttcattgtactctagtatctattttcctgcacactttccacttctatttgaatttatttttcttctgtttcatcttactatctgttactgtatcagggcagtagagtgctaaactgtgaagtgctgccatctgttctttcatgtgcttcgtttgtgttgcacaaggagctaaatcagtcacaaaatttgtattatcattatgtaatgggaagcattatctgttccttatctgtttgtttatgttgctttcatgtttgtttatagtgtttcgttgcttatctgttgtctttcgaaggattcatattgtacgctggattattttttaactcccaaggaaatattgggtcatgcctcacaagtgttttctttctttatgtacaaattctattttatttgttgcattacttcatggatatcttgtttccatatttttgtctatcctgcccagggctaacctgttgaaacataaaacttgtgccatgtgtattggtgtcttggattcatattctgatttgaacatccctttgcatcaaccattatctctgttaagaacccaaagtatcatatcatggttaacaaaatccttttcctggatccaatgtgttgctctcttgattgtcaggaagcgcttattcagcttgatcaatgaccatccaaccgtgcttgaagcactgtctgataggaagcatggaagggataataaatctggtgccgacaatggcagcaaatccaggcactcaggaaaggtgccgtaccagtgctcttagtttttattttcatcatgaaccatttctgaactgtgcccatttgagtttttacgaactgaaagctggctttgttatgcagcgagcaaatgacgtgcagacaaaaacctcgaggccagcagttgttgacgatgggtacgatgaagaagaacacagtgaaaccctatgtggaacctgcggtggccgctacaacgccaacgagttttggattgggtgcgacatttgcgagcggtggttccacggcaaatgcgttaggataacaccagcgaaagcggaacacataaagcactacaagtgccctgattgcagcagctccaagaagagtaggcaataaaaaccatggagctgctgctgtggctctctactgctgactaagctgatcaatcaaatgatacttgccatccctcttccagtcccaagttggcggcagatgtgaagaatttgctctagaacattgcgcactgttgtggtagatgctggaaaacaaaaaagaagaaactttacaggatagtttgtttcataaactggtcggttactgttgtggttgttcatttgagatatggatactgttacattgtagcctttagaggaaatttgttcatgccttgtttctaatttggtatgtccttcccttgctgcatgacattgatttctctctacaagtttctgtctgtcactgtgcatatatactgtggtttgtctcggtgtgtactgtggaacagtcctgtctgctgggatatttggtccttggttcgtctactctgtggtgcatcagggagggattcagggtttctagtttttggagggaatctgcaggcagggatatgctcgttttcagagcagaagcaattatcaagatcacgggaatgctattcccaatctgatactccctcctgataatctcataataagttcacttttagcttttccatttgttataagttcatttttagagcaatattatatcggagtttatgaacgttgggaatataattgtattgaaatataattgtatcgagagtagttaaattgaagaatagttacattagcatttgataaagtaggggtatagtctttttagttttgtattatatattagtattagtatgtgtgggatggatgaaaaatgaatgggagtgcctagcaatcattcgaatgattttttcattcatctcactcggatttttcaacatatggatgtgcgccacgttgcagagggaaacaggctagcttaatagtaagttcgtaacaacagacccaatatgacagttataagtccaaagatgtttaataaaaaaaaataaaaatgtcatcaacatatgcatcagcaagcgtcaagcgaatacatataatctttcccaaaaaaatgtttttggtttcctaaactgaaaatatgaagcaaagtaactgaacgtataatctttcccaaaaatttgttttggttttctaaactgaaaatatgaagcaaaataacttattaaaagcctaaattttatcctcaaaaattaaaagtggaccattatgttaaactaccaacatgatttccgttttcctccgtcagcgcactacctcctagcactccccctaagggcatctacaatcactaactgagggtactctaggtgtactcacatctacaatgcaggccatgtctggtagcccaatgagtgtcccaacccaaaatagcccatttctctcatcctcctctctttcctattctacccctctcttccctctctctctctccctccgcacgaccgcatgcgcattcctctctccctccacccgttgttccactcacagcctgcttccctctctcccgccgctgctcccgccgccgcctgccacctccgctcgtctccctctccctttctctctctctctctctctcactaccaccaccgtctcccgccgccgcccccgaatcgagctcatgggacggaggcggcagtcatcatcgtcatcgtctggtagctggagcagcagatccggggcggaggcgaccgacggcgagcggcgcacggggcggaggtggcagtcgtcatcgtccggtggccggaggcggcagatctggccgctctctccctctctctctctcccgtggaaggtggcggcggcgaccccggaggcggcagatccggcgccgccgtggccggatctggccccccggcggatggagtggcgccggccgcgccgcatcgagacggtggtggtgccggtggtggccgcatcgacgatggcaccgtcattcttcaccggactcgccgacgcccgccccctcctcacccttcctttttctctctgacagcgagcagccgcatcgagcagacggtggtggcatcagcggtggctgcatcgatgatggcgccgtcggctttttcaccgcgctcgcccacctcgctcctcgccctccctttttctttccggcggcaagcggcacctttcgctcgcccttgacgcgcgggccggtgacataggggagaagggtggaagaggaaatcaaagctctggggtgcgtcgcctcaagaacctacctacgcaatgggtttcttcgccccgtccccctggaaaaagcgagcgagcgacgcgtcccccagctagggcgcgcgtttcatcccaggggacgacgcagacgaaaagcctaatggacagcgctagggagacggaccgaagcactacattggtgattgcctaaagccgcgccgatctcccacgtgcgggaaaagcgctcccccctaaagccatgccgttcgcccacacgtgggaaggagaggaggaagtacaaggtgggagcgacgatattgggagtgggcaagggcgccgttttctctgacatatcaacataactccaaaaatcatgtaggggagtaggggatctgttggagtgctttttttttcactaaaatacctgaaaattggttttggagatgaaataggaggaccattagtgatgctgtaagaactttaaaaaaattacgatggtcaaggaaaatatagtttatcttaaatatagtttatcttatggcaataaaatatttaaattaagttgagttgtctctacgtatagcttaaaatgatactccctccattcttaaatatttgacgtcgttgacttttttaaacatgtttgaccgttcatcttattcaaaaaaacttatgtgaatattattcaaaaacttgagtagtagtagtataatatttaacaatgaatcaaatgataggaaaagaattagtaattacttaattcttttgataagacgaacggtcaaacatgtttaaaaaagtcaactgcgtcaaatatctagagacggaatgtgtacataggaatagtatttttgcatatcccaccaaaataaaatgaccaaatgacccaatttgtcgggggtacctttagcgcatgttgctagattgtgcaaatttatcccctttttttcaaataatgaaataatggattaattcgtacgctccctgaatttataaacagtgtttaaaaaactttctatacattaatttctaagaatattgttttaaatctattttctatcttcataacgtttaattcatttatatcctcaaataattataataaatcattcgactattcggtcattcagcataaaagaatagagccgtggacatgcgaacccacatgctgacatgcatgaacaataatctttcatcaatttgtgttatttgcgaaatcaattaaattttatccataagatgactagtggcagctgtagatacgtggtatggtctactctcttgcagattgcgaatagtttatcattaggtattaagcttaataaagggctgtttagattatagccaaaataaagtttaccaaattttgtcattaccaaaagtttgataatattactaagttttggcaggatttcttacgtgtttaccaaagtttggtaaaaaaaataaatagttgcatatttttggtaactttattacaaattgatatagttaatctgaacaacctctaagtcaatgcttgcttcacgtgttttacctgcaagttcacacacacacacaaaatgcatatttgtatctcaagttcagtaggcatgcaagtcaaaactgaatccctccatggtttaaactttaaaatggcatttataattttactgctgtaggttggcatttgttatttgcaatcgctttcatacggtcagagatgcttgtcatattctaccctttggcctccatctgtttctcgttttgctttcgttacggataatatgggaatattttagaggacaaagtggccatccggtgagccaagtttcataattgtttaacccgttttatggtgtggagtgtacccttagcattgcgacatgaatggctgaaaaatcatagttagatttttctaaaatgcagtttagtcatattttaagcaaacagccaacagaaaagacatgtgaaaatggaaattttaatatccactcttcgaaaaataacatgtaaatagcatgggggttgagctgtcaacagcagagagagcactcccctgttacacccataaaaaattctatgaaaaaaagtaaatattattgttacatccgtcccataataattataactgtaagattcaaattaattctaaaatagttattacaatagagtagtaattatcccatcaatcactctcattcaaaattttcactattttaccatcattcatcctcccagtcctacctatatatattattaaaccttaatatatattaaacaacctagaattaaaattattttgggatggagataatattatacgcgtgtaaaacctcaaatttaaatttaacaattttaagagtataaatctatcataattttatcttttttctttctattacgataaatttcaagatgagacttagatgcatgttacttgtaaaaacaaatataatttttattgatatctgttaattggtgtaaagtttgtgcattcatgatacattccaattttgtaaaagcttactattttactcatgaactttaagcagcatatatgaagggtgtgtttagttcacgttaaaattagaagtttggttgaaattggaacaatgtgacagaaaagttaaaagtttgtgtgtttaggaaagttttgatgtgataaaaaagttggaagtttgttgaaaaaagtttggaactaaactcagccgaattttagggaacatttggtttggtatgaactttggaattcatgatccgacccgtttgttgccaattcaggtgaccaaatttcagtacgccaaccatttgcagttgtttttgacgaacctaacttcaaacaaatgcaatttggagcaacaatactattattatagccactatcagagcaaaaacaactactaccttagatgaggaattaataaataatccaaactggtcccctactgctaggttgctgattaagatgagtgattaagcatcaattaaatcaagacgactagctccccactcactgccaggtgggcccaccttgtcggattagaggaaagtccctcactgccatacacaaccattgccggattagctgtccatcgattacaaaaatcccaaatcttttggcgccgccgtcgctgtcgccgacgacaccaccgccgccgccgtcctcgtcatctccagatcgccctctccttgatccccacttgcatcgccccggaggcgcggtggacgagacgacggcgatggccggaaaggatgaggcggaagggctcgaggcgaggctgctgctgctgccgcctgaggcggcggcggaggagccgacgaggtgtggcggcggcgacggcggcggcggcgggaggaagcggaagaagacgtaccttgatgtccttggcgtgtgctgctccgcggaggtcgcgctggtggagcggctgctcgcgccgctcgacggcgtccgcgtggtgtccgtcgtcgtggcgtcccgcaccgtcgtcgtcgagcacgaccccgccgccgccccggagtccgccatcggtaagccaccgcgcgcgcgcgcgccattaatcctccacgcgattctcgcgcgagattctcactgaatcgagtcgtcgtcgtcgtctttgtcttggagtgcagtgaaggcgctgaacaaggccggcctcgaggcgtcggtgcgagcctacggcagcagcggcgtggtcagccggtggccgagcccgtacatcgtcgcctccggcgtcctcctcacggcgtccttcttcgagtggctcttccctcccctgcagtgcctggccgtggcggccgtcgtcgccggcgcgccgccgatggtgcgccgtgggttcgccgcggcgagccggctgtcgctcgacatcaacgtcctcatgctcatcgccgtcgccggcgcgctctgcctcggcgactacacggaggccggcgccatcgtcttcctcttcaccaccgcagaatggctcgagacgctggcctgcacaaaggtaggagtacatgtcaatgtcctcttcaccaaatccatggcgatcttggcacgaacccggacgaacactcacgttgcgaggtgtgcaggcgagcgccgggatgtcgtcgttgatgggcatgctgccggtgaaggcggtcatcgcgacgacgggcgaggttgtcagcgtgcgcgacgtccgcgtgggcgacgtcgtcgcggtcagggccggcgagatcgtccccgtcgacggcgtggtggtcgacggccagagcgaggtcgacgagaggagcctcaccggcgagtccttcccggtgccgaagcagccgcactccgaggtctgggccggcacaatgaactttgacggtaaacaaacaaacaatcaaaaaaatctctcatctcttagtttcagagttcccaaatgtacggaactctgaaacgtccgtgtcgttgaattgtccgtcttttctcatcagcttaagttctggtaaactgattgacgcatccaactcaatagtcacaatagcacacatttgttcatgtcatgatcaatgggattgagaggctgtcacgtttcaggttacattgctgtgagaactacggctctcgccgagaactcgacggtggcgaaaatggagaggctggtggaggcggcgcaaaacagcaggtcgaagacgcagcggctgatcgattcgtgcgcaaagtactacacgccgggtgcgcaatcggcatcgcctaaactctcaacatctccaattttacaacacaaaattcatcagtaacaaagacatttctgttcttggtgcgttgcagccgtggtggttgttgcagcaggagtggccctgatcccggctctgctcggagcagatggccttgagcaatggtggaagctggctctggtgatgcttgtgagcgcgtgcccctgcgcattagtgctgtcgacaccggtggcatccttctgcgcaatgctgcgcgctgcgaggatggggatcttcatcaagggtggagatgttcttgaatcacttggggagatcagggccgtcgcgttcgacaagaccgggacgatcaccagaggagagttcagcatcgactcgttccatctggttggggatcacaaggttgagatggatcatcttctttactggtaagactgagaaagaagatttcatttcagctcttggaatgcagctgctacactgaacaaatttgacagattttcaactgttgtcggtttacgacttgtcgaaaaatccttagtacttgtgatggtttgaattgacttgaacagtgaaatgcttggcacaaattatgtctttggttattgcaggattgcaagcattgagagcaagtcaagccacccaatggcagctgcacttgtggagtatgctcaatccaaatccatccaaccaaacccggaaaatgtgggcgattttcggatatatcccggggaggggatctatggagagatccatggaaagcacatctacattgggaacagaaggacattggcaagagcgtcatcacctcagtcaagtgagcaaaacacatcatttgtagtagtagtacagttcctgacaattaagcttcagaattagctgatcagctgaagctgagctgactgaactgaaatctgtgacgtttacagctcaagaaatgggtgagatgatcaagggcgtgtcgatcggctacgtgatctgcgacggcgagctcgccggcgtcttctcgctctccgacgactgccggaccggcgcggcggaggcgatccgggagcttggatcgctgggcatcaagtcggttatgctgaccggggacagcagcgcggcggcgacgcacgcgcagggccagctcggcggcgtcatggaggagctccactccgagctcctcccggaggacaaggtccggctcgtcagcggcctcaaggcgaggttcggcccgacgatgatggtcggggacgggatgaacgacgcggcggcgctggcggcggcggacgtgggcgtgtccatgggcatctccgggtcggcggcggcgatggagaccagccacgcgacgctcatgtcgagcgacgtgctcagggtccccgaggccgtcaggctcggcgggtgcgcccgccggaccatcgccgtcaacgtggccggctcggtggccgtgaaggccgccgtgctcgcgctggccgcggcgtggcgccccgtgctctgggccgccgtgctcgccgacgtcgggacgtgcctcctcgtcgtgctcaacagcatgacgctgctcagggaggagtggaagggcggcgccaaggaggacggcgcgtgccgcgccacggcgaggtcgctggtgatgaggtcccagctcgccgccgactcccaagcacccaacgccgcagacgctggcgccgccggccgtgagcaaacgaacggctgccgttgctgtccgaagccgggcatgtcgcccgagcactcggttgtcatcgacatccgagccgacggcgagcgtcaagaagagcggccggccgaggcggccgtcgttgccaaatgttgcggcgaaggcgccggcgagggcatccgctgcggagcctccaagaagccaactgcaacggtcgttgttgccaaatgttgcgggcggcgccggcgagggcaccaggtgcgccgcgtccaagaagccggcaacggcggccgtcgttgccaaatgttgcggtggcgatgccggcgagggcaccggatgtggtgcctccaagaggtcgccgccggctgagggaagctgcagcggcggtgaaggcggtaccaatggtgttggtcgttgctgcacgagcgtgaagaggccaacctgttgcgacatgggagcggcggaggtgtccgattcttcgccggagacggcgaaagactgcagaaatgggaggtgttgcgcgaagacgatgaactccggtgaagtgaaaggatgatgttgcaagattgaccagtaattcactctacgaaatgttaagttttaactgatcattattgtgtcattttccttgggctgaaatcatcttgtaatgcatcaatgattgttgtacagtactagtatcattgaaaactgccaaataacatgtaacattcgaaatcctttttttcaatgttgatacgtagttcacgattgcataccaaccctcgtacatgtacatcgcactcaatagccacaagcgtgtcccatttgagatagattattgacagaattattggtttggagtatctaatttactagatgatgtcccgcgtcttgctacgggatatatgttagatatctattatctatctattctattctattctattatatactaaaagtccattaaacttcctacaaacgctcctaagccaccacgtggcactcctacaaacgctcctaagtcgccacgtggcacaatctaatctcaccgtcgatttttactaaagttggtggacccattattttacaccattagattagatctattattgacaaatacttcctccattttttattagatgacgccgttgactttttctcacatgtttgaccattcgtcttattaaaaaattttatgcaaatgcataagatataaattacacttaaagtaatatgagtgataaaacaactcataacaaaatatattataattacgtaaatttttttaataagacaaatggtcaagcatatgagaaaaagttgacggcgtcattgttaacagtgaaatttggtaagcccggagtaatcatcggcttagagtcaacatcggcttcgaagtcctgagattagccgatgagagttgtcaagatgtcagttgtcggattcttgctatattcggttaagggaattgattaaggaagcttgtccagaagagaccaagttcaaataggatacggcatggcaagttatctattaattaggaatagtttgttagtttccttttatctttaggaaagtgtgtttagtgtcctataaggactttatcttttccttttatctttaggaaagtttctgtcttgtccgacaaggacttgtatcaacccatgggtataaatatgtacacccggggtctatgtaatctatcctcacgattaatacaattcggcgcatcgccaccttttaccttttctactttattttatcgtccggcgggacttggcacctgacgcagggctgcatcagtgttcgatctccggcgaagggataagtccaatgttccgtcggttcaggcaattgtatcgtctacgtcggcgtcgttcaaggctgcatcagtacattcaacctcttggattgctctggtttgaatgatatatttgcctacccatttatcatatgtctctgttaatctagtcttagcatatcaatttagctctatcggttgcttctcgttttagggtttctaccgatatcggctaaatcgcgttgctagattagattagcttagacatctaccaccctgaaaatcagtcaacggtttgattgtctggatattggtttcttttcatacttagtgctgcatcagttaagtttgatctactaagtcgtgcttagaaccgtaatctctagcatgctttttgactgccaataagggtttcatcgaggtttcagccggtgagttatctggacgttgtgtatgttcccccgccctcttctagactttatacatttgtaaaaatatgttcggctcataaggattgcatatacatataagttggatttagctgatgacaacaaaggtttcactgtttaatctaatctcgtggatttcatgacatcggaccaccagccgatgtgtgctttaatcttcggatcaatgcttattctatcatatcaatgctagccgattggtttatactagactatattattgttatattttattatcagtagccgattgcctatatatcattatttactaaagtgttagaatctacattggatgtatagccgattgcttaaactctatcgttatcggctggtatcggcatcggctattatcggctatcggctggaactactccatcggcttgtcagccgatcagctggtttatctgctgtttacatattttgtcagttgcaggatcaaactgactggcacgcccgcatctcatcaagatttggacctgcacaggagctaagcagatctcccaggccgatgtgttcgattttttcgtcaacagtcatctattaaaaaacggaggtagtaactacctcgtgtttataacgtacaagcgctactactgtccgtacatatttgtacgatgcaaatgttactgttgttctttccatacgtacaaacgtacatgattgtgaaaacaaaacgataaagctttcctaatcttcacttgaagaaaaaaaaatacacatgtacattaaagacaggaaaaacatacattcataaaaatcaatggtctttaaaatatgattttctacaatataaagataaaatatattacttcataaatataaatatgtttagttaaattaacatgtataataaatattcaatgaattttcttccaaatctatatattatatactaaaagtatattaaactttgtacacacgcctttacaccgctacgtggctcttacataaattacagaaatcttagaaatctattatatactaaaaatctgttaaatgtcctgtaaacgctcctacattgtcacgtgacgctctaataatgatagagaaatcctagaaatttagagtaaaaaaagaaaagcatccaacctttaattttctattaaattagtggatccgttattttaaacattggattagagctcttagaattcccatgctgctaatatctatccaaaaaaaaacataacttgcttacgtcgtacgatcgtctcccacctgaaaaaaaaacttaaatacctacaccatatacgatcgagaaaaagataaagccaaaaaataaaaaaaaacatgcacacatatataggggtgaaaacgggtcgggttcgatcgaatgtcacccttcccacatcctaacccatattttataattggaatcgggtcggacacggatagtgccgaatacggatagaaactcggataatgtcgggcaaaaatacggaacttatacataccaaaatagatatgtacactatcggttacggatatttattccgatatcaagtcgaagcaacaatcttatatatcatataggcaatcactatttaacaatttcatatatcatataataagattatattaggtcattaggaccttaggaaataaatagggtacaatacatcatagtataaccaatacatagtaccaaaaagtacctcacaaaaacgtaatacgtgtaatatccgtataattatccgggtaacacccggattttttaccggataatctgtatccgtcggatactatattcccgaacccgatctcatatccgccaaaaaagtctcaggtacttgaatttgtcccgaaagtaatgtgaccgggcgggtgagtgggacatacccacgccattttcacccctacacgtatataatagaatgggaaaaaaatactaataaggaaaaatcatcagtgccagcactgatttgtggtcaacaacctttaatctatgattttattaaaaataatactatatagatatgcatagttaaacttaatcgtaaacttattgtagtgataaatatatcatgacaaatgacgccaacatgtaatagcaaatgagatcataatgtttcaaataatttcatatcaaattttatggtgtcaaatatcacttgacaaatatacaccgttaatttgaatctacatatgtaaaaatcaaaataacaaaacctagcattgttttttaagtacatcgatctattcaggtttatttaattttgggagagaatgagattctcaaagtatttggaattttcaaaatttttcttatttgagctgtgagaagcacaattaatagatttatgagaaaataaattaaagtttatccagtgataataaaataacagaatttagatttggttaatttttaagtggatctttttaagtttattttgggtgagattgagattctaaaagtatctgaaatttttcaaaacttttttattgctatttgaggagtgagatgcatacatgatagatagatatttcttatatgccactaaaagttcaccggtttccttatatgccatcgtaaattagctattcccgtatatgccatcaaacgaaattttcgctcacctatatgccatccacgtcacccaagagtagaaatagtgttagtttttttgaaaaatgacaaaattgcccctggactccctttcctgctatgtaaagaacaaatcaggatgtgttgcagttaaaactatgactataactttagcaatcattattgattcaacacacaaccaatttaccaaacaaatcaggatgtgttgcatttaaaactatgactataactttagcaatcattattgattcaacacacaaccaatttaccaatgactggatgcaaagttttatttctcttccatttttatagtttatttatagattatagaaagaaatagtttgtattcttttttaaatggcactaagaacaataatttaattagtcctaatttaatgtatctaactggatgtaagcattcagtttagaaaaaaaaatctctcggcttagcaaactgattgtgtgcctaatttgttcacaaaaatagttatgctcaactaaaaaggttaagtgcttaatttagtctcaccatggaagtaagtaacttcatgataccgacatcagttgaataacatcaaaatatgcatcaccttttttaattcgtggtaagaaaactaagacaaaagaaaggaaaagaaagctaagggtaatttcttactttcaatgccacctaaaatagtcagatgacgtggataacatatgaggaattgaaaaaaaaatcatttagtgggatatacgggaatagcaaattttcaatggaatatgaggaaactggtgaacattcaatggcatataaggatttttttaataaataaataagattttagatagttattttgctacaatacaacccttaattcatcacgagaattacgtatttgccaagtagcattggcaaaacatgaataatacaataaaataagcataaaactacttatgttatattttttatggttgataaaaattctaatataccgggtataattgatggacaaatgctatacaccactaaacctaactgtaagtgcactctagagaattagttggtgtaaataagtttgtgaaaataagtacattcttagaattagtaaatgagtctcatatagttgaaaacaacatatgatggaaacaaatctaccgctaaagtataaatctttatcgaaatataattaatgataaggtgttttgcagattttcatggtctctttagctatagtttttattaagtactgttgaatgattaaccccactcatttgaaaaacataatattgtatgtattctattataatttaagaagtacttattactaacttcatatacacattttgcctattctctaccacaaatcgactcaaaacttaaaaaaaaaccatttttatcacctcctttatgtccctctttatccttcaatgcagggtgcagtacttgctataccattgtaaatattgcatgggcatgtacatggttgtgttaaggtggtgtccatgaaaggccaccataggcaatgtaactaaagtgacataattaccatataatcatttgtgattgtaccgatattgaactaagtgttaaaattgtactctaggatggtttttaggggtatggctacatcgacgcgggacccatatgtttcaaggcattacatacgaaagcgttggttggcagatacagtcgacttcatccattaaagaggcattcatgtttattttaacggtgttatcgcattattcggtagatatataaggtatatttagactatttatacatagatgtgaaaataagttatgaacaccgggttatgtaggtagatgaatttttttagtatattaataatgtgtcatttgttttagtgatactaatacagtttcatttattaaaaagtgcacctaactcgatcttaaaacaataacaatgatagtaagtagtggtgacaaacgatcggtttatatattaccaggacaaagggacttttttttttaaatgtaagagatattcttatcacattagtagtatactaaaatctatcatctattttacggtaaatatatttctttttctattgtaggataatctaaattctcttacagtatatacatatatagtgatgtataattccttttagcattttttaataacaaataagatgcccgtgcatctgtacgaaattcctttccgatttatgttttggaaacacaaactataatacatgcccgcgcattcgcgggggctaccttcctagttggagaaatgatacaatgatttggtttgaaatattatgaatatgatttagcatgtttatgtttagtttaagaatgaaataaattatagatataattactatatgcttgcatgttgtgttttgtgtgtttaatgggttgatgtggcagcttgcatgtatgttttagaagtgtcaataaatactaagtttgcatgttgaactttagatgtttagtggatattaactttatagaaagaagggataatatgaatagattaaatattttaaaaataagccaagcaaataacttataagcggtctaaataatagagtgatttttttagtaaaacatattttagataaatagagaaaataatcaataataataggccccgaaaagaacaaggcatatgacaagtacatgacacagcaaagacacatattagaaaagtacaagtcatatgacaaatgcatgacacacgattaatgcaaacacatagagtacaaagggaaagggtaaaaaggtgctatatttataacatatatttttcaccaaaacaattatattttttaactccataaattacctacacttacattaactatattgtaaatttaaaaacttacattacaagtttcaatttttacattgtaattttctaatacatagagtaaaaagaataggattaaaaataatttattatgtacttaaaagagtacatagaaaatatagacatatacttattatgtagaagagaaaatcacatagaaaaaaaggactcaaattaagtgaaaaataagtgaatcaaattttagggcttgtccactttgatgtcattttcaaccttaccaaattttagtaaagttgccaaaaaagtggctacatttagtttgctaccaaattttggtaactatataggagatcctgccaaaattttgataagttgtcaaaatttggtaaggatttttttacatcaaagtggacatgcccatagttttagcaatcccgaaggggaaaacaaacaagatttcattgtgggaataggttccatgtttatttacaacggattttcggcatgtcatcagttgatttaccggttatgagattctccttgggatccatgctcaaaatggatattgaactgaaattccaaacaatcccacgtggatgggctgttattcaggcccatccaaacaataccttaatgggctcattagcaaaccccaacaggccaacactgctacatcaactcagcccagatacgaaaacaaagtccagaacagaaggcccaacaaggctctgcactctgaatcttacacatctcctttggtcagagtcaagctctgaatcttagcagccatgtcgtccatgaatttctcatcactgtcctgttgcaggatcttccatctttctgttgcttcctggacgggtcaaaagatatacatctccatcagattcagcaggcgcggatctcgtggactgcaaagcatggcgacacaatgtcgacattgcttgataaccatgcacacattcttcagactttcagagttccagattcaacagagtctgctatctcgtttcaaacccacaaaggtaggcaggtgcaccctcgatcacaatcagtacccccagttttagtcacacaccaccaaaaaaagaaaaaaaaaactacacacacctctacacattaacaatatataagttcaattagaatgctacaaatactacaaaattgcgacggcgagtacattcacttccattttttcttctcgacctataatttaatttcctctacattagtccctgagtgacgcttgtctaggcccatttggcgagcatggacatgaggccggcgccggcgagcatggcgaggttgatgccgagctggagcttgcctttgctctgcaccctggggttcatgaagtcctcggcgaggaggtcgacgagggccatgtagatgaggatccccgccgcgacggagttgaggatgccctccaccaccagcgccgtcgggctgctctcgttgtacaccgacgagatgcccacgccgacggcgatccccaccggcgtcgtcaggcagaagaagaggaccatcgtcacgatcgacctcaccttgaacttcgcctgcatacattttcaggagaattaaattaactcatgctgtgttattaaatacatttttcaggagtagtatgcaaaaggttgatattgccggaactaggcaacttgtaaattaagccattccatttgtatacttcttcgggccgttctaaacagaggttggaaaccgctgattagccgcattgtatatataattaagtattaattattaaaaattttaaaaaataaatttatttgattgcataagcacattctatataaaaagttttcgtacgaaacatatcgtttgtagtttaaaaaatgtgataacagaaatcgagaagtaactaattaattaaccgatctctgatttgaaacaggcccttaagccctattcatcaggttacatttcagcttttctgttctttgtcttatacatataccagtccgaaatactatcaaatcatgtaaagtttcaatgctttagatgatcactactttgactcaatctcgagccagttagtcacatagccttccttggtcaaatcatcaaagtaatatagctcccttttccctctttacatatatattgtttttcaagaataaagtgccctatcttttccatagaatcaagcaagtggattagtagcttagtcttttttttgcctcttttgatggagaccatacaatacaagaccaaatttccagcttccagtgcgcgaaacataaaagattagcacgaaaacactaaatcatgctacgacaagtttagtgtaaataagtttcattcatcggattatctactttatagtacaaataaattaaatattttaaaatataaaaaaataaatacttctaaaaacaagtggtgtaaataatatagtactagaagattttttttagaaaaaacatattttgaagacgctgaggaaataatttatgacaataatccggtgaaacagctgaactacatgaatgatttgagccaacaaggctatatcttttaagatgccgtgcaagataccatttttacatatatgaattttgggtaaaaaaaaaacaccatgtagtaaaagaaaaagagagtagaaatatacctgcacgatgcagccaccgagtcccatgccctcgaacatttggtggaagctgagggcgaccaccagcggcttgatggtttccggattctgtgacgcgccgagggagatgccaatgatcaccgagtgcaccacgatccctagctctagaacctaattaaaatcaatcaattgtataagtcaataatgatacacaatatatattattctgaatattgcactcgtttgttaaattctgcacgcatttttctttgcattttacatcaccgaaaatgatatatgtacgacacacattgaatttgaaacctttgggcgcatgtgccctcgtttttccgcgattcggctctttcttctatcactccataatacgccgaaaatttgatctttggtataaatgctattttcgagaacgccaatttataatatatggtgggatctcttataaaaaaaatatatgtgcaaaagaaatgaatacacttaaattccattttaattctgcaatatttatttgaaacgtacatactactccctctatccctaaatataagggattttgattagatgtgacttatcctagtacaatgaacttggacatgatttatatctagattcgctgtcttagaatgtatcacattcaaccaaaatctcttatatttaaggacggagagagagagtagtaatgaaagtgtggaaaatgacagtaaaaaaaacagaaggttactgagactgctgtttcttacctatgggttaattaaaccaggctggcgtcatgaatgaatgcatggtaattagctaggtgttacgttaattaaaggaggtggcctctcacctgagagatgacacgatgccggagagttgtctccttgtcgtcctcgccgacggccgcgacgagcgccgacgagccgtgcgcgtggccgtgcgtcgcgtgggtgtgcacgtgcacctgtccctcgtgctcctcgccgccgccgccgccatcgccgacgacgtggtgattgtggtggtggttgtgctgctgcgtcgcggcggcgctctgcttctcctcgtccgcgacggcggcggcggtggcggcgtccttcttggacagcgcacgcgtgaagtagccggtggcgagggtgtcgacgacgagcgtgccgatggcgccgaccatggcgccgaagccggcgaaggggaactccttccacggcccgccggcggggaggcagtcgtcggtgaggttgtcgaacgcgtcggggaggatgtggatgaaccccgtggcgaggatgacgcccgccgcgaacgccttgacgaggaagaacacgtcgccgtcggggcgcagcgcagggacgtggcgccccagcgaggggaggccgcaccccagcgcgccgcacaccaggatggagaagaaggccgcgatcttgagccccctcgcccgcgcccggtcccgccccgccgccgcatcctccttcccgcacccgccgtcgccgccgtcgccgcgcgccgccgtggcgagcagcagcgccacggccgcggcgaggagcacggtggcggtggtgttcgtcctcatggccgctcttctgctcctgctgctatcgcggattcgcgggttttatagattcggatggtgaaggtgaagggagtaattagggttttaatcaccttggattagtcgctcggtttaaatggggggattaaaaggtgaatggtagtagtaacacagagtgacgacacttgacagtaactcggggtgaaatttttggttgagggagatattttagtttttgttttggcaagtaattacggcgtagaattactaattacgcaaggatgacgacactatttgtcacgaagtgttgacatgctgagtaggagagagaagtgtagcattcgagggtacgcgtgtgagaatttcaggccatgaaacgcgtaacgaccggaagtgtagcattccaccgccgtcgccgtcttctcccattccacatggatgaaggtactcgatctattcaatgacaaatgggttcgaggagtcttatgtatcgttaagtactcccctccatttttatttttttttttacgcttcccacaggcccgattaaactaaggaagctgtgaattaacttgtttgcccttcactcttgcccctttgcactaatgcgtttcgtccatacaggggtgaaaagggcaagggtggaaattctcgtatgggaggagggcgtctgaactgcaagcgtcaaaaaaaaaaaaacgccttcagagcatctccagcaggaaccttaaatccagcccctattcaatttttgagagttaagataaaaaaactagatccagcagggaccctattacagccccaaaataagaaggccctcaaatcctcccctaaggcctcagtcctaggggctccgagcacggccccatcattctttttttttggcgtggataacaattttgcttcgcgctttttcgtgttattcctgcgcggctgcgacgagggatcttctccggcgaccaccggcgaactcccagcatctccgccaagcctgccccaaaaggtaagacttttccacacatttgttcgcccgtcgtccacaaggccggcggcggtggtccatgcgtacgcctggtcaccgacctccccccatccgcctggccatacgccggccgtcgcgtgccctctgagactgcccgcacgcacatcacccacttgcatggtgtttgcccccacgctggcctctgcccgatcatattttcagatttcactggccggagcctgtacaccgccgctgccccattgatttttctggaaaaaacttgaagttggtcatgtggtgtggtggttgagtagtagaggagatctcagtagtagagtaccagtcaatttttctgaataaactcgttcttgactacctgtggacgtggtgacagatggttatggtggtgaatgatttgtttttaatatttttttgaagaattgtagtggactgtcggccaggacaatctaaattctcaactagtatatatcactgtacttatagtagcactgcattgtgtagcactgtacaattgttgcaatggatcgattataaccatatatatatgcactgcttttcatagattgaatgttgcgtactgtatatgtgtagttggatacgtgtgtgtatatgctctaaattttcttattaattttatgatcttgtgatggcagtgttttttacatggacttctacgacggtgacgacgacgacgacgacgatcttattaccgaatggtgggatcaagaggagttgtttgacgatgatgactactacattgcagctgctcttcttacggacatagagcataagaggaccaaaagaaagcgtcgtggttcagtcccaggtcgtgagataatttatagggataggtttgctggcaatttgcgcatagtggctgattattttgcagatcctcctgtatataatgcaaaattatttaggagaaggttcagaatgtcaagggagctcttcttgcgcatcgtggctagtgtggaggctcatgatgactacttcaggtggagaccgaatgcagtgggtcttctcggtgctactgcattgcagaaggtgtatggtgcaattcgcatgcttgcatatgatattccagccgatagtcttgatgaagttgtgaggatttcagagagcaccatgatagaagctttcaagcactttgtcaaggctgtggtagatgtgcttgctgatcaatacttgagggcaccaactgctgaggacactgcaaggttgatggctataaacactccaagggggttcccagggatgttaggttgtattggctgtatgcattggaggtggaagaattgcccaacaggctagaaaggacaatactcagggcatgtggatgggccaaccatgattcttgaagctgttgcatcgaaagatttatggatttggcattccttctttggactaccaggttctcttaatgatatcaatgtactacagagatcaccactctttcaaaggcttacatcaaggacagctcctgagctggagtttatagtgaatggaaagaaatacactatgggttactatcttgctgatggcatatacccttcttgggccacttttgtgaagaccatttccaatccacaaggtaacaagagaatacatta

SEQ ID NO: 9449 - DNA, 49125 bp, Oryza sativa
  unsure (1)..(49125): unsure at all n locations
acttggccgcgcccctcctcgagggcaagctctgcttcgacgtcatcacgccggcggcagcggcagcgggggcggccgggaccgggggcgcgattcagatcccgtgcttcgagaaggccacggagatcaccatccgcttgcgcggccgcctcggcatccagctgccaccatccggcgtcttcgcgaggctcaccgcgctgagcttgagccactgcaggttcgacgaccagggccagcgcgatctcggggacgccgtctcgtcggaggggtgcccgtcgctacgagagctccgtatccgcgatgccgatgtggtgtccaatctagccatccgctcggagtctctccgccttgttcagctgtctcgactggaagggattcgtcagctcaccatttctgctcctgcgcttacagaactagatttgtacgctgcttattgtgggggatgccaatggttgacatctttgctccagcactggagacacttcattgggttgattttttcagttcgagttcagtccgatttgttgagaagcccaacgtccatagactctccgtctatggcatggtgtatggacgtcgaaatactccaggctctctgcaactcgtgcagcattttacagaagcccgcgatgttcatctatctcttgtctatccctctgtgagtgcaccttctccctcttgttgcattacattattattatgatgaagctaatgtacttacaatgtttttgtagctcataaccatttactagtatcttagcataggctcatgcccatttaaaagataaaagtaagataatatttatgggactcctaatcagatgcgaaatatgtaactaggggagatccaaagagtccctatggcatgtagatttggacgtaagtgattatgtaatgcagaggcacattattaaagcaattttccttaggggttgttaggtacttaggttaatccccatgaggaaagcattggagcggattaattccacatctcaatagttggaattaatcccccccaattccccttcaatccctttggaagagggattaaccgaacaaggccttgaagtgtttacattgttttgtccaagccataaagttggaggcttctggaagtttttcctctgtagcattatatttttctctgatacatttctcaatgtcatcacttccttaatccttgtgtaaagtcaaaatgcacatattaagtaattatattttgtgaatttctgttaattttcagatcatggatatgtcctgtgagctcctggtgcaagcagtgaaaaagctccctgccgttgaaatcctatctctgcggttattaacaataggacatacctttggaccttgtgtttaccatttgcttaagatgtctactggtataagggagctgaagctgaagttagaagatcacattgcggtaatgtatacctcttcaatgtaatcaaataccatggtctctgtgaaagtggtagaagtatttgcaatttaatgcacctcagcttgatctttttactatgagtggtactgtggtagcacttgatgtgtcagtcccagtaccgatctgtccctccatggtttatctattaaaactacaagtctttcccctcttcatactacgatctaaaagtttgatccaagtgttgccatgctgctttggttttcaatgataaaatagaaatgattggaatgtcgctgcaaatgttcagttgctggtgattgatatgggtatgttgtggtcgtagtagattcatgtcaatgagacttccaacgaaccatgccaaatgatcaattgaaattccgacaaaaaatattgtaattgtagtcaaagtgtctgctacattttccaattttcttttctttccccctttctccacacatcacatctggaggtgattagatctaaaagatattgctcttatatgaataaaagcttttaatgagaatgatcattttcatttccctatattttcctgacttccttttatctgtgtcctttcgtaatattcttaaaatcaatttcttacatgcttttcatttcaggatggagaagttccttgctcatctggctgcgtttgttacgagccccaggcctggaaaaagaataatatcagcttgaattttctccagaaagttgaaatcaacaatttgagtggagcagagcgtcaaatatattttgtcaaacgactgttgagatggacgatgccagagctcaagacgattactctaagttttgatcctttggttactgtcagcgagaaggtgtctaggaagctacttagcttctctaccccagggatttgcatggaaatttacttgcaccgcaatggaactagggtaaagtatagtgcagcgaactagacctagaggtgattaactgacgatgaaatggagcacagtaatcactgaaaccaggcaaattcgggccttcctttcagatcaactagggttaaggatgtccgtctgtcatgatacaggattgtcgtatacttggttatggttgattgcacgactcacaacttgcgccttaatgtgtgtttacatgctctgaggaaagttttcatcctgctggtgaaaattgtctgatcgaaagtttgttccatttaaatgtgaatgctgcctgaccgaaaggttcaaatatctagtttccaatctctaattttctctcatagcaaggtaagtattgcttgtgctgtatctgtgttttctttgcagaagcatatgacttgttcattctgctccaggcactagctagttcactgttcaatactgctgtcggaggattatatcagttatcatagtgtgaagagctcgtccacctgggttttgaacacagtcgatgtctgattgttccaactccatatatgcatacaccatcaatatagcatactgtcatatcgatgtgtttgtgtttgttatcagataacttccatgtactcatcatctatatgacactattatgtgtttcagtttgaagatagacgtgaatgatgtgatgacaagggccatcatctttgttttcacatcatgccgttgtcggcttgtggtttcagcctggtgacccgccttcaattctcctatacgctgaatttattgttaacttgttacagagttccttcttggttgtcccatgctttttatacaacctttgttccaaaatatagcaacctaggatgggataggttctgtccggatttgttgtaatgtagtgtcgcatgcatctggttcaggttcaggtgatattatggaatggatagagtatgtgagtttgattatgcatttttgtgcagtagactgtgggagagtcatcgccgtcttcatcgccacagatggatctcctccagtgttctgtctgctgctttccttctcgacgatgttcacccatcagagcaccaacatggtgatatatacagtgttgttcgagatcgattaagatgtagacgaagttaggcgcgaaaagtgaaaaaggcattagagtatgattaatctatctatctattatctatctatcttctatctatctattatatactaaaagtccattaatctatctataaacgctcctaagccgtcatgtggcgctcctacaagcactcctaagttgccacgtggcattttataatctcaccgtcgattttcatttaaattagtggacccgttattttagaccgttcgatcagatctatttaaaatttaaatatttatgcttcccgtctataaacagaatccgtttacttaaaaaagaatacgcatatcgaaaagcgtacatggaaaaaagtatacctttacgtactgttcatttttgggaaaaagaacaacacgtacgtatcatttaccggaataacataccatggaaaagacgtttacccaactgttcatttgaaaaacaggacgtacgtacggtaaaaaatgaaaaatatatgtacatgctagaactgtcgtggaaaaatagacgatcattttaaaggattttctatactaacaaaattaaatttattagtccacaaatatggtcacatggcacttctacgaacacttttatacttttataccgtcatatggtactatgtaatcttaccatcgattttcatttaaattgatagacccattatgaaccataggtgatgaaaacaaactagacgctaaagtatagatctttatcaaaacataaacaatgatacaatactctgaaaattctcacggtcatatatatatatttttcaatgatcaaagtattgtatttatactgtataaaaatttaaaaatttaagtagtactgattaacactataaataaattgtgtctacacaaaaacgtcaaaaattctatttttatgaaaagaattattttttatcgcatccatattctctttctttcctgaaaggcatcgtgcagttaacataagtataggagagatatacacatggttgagttgaggcagaccaactagaggccaccgttgataatagtactcaacttcctacttactaatgaaatcatctttgagggtgctgatagtgaaataggagttatatgatccacgctggctttgagaggcatgagtacgccgctatgaaatccatgtttgaaggcaacagaaaaataaatccttggtagctctagcggggatattcatgtctaatttttaacagtattatctttttaacgtagtatttttagaatattcatttatatatttagaaataagagttttgacataaatatttaggtatgtatgtagtggagattaacgttttacgtactaacaatgcattaattatgtattaggcttattttggtgatacagttgtaattccattattaaaaagacatctagcaacaatgataattagtaattttgacaataggtaattttacgtgtaatctaaaaaaagtgatttttatttgaatataagaaacattcttatcgtttattaaagtctacggtctatttcacgacatataatattttagttataatgcgaaatctataatttcttatatgcatatagtgatatacgacttaattctattaacattatttctatcaacaataaataaggtgtccgcgcatatgcgcgggcttcctttctagttatatactaaaagttcattaaacttcctataaacgctcctaaaccaccaagtggcaccctataaacactctcaagtcaccaagtggcaccttaataaatgagagaaatctgaccatctatttttacttaaattggtggacctattattctggatggttagatctattttgtaaataaaaaaaaaaaaggaaccaacaggcggaacaaacgggggagccctaatgggcgatcagtcgcgctccatgcgccccgcgcgatcagttctgacccctctagtctcttctctctactactagtgcggcgggacagcgtgtcgcttggagcgcccgcgttttccttttttttcggtttgtcttgaagcgtccgcgttttccgtttcttttttgtctttttcagtttcttttttttatggttttttctgtgtttttcttccgtaccttccgttctgtttttttctttccatatctttttctgtttttaatacttatgtatgcaaactttatatacgtacaaaatataaattttatatacatgtatttttaggtttttatatgtacgtataccaattttgtatacatgtatataaagtttgtatacacacatataaagtttgtatatgtgtattattttaggtttttatacctacgtataccaattttgtatacgcgtatataaagtttatatacacatttacaaaatttatatacatgtatttttttatatttttatacgtaggtacaaatacaaactttgtatacgcgtatacaaaccttgcatcccgtacgtacacatatataaactttgtatacatgtatgcaaagtttgtatacgtgtatacaaagtttgcatacgcttatacaaactttgtatatgtacatattaaaaaccgagagaaaaaacacaaataaaaatgaaaatacaaaacttagtatacgtacgaatataaactttgcatgcgtacatctttaaaagaaccgaaaaaaagaagagaaaaaaaaagaaaaaaaaaccaaacagaaagataaccggaaaaaaaaagaaaagaaaccgaacaaaaccgaaaaaaaccaaaagagaacgaaaaaagggaagagaaacggaaaaaaaaaaatcccgcgtgggtgccgtccgctgccccctccgcgcgcgacacgtgtccagtcgcgcgggggagggcgcgcgtgactggtcgcccattagctttttcggaacaaacatacgagcgtacgtatgtactgtgtctgtacgtacttcctttatgttgttactttgctattttctatttgatgagaaactaaaattaaaattacttttacaggaaaaaaaatcacaaaagacatactattagatctagcagttctccctcctaggtctagcagttctccctccgtcgctttaaagattctacgaaggcttctaaatcactacatgatgctattaaattagtgaaagtactaaaaatcttaaaaaatataaagaaattgatcattggtttgtacttaaattaatggattagattttttaatagaaaaatcccaaacctctctccctccttgattttttttaaaaaagactattatatattaaaagttcattaaacatcctacacatactactaagccgctaagtggcaccatacaaacgctcctaggtttctaagtggcactctaatccgaccatcgaattttatttaaatcggtggatccattattttattttagaaggttagatttttttttaaaaaaaagcacacatccgaaacctccccatcacgtacgtatcaacgagctatattcatgaggaattaaaatcaaaattatttttacattaaaaaaccatcattaaaaaatacctccacctattaggtctagcaactctcgctctgtcactctaaacattctatgaatgtttctaagctgtaacgtggtgctattaaattaaagagaaaatcttaaaaaaaacaaaggattaggttattgatttgttagtttttcaataagaaaaaacccaaacctctcaacctccttccccaccgccgtgtgatgttaaaatccattaaacatcttataagctgctatatgatgttcttaaattagagaaaaatcttagaaattttggaaaaaaaaaatccaaccatcggatttgacataaatcgatggacacattattttaggtcattagatccttttttaaagaacaccctaaacctcctttcctccctccgtctttgcggcatatggtattaaaaagtctattacacatcttataaatactcttaagatgttacatcgttctcttaaattagagaaaatcctgatacaataaaacaaaaaaacatccgattatcagtttcgacataaacatcggacgcattattttaggtttttagattaatcatttagaaaaacattccaaacctccctccctccctgctcgtgtatagcgtgccctattcttttatctctgttttttatctccttaacaattaaaattgaaattatctatatgggaaaaaaacacaaatggacctccatctattacttatatcccgttaagcatctaacgactttctaccaacttaattaatttcttaacatgcatatgagggctacatacctatacaaattgaccttgatacttttaaaatgatctttttaggagataaataaatatttttaagaaagatgatcatagcgtctgaattacacatatgatctatgaagtcactaatcatagcatgtattcatctagcaatatatagacaacatgttaaaaataaaggtttggttggttgaacatcataccgataagcatgtgggttgcacctaggaatcttaacagtggaacaaccttgcagtggccttagcaataaaacaagtaagttccatataggaattaaagaccatgtccattttttttattttttttttgttaaacttgctacagtacatagtacattgtaaagtcttgacatagaacaatctagaaacatttatttgttatgtgacagtccactttagtgatgatttgctaaatacactatgaccattacttcaagatttcaagagaaaatttagaacgtatgcctttaccccctgccaggttatatgcacttatatttttgtcccaaattgtaaatatcaaatcatttcaaggatgattcatagaatgaaaatatccaaaataaaaaaaataaaaatggacatgaaataaattgaaaattgaacaaatgttgttggatttaaaacccatacttattaaaaaaattcaaacattttacaagcactgttagaatgaaaatatacataaaattttaaaataaaataaaaatgatattattggattgcttttggggttgtaagatattcttctggcgagttaagataccctaaattttctcataggaaccacatctattgtttcgacaaaatattttatcatcaattcaactatgatctcaagtaattttattttagaatttatttgttgcaaggataactataaaataaccggcgttcaaagcacaaaaaataagtttaattttagtttagaacataatacaagatattttaataaaaaaccacccgcacaaaaatatttataataaaatttcactcgcattatataagaaggtgctcgcgcatgtgcgtgggctaactttctagttgaattttaattattacaaacttcaaaatatatttctctgatattttaaagggttaattggatcatgctatcgtaaatttacctatctatctatctatcaatgatatactaaaagtccattaaacgtcctataaacgctctcaagccaccacgtgtatctttacaaacgctcctaagttatcacgtggcgttttaataaatttttggaatatctaataattcctaaaaaggaaaactttaaatacggtggatccacttttaacccgtatcatgtacgtgcacccgtgcatgtatgtacgccatatatccttccctcctcctatcatactatattatatactccctccgtttcaagtttcaaattttaagacgttttcactttcgtcaaagtcaaactatttcaggtatgactcagtttaaagataaatatagtactctctctatcccaaaatatacatatttttttactccgatatggtccccgagatactactttgaccaacaatatctataaaagtaaaatattttaaataaaaaatgttgcatattatgatagtttgtttagtgaaaaatctaataacatcaattttatatgattgatattttttttattttttgctattaatagtcaaagttaaaaatgtttgacttgccattattgaaaaaatgcttatattttggtatggagggagtaatatttataatactaaattagtttcatcaaatcaataattgaatatattttgtctcgggttgaaaatgttactactttttccataaagtttatcaaaattaaagcagtttgactttgaccaaagtcaaaacgtcttataacctgaaacggagggagtagaaaatacataacacatcattagattatttaccacaaaatttataattcaagacccaaactaaatatatttagtaagtaaaagaaataaaacacatttatagggaaaatcatatatatatatatatatatatatatattttaacgatctatttaacaacacatatattttaagagaacaatatgcaataataaatagttttaattagaaaatagatatttaataagtacattactttgggtcactactattatgtttgtaaatatatagataacttaagttggtgaaaccattggatttatcagcttcaacgccacctccagaaatcgacctgagcgatcgatcattcaagaaatagattagacacaataatccttatattagtagttccaaatttgatttttggggttgggtagtgacagctcacgtcgatcagctgtgtcacgtcagaatttcagatatatgtgtagtggaatgtttctgtttaattattagtatttgtttttactgtgatgcgattttgtatctccaaattattttcacaggccacggcgatcacaatccgcttcgcctgccttactatctggctgcctcccttcggtgtcttcgcgaagctatctgtgctgtgcttgacgacagccaatgtgatcttggtgacatcgtctcttcggaaaactggagaaaaaaaaatcactatagcaacgcgttacaaaacttccctaggagtagctaaacatccagggaaagcgactacatatgcagccctctgatgacaaaactcccctagaagcaatcttcgaaatgtcatcttccacttaatgaaatgaagcacatgtctctttgcgttttcgaaaaaaaaatagttttgaatagaatcatgcatgaggaaaaaaagtaatgttatatgtaagtttagaaatgaggtgtgtgccaaacaaaatagcgactaaaatacaacaagtagcttttaatttcactaattcagaagcattacaacaataacaagtactccctccgtttcataatgtaagtcattttagtatttttcatattcatattgatgactatctacattcattaacatcaatatgaatatggaaaatgttagaatgacttacattgtgaaacggaggaagtatatctaaactcataacaaatgagtggaatgcatgagaaccaggagccaacttgcctagctcctcttacaaaaagctcatttttaaatcacagacatatttatacataaagaaaacatacatatgcaagcaaaatatgataagagctatttgatcttacctcctaatagaaaaatcagtagactagtactacatagcacgttttgaagactcacatttgactcgatcaaaagcgtggatataaattttcatcgtaaacatgcatacgcgcacgtgaggctttcatcggacggcttccgcaggtgtcgcgccataagacaaaatcaaaatcgctctcaacttagattttccgttaagaaaaagacatgtatcatataccaaggaaatcttatacacaaatcttatacacggaatagagtgatctccggactccggttagaactgcctcacggtaccagtacactatttagtaatattttttttaattggattcatgccattataaatttgtatgtttggaaaaatactattactatttacaaaattggaatcataccattacaatttaacatctcttcgagatgtgccattgcttacccattcaccatactttctaaatttttctgaccaaattatcctttaaggcccctttgaatcacaggaatgaaaaaacggaggaatagaaaaaatataggattgtaaaaacagaggattgcaaaacacaggaaaaacatgggaatgaccgtttgattgagccgcaggaaaaacacaagaatttgaggagagggaaagactcaaagaattcttatcatgaggtagaacctcatgttaaatttcctctaaaatttacatgggaaaacgcatttcataggaatttcataagattccataggattcattcctttgattcaaagggctatataaaaaaaattcctatagaaataaaatcctttaaaattcctatgaatttctttggaatcaaagggccttatcttcttcctccttcccgtttctctcttttctctcttcctccatcccgccgccgcgcacgatgcaaccgaagcaagcagctgtgcgtgcgccgaagctgctcgtcatccccggccaccgcgtgcgcggaatctatgcagctacgcgcctcctgccagagccgctcgtcgtccccggccgccgcgtgcgcctactatggtccttgcgtgtagttctcttctcgttccttttttcgtgcagcctgccctacacgcttaaaaggtggcacatgattataggctctgtgaaagaacacgaattactagtagtggtttgcaatcatgtttggtagtgcgcatttttgaatctgcctaattcagctctttagttttttttagataactaagtgaactaatttcttggagaaactgaaaagttggaagaaagaaggttgatccatggctcgtcgtccctggctgccgaagccgtgtagctgctcgtcttccccggccgccgcgtgcgccgaagccgtgcagctacccggctcctgccggagccactggtcctccctagcagccgaagccgtgcaatcgctcgtcgtcccctgccgctgcgtgcaccgaagctgtacgtgcagctgcgcgcctcccaccggtgctgctcatcgtccctggccgaaagatgaagagagaaaagggaacaaagaagggaataaaggaagaagatgagggcaatttggtcagaaaaatttagaaatatcagtgaaagggtaagcagtggtacatctcgaagacatgttaaattgtaaggaaaacgcttcgtatcgagtgtccgggagcgaataaaatattggacgaaaaacgtttggtgggacccgccattgactcaacccattcttcgtcacccacgtcaatcttatcctctcacagacattccctcatctctcccctctatctctatatgctctctctctcccctctctttcactacagcggagatggcgcgatgagctccatctcgtcgtcaacagcgacgagctccatctcgacggcgcgacgagttccagctcgtccttgacggcggcgacgagctccatctcatcctcgacggcgcgaagtgctccatcccgaatacgcgacgagctctatcttggttcctcgaggacatggccctcgacatagtcacatagatgctgaagaagaggttcctgccctggcgagccttgaccacctcgccgaggtggtcgccgttccaagcatgcggaggcgacgcgatagcgatggcaatggcgacggcgctagacatggccaccgtcgaggacctgatgcgaatgcaactggtcttagccaagtttgtccatctcgtgccgttgctcgtctaggggtggttggagttgaagaagaagacagatgtgggtttagcttatgttgcactttgttgtattaaggtgtttcattttattttgattcgaattcaatgttacatatgttgattcttcatgttgcaatcgatatgtttcgattgcatttggttgaaacactttcgtcaaagcgatgaaacatttttcttctcatttgatgaaacatctaaaaatgcgtgaaatttttttagtaatgtttgagctttttttttattttttgttgcactttattatattaaggtgtttcattccattttaatttgatgttgcttaaattgatttcatggtgtggcaatccgtattgttgaatatttcatttggttgaaacaattttgctcaagtgctgaaacatttttctctagcagcgaaacatctggaacattttcattgaaacaatttttactgagggatgaaacatgtgaaacatttctcaatagtacggtgcaacaccgtccgatgatttgcatcagatcggatgtccgatccttagcagcctctaaattgtaatgacatgtgtcagggttacggataaggtataccctctatccttggatgtacgttgactcggagattaactgacccgcggtatataagggacccctgggcaggacctaagacatcgaatatcaccgctaacacatccaccatagcctacggagtcggagcctgcaggagtcaagtcgccgggagatctagtcggaccaactcgactacggtctcgtcggtatcatcgagttttgctatacactttgtaatctgtggttttcatcatataatcctataccaactggattagagctattacataccaaggagcctgaactagtacaatgcttgtcttttgcttgcttaatgtcgtattacgtagatcctcgtaccaacggatcctaataccctctatatccggtctacgggtatccaccgtcgacaacatgcttccaattttataaataataatgacatttttctaaacatgtaaatttataatggcatgatccaatgaacatttttttttccgaattaaacagagagaggatggggaaaaaagacaattagggagtcacaccaaattggaaaaccgcattcctaaaaccctacccgacgaaattgcaatggcggacggcggcggcggggccggcgacctcctgagcgcgctccccgacgacgtcctccacctcatcctcctccgcctccgctccgccgccgccgcggcgcgcaccagcgtcctcgcccgccgctggcgcagcctctggaccaccctcccggagctacggttccccgccgtcaccgacctcgcccgcgtcaccgccgcgctcctctcccacgacgccccgctcctccaccgtctcgagctctgcagccacgaccccgccccgcacgaggtcgccgccgtcctccacttggccgcgcgcagcttagcaggcaagctcctcctcgacatcgtgatgaggaagaagagaaatccggtggcggcggcggcggccgggattggggccgcgtttcacatcccctgcttccggaaggccacggagatcagcatccgcttcgcctaccttaccatccggctgcctcccttcggtgtcttcgcgaagctgtccgtgctgcgcttgacccgcttccggcttgacgacagccagtgtgatcatctcggcgacatcgtctcctccgagcggtgcccgtcgctgcaagcgctcactctctgcaattctcaaggcttgtcaaatcagccatccgctccaagactctcctcaccgttggcctctttgagctggaagaactgcagcagctcacgatttctgctcccatgcttagaacactgcatctggtccattgcttagacaagagggcggtaagagccgctgacatctctgctgcggcgttggagaaacttgggtggattggtctgtgcgattggaactcggtccacttcaatgtgatacaacacctcaagagactcgacaccttgaacctttcggtgtatggaccgccgaatcttgtcgattcttgatacccgggctctatgtcactcctccagcatttcaaagcagtctcaaatgtcgacctctatctcatttatccatctgtgagtacaccttctctcttgttgctgaactacattatcgaaacgttgaacgaaatgtcgtaatactctctttgtagttccccagcagccactgctagtatgccggcataggcacacaacattttaaaagaggattttgaaattgttgatataacccatggtccagatatcatttgtccgagtccgtgttttagtatatgtttcacattagcatctaaataagtgtcctaatcaaacgtgaatatataagttgggaggacatgtatgcactctggtatgtgtatttgcacatgattggttagataatggagaaattgagggcattcctggatcaatttccctttaaaagtgttcccattggatttctcaagccatacatatggaactttctggatgttctttatctgaagctgtatatacctcgtacatttctcaatctcctcacctccttagtcctgtgcaatgtcaaaatacacatattaattaagggatggaatggtgtacttactacaataactatattaatgaatctacaacttctgaccattgatcaagatcttcagtttccatttggtcctgttttacacattgttatgtaagacattgtatgaatctctgttaatttgcagagcatggttgactgtgagttcttgatggaggacatgaatactctccctgccattgagatcttatctctgaggtcaataacagcaggccatgcctttggaccttgtgtattccaattgcttaggacgtctactggtgtaagagagttgcacctggacttggatcatcaccttaaggtaatgcatacttattcaatgtgattaaatactttggttgctgtcaaaagtgatagaagtatttcttcttttacgcactcagcttgttcctctaactgtacacagtggtacttgatgtgtcggtctcgatactgatatgcccctccatggtgtatctattacaactaatggtctttccatattcagagtttcagactatagtgcctttgattttcctgtcagatcaactccttgcatccgattgttacatatggcacatgggatgtgaaaaattgcaatggtgatgagtgcatctctctctcatccttgtacccaccaaagagagtagtgctgctttggatttctgtgatatatgattgaaatatagctgccgatgttacttacttactggtgattgatatggatttgttagccatatattcaggttggtgacttagaagcaaaccacgccatacgataaattgaaatcttaacagtaaatattgtaattgtggtcggtgtatctgtgtaatgttttttacttcttttttgtatttctccctttctctacatgtcacagtcacttctctggaggggatagatttaaatcatatgccactcaatattatgaaaccaatgttttcagggagaagtttcttgctcatctggctgcatctgttacaagccgtcggactgggagagtatggatatctgcttgaattttctccagaaagttgaaatcaacaatttgagtggagcagagtatgaaatatgttttgtgaagcgactgttgacatgggcgccagtgctcaagatgattacagtaatgtttggtccttcagtaactgtcagcgaggaggtgtgccaggagctgcttagcttctctaggaggtgtagtccagggatttgcatggaaatttacttgcacggcaacagagccaaggttatgtatagagcagtgaacctgaagagacctagagatgattaactgacaatgaaatggcgacctggagcctagtatattcagtcaaaggagcactgtaattgggcaattttcaagcccgcctctgagatcaatctgttgtaaggatgtttgtctctcgtgatatagggattaattatgtatttgagcatggttcaatgcactctcaacttgtttccgaaatcatttttgtgtgcaggttttcaatctgctgtgaaaaatgtccgaccgaaatttgtctgactgaaaggttctatattatatattacagttttcgatctctacttatctgccgtagaatggtaagtacagcttatgtggtaataatatctgtgtttcgtttcagaagcaagcatatggatttgttcattctgttcctccatgtacccacgtgtgacaggtctgtaggacggttggcgattgttcaatattgctgtcgcaattgggtcatcgtttgtgaacaccgttgacatcttgttgtcccaactccatctatgtactcatcaccgttgacatcaccatttgccgtaaccatttgctttatttcccactgggacgtgcttatgtgtttttttccttattatagcttctaatactccctccgtttcatattataagattttctagcatagattcattaacatctatataaatatgggcaatgctagaaagtcttataatatgaaatggagaaagttagttataatcatgtgttttttcttattatagcttccaatagttataatcttgtaatttttttctactattttaatatacaagctagcactgtcttatgtgttcgcttaaagaaaaatataggtgatatgccaatgaatgagaggtgcattttgcatgagttgagccaaactcggagtggcaacatgccgccaaccgaacaagccgttgccggttgatgacttgattctaatggtcttggttaactggctggatgttgacgtggccatatgagtttttttaaaaaaaatgtttgaatagttgcatcgtttgaggatacaaaaggaattaattaaatattataaagttaaaaattgatttaaaataattttcttataaattcatatatagacttttttttgcaaaaaaccagccgtaccgtttagagtaagaaagcatgcgcatttcttcgaacatcccatcataaaataacacaacctatgtgtgaatacgcaactctggaatataaatcacatcatatcttcctatatagttggtatccactaaggcgtatttactcctataaagtaagaaatgcaagaagccacatcatcaacaattttaagtcatcagatcacattagtacaaagttaacaaccattggatcaagaagctacttattcattcaattcaatcatttattagttatccaatcacctccctttgctccacctcatagtcacagatagcattgttatcatatatacctatacaaatcatccccactaataggaattctctgagttttggtgcttccacgtcacctttttttcttccaaccattggatcaaaatcaaacgtccaacgatatttccagtcgatttgcttactgggccaaaaagaacagatagcccaagcccaacacagcaatgagttcttcactgttaatccgcacaccgcagcatttgcatcacctcctcccacggcgctgcatctttccctctcccacgctgcgcaacgcgcgaggtcgccccccccctcagctgcatcgcctcccctgtccccagcgctgcaccggagcctgcaacgcccatctctccccctcccgcgtcaagccgagcgcgcctaccaccagctgctttgcagcctgtttgcctccttggcgtgttaggactaaggaggaacggaaccgtcgacgcccatgaagagcagacttcatggctatcaaaactcccgcagctttcaaaccacctcccagcttttaactgtcgaccaccgcatggactcctgcagctgcatggaagccaatcatccggttcgcctcctttgccccaaactgttccccctcccccccctcccagtcttccaagaagaaaatcaagatctttaattcagccggctatatattggtcgactacggttgcttggatggagatggataccatgagcatttgtgttcttgcttcctcgcttgagtatgatcaagactgataagcgctcaggctgtttactccccaaacagctgaaccgagtgaatcaattctgaggtaaatttctccgagcaaggttttcccctgtttgatgaaatgcttatttacacacatcatatatttcaagtagacaggtagcactagaatcacgattcacttttgagtttccatctttttgatcttgagcaaaaaacctttgaaatgggcaacgatggagccgcagaaccacattaaggtgtttgtttcactgtcatgttctttgtatgcaatatgcacatctctatatgcttcatagttatttgacacatagatgctccgcatcaacgcggcggggtatgatctagtaccatgttttccaagtacaactcaaattattgtttaagatgtgtgttttgttttattatgcatgattagatagcatataattattacgtattgttacctaaatcaattttcagaaaaagcttgaatgaagcagagagatgcaaattgtctaaccacaacgatacccatattgcgcatgaaaataatattcatatattataacaagagtaaattgcataggcggtccttgaatttgtaagcaggtttcatctaggtccacgaacttataaattgtgtatcgaggtccctaaacttgatttattgtatcattccggtccaaagtctcatttgcccatggtcttgcctacgtggcatgacatgtagacaatgacatggcacattattattattattattattattattattattattattattattattattattattattattattattattattattattattattattattattattattattattattattatttctttttttctctcttcttcctctttcatttatgtcttcttcggcctcttcgacgcgggggagctcgaggtgactctagtggaggaagaagataaaagaataggaggaaaaagaaaaggggaaaggaaaaaaatgccacgtggcatgccacgtacacaagaccacggtcaaacgacactttggaccggaatgatacaataaaccaagtttagagacctcgatgtgcgctttgcaagttcgtggacctaaatgaaacctcataacaagtttaaggaccgctagtgcattttactcttataacaatatacaacgaatacagaatgacgcttggaaaaataaaatatgaattgtattgtagtaacataaggtatatataaagccacattatcatatattttgtagagatagagttgcatctaaccatttaaaactacgattttgtttgacgataaaactacataacccgtggcaagacgcggggtgccaactagttaataagatgattgggtcatgttgattttgtttcacgatagattttagggctggtttgcatgaactaaataattgttacaccgaagtgttttacatgttgttacacttactaaaaacaccccactgcacattcttacactacatgatgtaatctatactttctatatagtggtacccactaacaattattataagctaaagctcaacatgcaagcatgccacatcatcacccactactaattactattctaactcatttaaaatcccatgcaagcatgccacatcttcactagcaataactattctagcctattttaaattccatgcaagcatgacacaccatctacaatattagtatattatagagatcaacaggtatgtgtcaaatcatcttcctcacattattttctcaacatttctactttcatcattttgacaatatttaatatatactcatccatgaattccgcagcaaagcgcagggtatcacctagtttgctctatacttgtactccgatatacttttataaatgtgtttttattggatatttgagtcaaaaattttgactcctgagtagaaggtttgagatatttgagttgaaagttggactcttggcttgaaagtctaggagatttgggttgaaattttgattcatgaatggaaagtttaggagattttgggttgaaagttttaatttcatgatttgaaagtttcttttttttcatgatttgaataggaggcatttttcacataaaacatataacaatgctagtaactttcacatttttaattagtggtaatatatgaaagactgaaagagtactcatgcaccatcaattttgtcttcttttctatcttggtaggttaaacttctctatatcattagtcaaactaaacttattatcactagcatatttgagagcacgaaaggacatttagaataaaattccttagtctaaaaataaatttccaccgtcttaccgagaagtttttatcccttcaataccgatatctatccaccaccgctacttgcgagaaattgattcagacctacgatgtaatacggagtgctaacgtgtattctcttaagcacaacaggtatcgttgaggcccaaacatcaatacataaccttagagcgacgtattagcaaaataacaataatttgtgtgtaaaattatggtacacacatacatacatacatacatatatacatatatatatatacatatatatatatatatatatatgtatatatatacatacatacatatatacatagggctccatggtgcccaggcaccattgatatctaccgtaggattaggtactgatcgagctgatcttggcatggagttttgattaacgggttcacccgttaagtataatcggtttggaaagtgacaacatttgcatgcatgcaaaatatttcggaagatcaattgtgtgtatttaatacctttccaggcatgcttttcgggtgaaaattgatttctatacatttgtcaacagaaatcatgggtctgcggtttatatgataataatggtatgagttggtatggaaatataatccgaaaatctccaatctaagtatatgcagatctggaagctaagtatatgagaaaacggaaaggaggtatttagtacttggaaataggaagctatgtaatagctatgcatggaatgtaataggtacacattaattgtgtatatggtaatataaatagaaatatgtgcaagtccaactatattcaaataaggaatctaagtatatataaattttgtatctaagtatatgctacggtatattgccatattttgaataaaaaacttgcccatatgtcgccgagtttgctttgcgactccgtgatcttttttccatatacctatctaaactgtttataaatcaaacataacttttaagtacaaaattttaaatctcgtgatagaaatatactgttaagttcagttattttttccgtatgtacctagctaaattggtgagtacaaagttttaaattgcatgaaagaaattaacttgtaccgtgttaagttcagttatatttttccatatgtacagtatgcagaaaaatatatatggaaattaacttgtacaacgggaatatcgctcgcgaattaacttggcatctaataaagataaaatcacatgcctggttacgctggcacgggaatatacgctagaattggttgattaattttttatatgtgtaagtatagtttacgggaaaaataaccaaattaattacacaccatactcccttgcctgcgtacgggagacataaatatgtacttatattcacatcatatataatacctatgttcatgcacatccacaactcatacgtctgcacttgtttgtacacgaatgcatgagttataccaattaagtactgccttttcatacattaaaaacccaacgtacgtacacgcctgacagatacacatataccgcgtaccggtcgtgcacgtacatataccatgtgtgataagcaccggtcgagattgctcatgacatgtaatgaagatatttaaaaaatctgttttaatatatctggttattttcttcaaaaaaaaatccagttatgttaggttgggaatatgcatagtttttgttttgaataaaatggtacatacacacttgcaaaaatcacgaccacaagtcatacctacatgccttttcttataataaaaacagaatattcacacctgccacgtacgtacacaaataccgcgtacccagcgtacacacatataacacatatatatatgtcctgtaaactaaataattatatttaaaactgattgatcactctagaaaatggtcagtaaccaatatttattttttggaaaatacacaatgttcagtcgtgacattagtgcatacttaacttttggaaagaatagccaaagtacatattggccgagaacacacaaccatgaaaaagaaaaccaggtgacatatgcaccatcttagaatttgatacaattaaccttacacgtcaggtatgggcacaaattaaaaaatataaatttgtatgggagtacctatacatctttcgaaagatttttatgatcgtatcacacagatttttaatctttggattaaaatccgatagatataataaaaagcaaaaagcaattaagaaacaccataatggacactaaattaccatatcctcaagaaaaagaccaaatccaatacaaaatttaaaatttacatgcaaaaattcaaaaattacagtgtaacttacaaaagttatagtgtaagttttataaattacactgtaacttacaagaaaatgcactgtaaatttgagtgagaaaatcgagtgagagataagaaaaaatctttcgagtgagatatagcaaaatcgaatttgtatctatgtcaaagcattattactcatgtagtctgactgaaaagcaacaattaattcgaataattcttgcatcatgcaacagaagttatttcatacaatagaggtttaaaaaagtatcttgcttcattccgaaacagcactgttgtattgcttcataagttgttggacgacatctgggagtgtagccgcattagtcttcattgccattatatccatcacatgcctgctctgatattgtcaatggatacctaagattcataaaataagtaattttgttagtagaataacaagttggcgcgagaaggtaaaattgtacttgaaaccaaattgaaagagcccaacatgtaatatgtaattaaaaataattaccggattaagtcctcccacacaccagaattcattcgagttcttcgtatacatcagagttgtgtatatatccgttaggcaccaaaaaaacgtaaaggtatattctaagtaaattcaattcaagtgtgtattaatttatacccgggtataaattaatacacacttgaattgaatttatttagaatatacatcggaggaacatttttgcaattgttcacttgtcaaaattaaacaattttgctcttgggtaccagctggcgattcaacatgggtttggttagtaaaatactgtggaaaaaaaagggaaaatcatatacatacgcacgggagtactgcatgtcaacttaaactatacgaacgataaattctgggatctagacttttcacatacctacggttagtgccaaacctcacggatgacgggcagcgatggcgaggaggcacgccgcacgcggacgtcctgcgctgtaacgaaggttgcggaggtctgtctgccaacaagaacctcatggacgaacgccgtccgtgtaacgaaactcatggacaaccagcggcagcgacgaagaagcttgtggccgtccggcttcgttacggcgtggtgacgagaatgtcgtcggcnngagagctcgcgcggaaggaccagcagcaacgacgaaagagctcgcggacaatggtgtaccagtgtggccaagaaaaccgtgaacatgaaaaatggaatactatcactgggcatatgtatctgcatagaaaatggaaggataataatagcaattagcgggcatgaattaatattgcaaacaaaatcatgagtatatgcatgtgaatcatgagtcttattgggttaaacccgctaatagattataataccgtgttttgagtatgcacggatcttaaagcaagcgaacggtggatggcattggagtatgggcaccatggagcccctaacaaatttactacatacatatacatacatatatatatatatatatatacatatatatatacatatatatatatatacatatatatatatatatacgtatatacatatatatatatatatatacatacatacatacatacatatatacatatatacatatatatacatacatacatatatatatatacatatatatatatatggtaagactattctacacgaatagcggccaaacctatctcccacattagtcaaagcgcttccacgtcggttaaatctcgggtcaaacccacctgtggcttcttccatcacccaccctttctcagctctcgtctcacagatacggtgcagtaatgtgacggtcattgtgtagtaacgccgcagtttacgtgtgaaagtgcattaatccccctagtgggttttggtgattaatgacaaatgtggttaagggactaatgagttcattgaatgactttcaggtgcattagtccaaggtgtggaagatggatgcttggagaccccccaaaagtacaaaatcaaagcggaccggaactcgagaagtgcataggatagtttattttttgaaatcgagtttttaggaaaaaccgtactattaagaggggttccaggtgatgctctgagatatgtcaagtgctcttagtgtgaaccaagtgtcaagtttccctaggagtcatttttgcaaatactccatctgtccaaaagtgcaagtccagaacttcctgtcttccaggtccaaaagttccggtcttgtgaaaaagtttttcctaagtgtagtccggaagttcctgtcttccaggtccggaacttcctgtctagtttccagttcaaaattgtgagtaacggctagatgacgtcacctagccgttatacatatacagctcgtttccagctcattctttggctattccacttttacttttcgaacctagagttgttgctagcctctcccaagtgttttttttttgccttctccactcaatctagagcctaattcttgtgagaaagagagattgagagggagagaagaagatttggagatgtgtgaagactaggatcttgggtgagcacttggaatatctcgtgggctgcatctcggttcttattactcttggagatgatctcctagacagttaggtgtcgcccgtgagaatccgttgcatattgtggatgtcccgggtaagtttgtgaaggatctcctctcctccgaaagggaacgagttaagttaatgaagttcttgtgctaagattctagaggttttccaagtagagtaacctatacttgtggcagatttctagaagtaggttgagttggatcttggtggtcactcaattctagaaatttgcctaggagtgtttagggttgaaggctatggatttcctctagggtttttgcacaaatgaggcaaggggttaatcgagacccagctctttggagctcctcaacagagagtaggatcgcaagatccgaatttcgggaaaaaatcgcccttgtctatttctgtgatgtttctgtggatgattctgtgatctatcctctacttagaatacctgtgctctttcttgtgaagattggcttagtctcctgtttcgaaatttgaatttcatctctgttctgttacccggaagttcctgtcctagaacattggaagttccgggcctggaaggccggaagttccggagttccttaccaggaagttccgggtctgtttaaattttaccgctgcgatttgtttttaagttttcagggacagcctattcaccccccctctaggctcatcagcgcgttcaacgtgcagtaacaacactaaaatatagttcaaatatagtcacgacggatctacttttgacaagtactttttttctagcatcatagtgcaaatgatttcaaaaaataatgcatattttgcgagatattgctcttcaaaggttagcattttgaagtttaatcctccatatgtagtaacactatagcattactattactaccatttgttccgtgttactacgagagtgcagtaactactacaacttttacagtaacagtgtgttactgcaattgcttggtaatgttaccacaataacgtaataacaaccaataaattttacatagagaaaaaaatagttttctttatgatgaggaggacatgtgagagacgaggggtggtcagtgtttgctcgaatcgggaatattaggagtgtaattggaggccaagaaccgccaccaattttgctcaaactagtcaaagtgaatccatgatgactaatctcgttcaaactcctaagcggatgcaacattcatattgtgaaaattgtgcagtaacgttagtgcccgtgtacattaacaatatatgtgttttgcagtaaccgatcgttttactgcaattccatgatgatgttactaagaaattgtaacggaattgatttgcttctttcatggaggtagaaataatctaccttgttttttgtttgaatagcttactaaacaatatatgatagcatattagaatgaaaatgatactatacaaattgtccaatcttggtcaaaccctcaagcggatgctacatttatctagttagaattgtgtagtaatatagtgctaaatagcagtaataacttgtgttttgtgtattaaccgagcatgttactttaattccgtgatgatggttactacgaaattgtaccatgtatcttacacgtgctaaaattaatttactatatgtttttgtttgaacaatgtattgaatggtacggatgagggaggagagtgcagataaggcgggtgaggagagatgcgtgacatggcagagaaaggatgtgttttcacatgataggataaagcctcacgtgctaactgtatacttgttactgcacaaaagtataagtgttactgcatgataggtgtatgttaccacttccaactagctatgttactgcacgataattgtagttttactatgtcatttttacgagatgaagatcgaataggtgggccattggtaaagtctgtaggtggctttgagcgaggtctgattgatgtatgagtgttttgaacaattttatacatttggtaaaaccatgttactgcatgtatatgcccttgttactgtaaattatacattctgttactgcatgtggagggctaaagttcaaaatattctttgaaaagcaatatcttataagatatatattatttttgaaaaccgtttccaccatgatgctatagtgttactgcatatggagggtttccacactatgttactatgaaacttataatcgttacagtaacgacatgatgtgattacagtaacacaaaacagttagtagtaacacttttgatatagtattactgcttgtggagagttaagtttttaaaacatatctttgaagggtaatatctctcacatcatatactacttttaaaaaccgtttgcaccatgatgttcgaaaaaaagtgcttatcaaaagtagatccatcatgactatattatgactaaattttaattttgttactgcaagtaaaacacggtgttactgcacgatgaacaagacattactacgtcgttccgagacgagagctaagaagagagggggtggtgggaaaagtcaccggtgggtttgaccgacgtggggaacctttgaccagcctttaactgaggtgggaggtgggttttggacccttggggggagaggaggtgggttggagggaggggggtatagaacaactattttataccttgggtgtagaatagttttttctatatatatatatatatatatatatatatatatatatagttagcgatttaaaaatcaatacttgaaaaataaacattgataaaaaacttcaaatcaacttcaaaattaaaatttaaaatttaaaatttgactatggctgatttctatataaaaccagaccatatgtgcaatatagtgcatcggaagctaatcctttaacttatctgcacatataaggtctgtttggagagcttaagattctgataaacaactgattagtagccagctttcttaaaaatttggaaaagctggatttttctacttctggcttctaattcattctggattctatactataactcgtgagaatcatcaatcaataactcccctaaccatcccctttttctccgtttttttaatttttttctggctacctcggtgattaacacgtcgccgttttgcgattacggctcctcgagagcgcgtttgcgaccgggaaaacgcggtttaccggtaatttcactgttaatctcacgtttgaggatgcccgcgtggcggtttcctccaccgctggtgtccggtttgcgatctggttattttgcaaaaaaatccttgtctatgtataaaattttaaactaaccctcgtactacctgacagcctgttgtacttttcacaaaaaaccccttaaccttcagagaaatacaatgcaaagaagagaaaaatctgattttaggggtagctctgtaaaaataacaaatacaagggttttattgaaagataaccacgcctacggcctaccccccacaccccgagccctaacccaatcgtttcccgttccccacttcctccccactgcgccccgcgccgccgccggcctggggctgccgcccggccgccgtcgtcgccgtggtgcggcctccccctgtcgccgccttcgtcctccgcctccccacccccctccctcgccacgccgtggcgtgagccctctctccgtcgccgccgtcattgaccgccttcctccgtcctcgccacgtccccctaagcaccaccaccacggcccttccctcaaatccgcctccgtcgccgacccatccgcgccgccgctcgccctcccgcacctcctcctccccagtgatgtctcctgcctccatccccacctcgtgcaaatcgggggaggtggacttcggcgtggaggaggtcggcggcgtggaggagttagcgaacctcgagtcagcacggaggcgaagcggagtttgtcggtggcggcggctgcagtacgaggccacgtcggcgtcgttcctgccgatgggtggtcgattcgacgagcgtgctgctaggtacgcagccccttcgtctttcttcttccctgcgacccgccttttttcctttcagcatcgggtcagcaacgtacccccccccccacgccgcccctctcctccgaccttccccatgcgtcggcagccgcctgccctcgcctccgccagtcctgttgttgccgctccactcccctcctcatggtcggacgggttcgttccgtgtggcggtcgccggcgggggccatgatttggtggagttgagtcgattcggtggatttggggagtagtgtttcttcctcggtttagtctcttctttccctcacaagttgtggctgtttctttgggtttcttctcctatgggtttccttccgctgtgtttgctgactggaggaggagctgaggatgctcggcgggatctgcgcagcggtggtcggggatggcgaggaggagaagcagctctgtcctatctgcctcgacggcatggaggccgggcacgccgtgcggcgtgcgcgtcctccccggatgtagctgcgccttccatcacgactgcgtccaccggtggcacaccatctcgccgcgctgcctcgtctgcaacgggtgggttatgccgccgttgccaccgcccgccaagcctgctctggattcttgagatggcagcgttgccgccctaccgatcatggctcagttcttggttcttgacgagttcttgatgaattctcggcgattgtcatcgtcggtttctaggctctggacagcggttcttgccaatttcttgttggctatcttgttctcttaagtatgctgccttttagaacttgtgctttctggtcatggacttctataagatgattgatttgtatggacaggtgagttgttctataaatctgacatagtttcagtggatttggccaccgctgacgatagccaccgacagctcgggttctctctgctatcaatgcttcttatttggtatgaattctgaaagctcatttggcgtgttatctgcatgagagtttatgatgacatgtttttttgttcagaccagtgcttctgtttacagatttgttggtctacatattagtaaattcagatgagctgatgaatcagggaattcaggtaagatcatgacttccagcaatttggtactatacaacaaagttttgtcctattgtcctctttaatatgtatttcaataatgctgagtttattttctaatttgtcaaccatagcgagagatatcagtaaactgatttcgcaattgtttttgtcgaactgctgctgttaataagagttctggagtaatatatatttataggtacacaggatggttaagtaaatgtacttatttagattgctatgcctaacatccttagtttatttgatgatgctacatccttcttcaactttaaggtctgctatgcatctttgtattttgaaatcatgggccattgaaaatgtagcactagcaattactttgtctcttgtccagtaccttttctagatttctattctgtacttatttgggatgatttttttgttacttggaccaactagactctagagcgctgtgtgtgtcttttgatcaatgctgaacagtgcttataaaataagtgttgtaaacacagtgctgctttgatcatgtatttgagcctaacaatctctagatgcaccatgcaaaagtagttttttgttttgcccttatagctgttagacataagaatttccttactgttcgactaaaaagttctctttctacttcgataaaagaaaaacttgatgtgaccaggcaaacatgtcatcagtgcttcatataatagttgattctatgaatttttttttagtttcaggtataaaaacgacttggacttctatttcatggagtcatggttaggaataaggaatattctatgaatattccttattcccaaatttgaggactctagcatggacatcctaggagttcctacactggtgggtcgttctcaagaattcttcaagccgagttgtttctttctcttttttttcatctgatctttatctcacatggaaccatttatttccaggatattaactacgtcattcagatcccacagtaagctaattacgcccaacgatctaacacaattcctttctcagctaattatgcactcttttgtcaggaagagctgcattcctggttctgctgtaactgagggttgatctgcctgatgttgatgtgctgttcagctgttgctgttatgaagtgggaatctctattaccaaatgatacctttcttattgttgcctcctctgatggcgcatttgagaaaatgactatgcaggatgtctgtgatctgatgttgtacgtgaaacttggtgttaagcaagaattaggatcctttgcagtaacacaacagaatttggcggattatgtagttgacctttttttatagatagggacaacggacaatgtagcagctgtgattgttccattgggatctcattatagctctaaagttacactaaaagattggtacatatgcttgaagaaaatttcaggacatatatttcaccattacaaaccattccaaaggacatctatttcaccattacaaaccattccaaacaacggaagtcaggtaggtttaatgtacaaaaactcaaaaagttcttttttatcgcaatcaattggcaagttggcaatttgtagtcatgaccacttgggcaatttttacattatgttttgtttataagattgagcttttcattagttttgagaaataataaattactccaataatttgctattgtattacactatctatttatttcaatacatttttaaaattgaagcttattttgtttacatagtcatccgctacgtgtttagagtttgttttgattaagctgttaagcatacttgcgtgcgcagctgtgcgcggcgtggcgcccccttatacttctagtctaaatcaaaagttgaattgtttggggagcttaactctcccacacacacgaccatagttgtgagtggctcaattggatattctttcctagcgcgtccgtaagtccgttgatctcctcctaaatgcaaatgtgataaaaaaaataatttggcattgggaagtccaaacgtcaaatatccacaggccacaggggtgcatccttctaggcttccattccattccattctttaattccccccaattttatcccccacacactccactccactccactccactcttttcgctcgcgtcgcttcccaaaccctctctctcctcaaaaccctagcgtcgcccgcttcgcctgagctccggcgatggacggcggcgaccgcctcagcgcgctccccaacgacgtcctccacctcatcctcctccgcctccgctccgccgaggccgccgcgcgcaccagcgtcctggcccgccgctggcgccacgtctgggccaccctcccggagctccggttcaggatggacgtcagcctcgccgcccacgcggccccggccctccgccgcctcgaggtctccaccgacgcggacgacccggcggcgtcgacggccgcgctccggctcgccgcgccgcgcgtcgccggcgaactcagcttctgcatctggccgcggtgggacgacgcgccggaggaggatgacgggccggcgccggtgaggcgccccggcgtcgtcaagctcccctgcttcgagaaggccaccgagctctggctaatcctcggcctcctcggcgtctcgctgcccaaatccggcgtgttcgcgcagctcaccgcgctcgccttccgcgacgtccgcttcaccggccgctgcgatctcggcgccgtcgtctcctcgaagaggtgccccgtcctgcaaaagctccaagtccacgactcccaggatctgtataacctgaccatcttctcggagtccctcctccacatcgagctgagcgacctccatggcgggatggggcggctcatgatcgtggcgccgctgcttcgggttcttgatgtgcgccattgcttctactggaggacgtacaggtcccattcccttgttcgggatcaaccatatgccgcggtcttcacgcccgcgctggaggatctcatctgggttgatgcgtatgatcctaccacggtccaatttggcggcgttaaacgcctccggaagctggttacccaattacagtgtatggactctctcgctgcactgatcacatgaattcagtaatgctcttgcggcgatttgagacggtatccattcttcagctagaacttgactatccagaggtaactgcacattttccctaaatctggcatgaatgtcattgaataaaacatagagattgaaatatttgtttggtagactctagtcatagtgtgcatggacttcattcagatatataccttcataagtattgacacagctgccctggtgaaatgtgttagatatttatcttttatgtattgaaacaattgcccttggtgatgtgaaaaatagcattttggaggtcctggatctgctatcgcactggtactgaacatatgagatactgaggaacggtattgatcaaccagatttagccaaagaagactagaatttgagtagtctgtcccacaaacaggaagtgggctcagttttggttctatgcatgaatggtggaatatagagtaagacactgcagatatttgatgctgttctgcctatgtaaaactcccatttgtcttgctgtgctcaagtcttgtagctgtcagcttcttgaggctcttctctaaattatcatcattgggactcgcatgtttattaaccatgtttcaattgttagcttgaaaaatccagttttctatcagttgcatttacgaagtattatagtttgtacatttcactatgcatggtaaaaattaaaattaaaattatagtttgacgcccataatctgatattaccttttagtagataatccctccagtcttgaatatttgacattccaaacatacatttggccaaacttttgaaagtttcaccttttgtcttttcccgtgtttacaagaccatgttgattatccaaatgacaagatatgcagtaggcttgtatgaagaccctgatagaagatcttaactaattaaaagattagtatttttccaatcgtcaccaaaattagtattagtatttttcgtccgtatgtgcaatttttttcactcgtccgtgtacgatctcctcccaaaattttggttcattagtacacgcgagatcgagagaccgcatcgctcccgtcccgtacgcgcgtagaagcccagaactaatgcacggaaacgaaagaaactgaatcacaaatccaacaacaataaagcaaaaccatcccaaaaattaaatcaccggggccaaaaaaaaaggaaaaaactgcaaaaaaaaaaaaaatcaagcattggccggctcggcgaggcaatggggaggaggagacgaccatcggcggctcggacgcagcccagtgcgcacggtccaccccctcaccacgcacctccaaatccatggacccgcgtgagcgtgtgggcgaagagatgacggatccatgcgggaagggaagaggtcgctggatccacccctcccatcgccgccaacggcggatccgcgcgagaggagggtggagagatgacgggatctgtgcgggaggggaagaggtcgccggatccgcccctcctgtcgccgccgacggctgatccgcgcgagagggagacgaagagacgacgggatccaggcgtcggtggtggatccgcacgagcagcatcaacggcttggaaccgttgcatgaggaggccttgccgttgcccccagtcagccactgcgcttcttcatcttctcgctgtcgcgcttctccatcttttgccgcatcaaggagaggaggcgccgctggccgctgctgcagccggtaggcggaaggaggcgccgctactacagggaggaggcacaagggctgagtatgggaggatgtgagggcgcacgctggtggaggcgctggatgcctggatgacggcgtgcgatgtgaatggggaacgaccgaacgagtgagaagggagagagacacagagactgggatagaggagcctagagctctttgagcagaagacctcttggagctggcaacctcctcggtaatgaggtacgagcttcagttttttcattaaaaaaaaactacgaccggtcaaagttcctttctttattgtgctattgattttcgctgaaaaaaagtttttttagatacacgtaagagtacttcacaactaatgatgatttttctttattacttatattgttgacatcaaaatcacttgaagtttcagtaaatacaaaatatttgtttgagacaaaaaaatatcgattgaaaaaaaaagtttccacgagataagccaaattagagtattcgcgctatcatccacatgtcacatgacctgtctccacgtgagtccacgtataattttgagttgacagatcgagaaagcatgcatgaccactagagactatgagtaaatatgcaaaactattttcgatccgcgacactgctacatgatatattttcttggacgccacccacttttgtttacatgcggtccgtaagtagaaccgcatggaaaaatagggggacaggcgccgggctgtcgcccgtgggcgacttaagccaaccgcacccgaattttcacctgcacgggcccaccgcttttaaccgcgcccgcacacatctccccctccgcccgctcctctcctcccacctccctctcccactccactcctctcctctcctcccactctcctcttttcccctctcccggccggccggcggtgcgacagcatgcggcggcgcgcggcccctccctcaactgcgggtgggaagaagggcagcgagagcatgcggcagcgggcgaccacggcggcccctcccctctctccccttgcggatccggcggagggggcggcggatccggcggcacgcaccccctcccctcctcccccttgcagatccggcggaggggggcggcggatccggcagcgcgcaacccctcccctccctccccttgcagatctggcggaggggaggcatgggtgcccagcggagcggcggcatgcgtcagcggccggtgtggaggtgaggcgatggcgtcggcgaccggcggatctatctctccccctcctctctttgttatttgtgattctttgttatttgtgagatgcgttcttggagttcatttgttgctgtgagatgtgttcttgtgatgtgagagttcatttgttgatgtgagatgtgttcttgtgatgtgaaatcattgtgtgtcgatgtgcgactacagatccggcgccggcgaccagaagggaggttgtcctctgcatcggctacgacgatgatgacctcgccctcgtcgacgtcacctaccccaagcgtgacgtggacaacatgcagtggttccgggaaatcacactgctataccgtggccaccgccactccgcaccctttgtcctcggcctcatcgtgctctgtggccatgcgccgcccaacaactggtgcccatgggggcgagaagggcgtgcgcggccatcctcgggaccccggcaccctgatccgctacgtcgcgatctacatcggcggctcccatgccttgtgtaccagcccgactgcaaccagtccaagtacaccgtcagcgtgcttcctttccatgaggacggcggaaggatggcgcggcttgcagtggctcgcaacaaactaggcttggcttggctcagctcagttagggaaacaagctaaaacttgagctcgcctcggctcgttttctggctcgagccagctcgagctgtcttgcaagccttcctgttgaaacacctcttcatatatattttgtaattattaaaaaatcaagaataaatcatttaacatgtaaaatttaaataagtttatatattcaattcttcaaaatcttaatgataaatttcaatttgacaaataataacgccacaaaaagtaaaataatcgatataaacacatgatggcctaggctcgcaagccaaagcaagcggctcgcgagctagctcggctcatttcagcaatgagctgaaaaggaggcttgggcttggcttatttggcttacgtgctgagccaagccaaccaagctcgagccaagcccgagttgagctcacgagcctgagctttttttccacccctgcactaacaaatatccaacttttacatcccaaaaagttactcgtgtagtgtcccacagctaattaaaaccgtgaagtcacgatgtcctgtagcaaaatttgcctatttggttttgttacacagaggatgagttaatttctccatatcttcacaattttcagctcatgttttatgaagggggcaatatatttcaactccacacattttcttcacatatcaacgcacgggtatattcctatagttctctcatttttttaaggcttatctgcttagaaatatatatcccgcaaatataaagaagattaattgtcaagaacaacgcgactttgatcaaacttcaaccacccactatcatctgttatccgtgcaacgcacgggcattaagctatagtaataaatttgtcaactgtaacaaaacaacttatttttaattcaaggtggtactgtttttcatattgtttattgtggctccttatttgtgaatgtgcagatgggccgcagtcagtatttgatggaagccataaccatgctgccagcaattgaggtcatgtccctggagttgtcaaaaagagggcacgcttttgggcagtgtgttttccatttgctcaggatgtccactggtataagaaagctgaagcttgcattacgtggaggcctcaaggtaagtacatactttttaatattgtactttggttgtggggaattgatggaagtattttaacttttgcatgatggcttgatcttctaatggtcaggactctgaggagaggatcagtgttttgtctacctggttccagggacaccaggtaaaattttcaatctacactattagctgataactagtattgctctgtcatatgtattgctaatacatgtatagcacgcccagtaattcctgtacttgaatagccactgctaatggtgatatgagttttgactatttgaggtgatactttgctatgtaatttatgtagaagaggtaaatgctaaaggatccaaacatatttttgctcaatttgatgtgtatttccaaaattgtgaagtgttgtagttctttttgggtgcctggtaactgttaatgttagactttactgactgaacattgttcaggaactattaacgaatgatcttcatgttgatgaagatggtgcttagttagcgatctggataaatataactttaggcatgaatgtgatgtagtatgatgaggggaatgctcaaagaatcatgaatacagtctatctctctttgtttaagacaaacgaattgattgtcaagtgcatcccttttgcagtttttggatttgtttgatttcatttataaactgtacagggtactgttattttctatgaatggaagtcttgtcgcctcaattgttttgcctcaaaccacgtctctcattctattgttcttgtacaatagctgtaccatactttcggctggtttgactgtctaattactattctttcacctatactccaggcagatgctcgttgttctgcaagttgcatctgtaatcggccacaagcctggaaaacagaggacctcttcttggattctctccaggaagtggaaatcagtggattcagaggatcagagcatgaattggccttcttgaagcgacgttttggatgggcagcaattctgaagacattcaccatgcatcttcatcttgatcttactgtcagcgatgatttatgcaaggagcttcttagcctcgctacccctgagaccgatgtgaagatctacttctatcgtgatgatgatgttcacgctaggccagcttgggtgttgtatacaccagaagagtaaggcaccaatcggttgaagcctggtactaagtacttaattatgcagggtatgctatgaattaccatgaaactggatcttatattttgatgacactggatgttctgttatgatcgggattaattcccatactttgccctgcaaggttggcatgaagagatgctggtttacctcttctcatgttgtgatttgctgctttgcgctctaattgccatttgcaagatgatgtctgagatgactttgtagcatggatatgaactaggtacctgaatgctaaacttgtttaccgactagagaaattgcaacatatatacatcgaattttggatgctctacacggtgaactatgagctgggtactagtaccacacaagtaatatgattttgcaacaaaatgcagatgctccataaaagtaaatacgtttatgtacctttttacgacaaaagtacacattgaaaacttcccgagtagaaatttgaatctttcagttcaatgacttccacatttaaattgaagagactatcaatcaatcgcccggactattttcacatgcaacttgaaaagtttcaagtgtacgtatagttagttactagcttcaaataatatatagccaatttaacaatttattcatataatagttaccaataaatatataataaacaacgaatagctgatctcgcatctcataacacataaaattttgaagttcatgctggctataaatctgtagccttattttctcctctcttctctcgtctcatgtgtttattactaccttataaacaccgctttcctcgtctcttctcccatctcctgtgtttataactaccttataaacacttttttctttactgtaatcaggagtcaggacatagacacttgaattaaatttgaaaatatattattcatttgttttttctcatcaatattcggtacgcaaatatttttggtagaattatagcgtcgatctcatacaattgcgcgaaaataacatggtctcgagcggggacggtgcaagacaggtctaccagcgagcgaaaccgaacatgctggtcgattcaaattaattaattaccaggattagcgagtgattaattatttattaacagctaactagggtaattaatcactaattattactaattaatctctaattatataattaatcactaattattaactaatcgctaattagggtaattaataattaaataagtggcaccgttggacaagacgttaggttttgctgttccattctgcgtgaccgcgcaagaccgaggtgctaacggtcgtgctgttccattctgcgagaccatgcaagaccgaggtacaacggttgtgcgagatcgaatgcatatttataaaaaaattacatcttaaatatttctaagaaaaaagcaaataaacaatatattttcaaatttaattccacgatggcaaaaatgataattagcgatcaactacacgctcaactcagattttctgttgaactaatacgccattaaattggtctaaagtttattcgtacgtaaaatttgtaggtacaaagtttttatacgtacagattatttatctataatgtttcacgtattattttttatatataaagtctacgtataaattctgtttttgccttgactaaaatactactcataatttattaggcctaagattaaacctagagaagtgctaagagctgagggtcagacgctcggcggtgtatgggctggggtgggatgcgatcgtgcggctcctaacgatagatcgatcgcttattagcaatctcccactatggggcaatttggcaataaaaaatacggggtgtagtgaaagtggacatgcggtagtgtggcgggaatcatgccgattgactgcactgtgcattatcgttgcctactccctgagcaacactaactcagtgtcgctgaacctccatgcgagagcggcttgcctcttgacaactctgtaagagagggactagctacatgaagagattcgaacgggttgcaagagtggttgttcgttgggtgacattagcccatggagccatgggacaccagcacgctcttgccttatgtctttggcaatgtccttagccacggagttctcgttgcctcttcctgcggcaccaactcagtgtgaacatccctcgaggcggcaccgccggcatacactcgtgtcgccttcgctactagcgaaatcgagtatatcttcacgatttcttttcgaagatgacatatgtttgcacgatgtcatggaggtcgctcacctcgccgccgctggggtctccgtcctcgagctcgcccgcgtggcgatgccctcccctagtccccttctcctgcgtcgccgccgacgtcgacgccctccttcttctctcgtctctaggcctctccaaccccgagctcgcacgtgcggaacgccctcccttctcccacgtcatcgtcgtcgtcgccgctgccctcctcctctcccgcctcgcccaccctgtcggccagcctacaggaagagaagagtgagagagaggaggaaccgaggaagggaaagaagaggggaagagagggtgatgacatgtcaccaaacatgtcatggaccccacgctgactcagctgccacgttggatgaaaccggggtcaaaatcacctgaggacccaaaatgacccggttttgtaaattgagggatgacatatatcttgttttacggttgggggatgattttgtaattcgatgataaggtgagggacctgtgatgtacttttggctactactctaaataagctggcccaaataggaaaagatcgcgtcggccggtggagaagcgaagcccaaacgaacgcgaggcgcctccgatgtacacgtggcgcctcctccgcccctacaggtggcaagctcaaagcccgaacccgaccactccactgctctgatgctctctctctctctctcttcacgcttcccacgcgcgacacgaggttggagacgcgtcccgtgacgtcatcgtcgtccccgactccggcgagccccgcacccatggcggcggcggccgcgaggggcgccgccgcggcccgctccccgctcgtcctccaccgccacccccaccccgcgcaccaccgccgcctccgcctcctccccctggtcagtcactccgcccccgtctcatttcctcctcgatctctagctccctcctcttgggagtaggcgggattgggagctacctacctcgtgcttgattgaggtggtaattcggtcaactactgattggggttgcaggtggcgggcggcgggggaggctcgcccccgcgtgtggggaggaggatcagggccagccgggagaaggggcggcgggtcgggattagggttttcgcgaggtacagccaggcccaggacttctccactcgcctccaaggtaatcgattggttgatttctttccccatctctgtataattcgatttggtacttggttcaaagccactgtttaggcccagcttagttgaacatttgaacaagcgactgtttctcattaggcaggatacgggtgatgatgtaatatgaagcgagaatttccggtgtggattttcacgagtcgtgagtttgttttctgttcatcgcagtagcatagagaatgttatgtattttgggattcgggtgggtaaaatgtgtgtctcttcagattaatgtactccttattaacattcctcacaaaaataagtagttatgaacaatcttgggatagctagatcacagatgcattgaatattaagtttgtttgttcttcgcaaaatcatcccatgtctttgatttcgttcaaatgcagatagagctggcgaattgcctaagttggttgaggaccttctacagacatcaattagcacagggccacgaggtgcttttaggtttgcccaagggatccaagctgtccttggggttggtggggagtggctaaatgacttctcaaaggttatttcttgtttgtgttattcatctattttgtctaaaaacttgatcttagaatttctgagaactgaaacaatggaagcagctgtagactgaactactaatgaactactgatgtgttgagttggctgaggttgtatgggagaatattggggatttagggctagtctagatgtggatttttcatctatgtagaaaagaggaggttaaatttttgttggtgcacaatgaccaggtttatctaagatattttttttattgataactttggtttcagaagcgtaatatcctgctgttaatatgatgcagacagccaacacatcagcaggaataccagctcagatgcagctgggtttgctttctcctctttatcttagaaggctttttgagcgcatgggtgcaacttatatcaagctaggtcaggtaaggacatgttcatactttgcggtttatgctatcatcaactacaaaatgtgtccatctcaaaagaaaaaataaactacatgtgtatgtgttccttaattaatagattgtcttgaatttcttaatcttctgtaccttttgaaagaaatgccagaattcttcattttactttgtatatgtagcaaacagaaacaaagaccactaatatatctttcagcaacccagacaatagtcagttgcttacttgtcactagacaggtagagtaacctatctttagagtggtcctttgggatgggcaaagggagaggagttaaaatagttattcagtttaatagtcatatattttatgattatttcaacctggatagtcaactgactgtggtggtgcagttcgtagcttctgcaccaactttgtttcctgcagagtatgtcgaggaattccagaactgttttgaccgtgcaccacctgttccatatagtgagattgagtcaatattgcgtgaggagttgcaacagccgttggatagtgtatatgaatacattgatccagttccaatagcttctgcgtcaatagcacaggtttctgttgagaccatcagaagttctggactatttgttgtctggagctaaagcactgatataactttattcttatccaggttcatggggcaaggttgaagagctctcagaaggatgtggttatcaaggtcctcaagcctggtattgaagacactttggtggctgacctgaattttatctatgttgttgcacgtattttggaatttctaaaccctgaactacagaggacatcactggtgagttatcgcctaatgagtctttcactggacaggatttttttcattcattgaacaatcactggtcctggtggttctcggagcgcaggaaaccaaaatttactgctttctttagtataatcagaagccagaaggtcaaaatatatttttgtttgattcctgtatgcagcaagcaatgcatgccatgaaattgctcccatgaccatgaggatatgtttttcttttggtagttgaggcaagatcattgaacttttcacagttgatttacatgtatttttcaattctagccactgtgctagagttggcacaattaggtgcagaaacttttaatatctatatccttaaaatttattagttggattgaaggcaccacaatattcctaagatcagaaaaaatatgagtttaaaagattaacagaaaattcagaaaattctcccaataatcaagagagaaagaaatgtcttgccacttgcgtgttgttttgatggacctagattgtaacctagtagattaactatagttgttatagttgtgtaacaaatacaactgcacctctaatcattgatataagagctttatagcaaatggaattattgttaaatgtaatcatgcaactgcatggatatcccactaaaaaattgaatatcgaataaggaatatttcatggtggagcacaatatatcttgagcttgtgacatgaggagttgactatatatattattcacgtactataactaaaaaggaaaaaaaacaattagttcacacaaccagaaacaaatgaatactttatactttgtagttcatatatgtggaagtagagacagcatatagcaatcatgaaattttctgtatacttggttatccaaattttgtggtatcacaagttatagaagaatataataagagatgtccttatgctcagaattttatattataggtaggaattgtcaaggatataaaggaatctatgcttgaagaagttgatttcaggaaagaggctatgaatattgaggcttttcagaggtacatcgatgcaatgggatttgacaggcaggccaaagccccttttgtgtatcgccactgtagcacaaagcgtgtcctaactatggaaagattgtacggtgttccactcactgaccttgattctataaggtctcttgttcctgatcctgagctgactttagtcactgcacttaatgtctggtatgctccatgcgtccttgtgattccatacatcatatatttgggtatttctgccattcattgccttattcaatcctcagaataggcatgttgacatatgtgcaaaatgtgcaggtttggaagcttgatttcatgtgaatccttccatgcagatgtgcatgcaggaaatttatggttgctccgagatggacgtgttggatttcttgattttggtatgtaacatattctccaatctccacggtggcacggttgctctatatctcattaggcaatttaggatgcaccttgtatttgctaaaaaaggaaatattctggccttttaattcttacattatctattagtcaaaacacaaagtggtcaagaaagtttatcactattggttaataccatttcacaggaattgttggccggatatcgccaaggacctgggctgcaatggaggtctttttggcttcatttgcaactgacgattataatgctatggcatcagccctttctgaaatgggtgctacagggaatgatataaatgttaatgaatttgcaaaggacttggaaaaaatattctcatcaatacaggtaatatttcccaaaatagtaggttatttgatgtcatgaaggcctggttatcccgtgaacatggtgacccaatttcgactgttgaagtgccaaaaatgatgccagggtgaaacctgggctgtgtttcacaccaaaattggaagtttggttaaaattggaacgatgtgacggaaaagttggaagtttgtgtgtgtaggaaagtattgatgtgatggaaaagttggaagtttgaagaaaaactttggaactaaacacggcgctggtctggcagtagtaaaatgctgaatgcaagcaaaagtggcttatggacaggaatttttgtggctactggctagtcaaatttggatatcgttctttagttagtgttttaccacttatctcgtggttaattttcaattgcattctcatttgtgcgcaggatttggatactgaagtcatagttgcaacagcaagaactcctgatgctacagcagtatcggctaatgttgtcgttgacgagagacagatgaatgcattgtttcttgatctggtgagctactttcttttctctctcggttagaacaaggtagagagaacttctaccttatacattcgtatcactgtatgttcttgttggtaaatgttgcctgccagcgtgtattgttttcacgaaagaagagagatgagggaaaaaaaacaatgctgacaattctgttgctctgcgtcttccaggtgagggtcagcgagtcgtatggattgaaatttcctcgcgaattcgctcttctgatgaagcagcttctgtattttgatcgctacacaagattgttggctcccagcatgaacatgctgcgagatgagagggttaacattagctcccgccaacaggccagaagagtagatcgtttccagtgaccgatgcttgtgatacactgacaagtagtacgtaacaagctcgtgtaagtgtaacctactaactgtatatattttcaccagatcaacataggaatgaaccgcagtgcagcggccaaggaaaatttggacgagtataactggacattttcatagtagcaagtcgctctgtaaaaggtgtacgttaagatggaagtaaaatgtagagaaaatagaactgccggggccgctgggctgactccacatcatttttctgaattctttctttactgctctcctcacaagccggcgctgcgtaaagaaggccagtttggaaaacatgattattttgaccgattatactctagtggattattaagatgattatagatgtaaattaaatattttgataaataagcttaataaatagcttagaataaataaattggttagaataaaatggagtgttttaaagaaaacgtatttttatagacgtagagcaaatggtttgggacaataatcctagaaacgcttcatatcgagcgtacggtagtgcatgcctcggacgccctcctcccccgtcttctctcccccatgcccctcctcatctctctcacgccgacagtttcttcgtgctcacaatctacaaccttggcgagttaccgcctaagcgcatcgtcccactatagctgtttgagaagggttctagctagctattatatttgctctcatacagtgcaatttagccgctatagcttcatttaacctgatatatatagctgtttgaaaagctaaccgctaaaacattgatcgccaaccagccattgagagctgggccggcaaacgagctgatcttgtgctcggcgagtgccgtgcagaggtcttgttcaggcaggctggagctgaactgacccagagcctcaagctcggggagaggatcgatgacctcgatcggtgatcactcgctcttcttgggggcgaaagacttcccggcgttcaggccaaactgcgactgcgtacatgtacttcgcgcagcatga

SEQ ID NO: 9450 - DNA, 144662 bp, Oryza sativa
  unsure (1)..(144662): unsure at all n locations
ctattagtggggatgatttgtataggtatatatgataacaatgctatctgtgactatgaggtggagcaaagggaggtgattggataactaataaatgattgaattgaatgaataagtagcttcttgatccaatggttgttaactttgtactaatgtgatctgatgacttaaaattgttgatgatgtggcttcttgcatttcttactttataggagtaaatacgccttagtggataccaactatataggaagatatgatgtgatttatattccagagttgcgtattcacacataggttgtgttattttatgatgggatgttcgaagaaatgcgcatgctttcttactctaaacggtacggctggttttttgcaaaaaaaagtctatatatgaatttataagaaaattattttaaatcaatttttaactttataatatttaattaattccttttgtatcctcaaacgatgcaactattcaaacattttttttaaaaaaactcatatggccacgtcaacatccagccagttaaccaagaccattagaatcaagtcatcaaccggcaacggcttgttcggttggcggcatgttgccactccgagtttggctcaactcatgcaaaatgcacctctcattcattggcatatcacctatatttttctttaagcgaacacataagacagtgctagcttgtatattaaaatagtagaaaaaaattacaagattataactattggaagctataataagaaaaaacacatgattataactaactttctccatttcatattataagactttctagcattgcccatatttatatagatgttaatgaatctatgctagaaaatcttataatatgaaacggagggagtattagaagctataataaggaaaaaaacacataagcacgtcccagtgggaaataaagcaaatggttacggcaaatggtgatgtcaacggtgatgagtacatagatggagttgggacaacaagatgtcaacggtgttcacaaacgatgacccaattgcgacagcaatattgaacaatcgccaaccgtcctacagacctgtcacacgtgggtacatggaggaacagaatgaacaaatccatatgcttgcttctgaaacgaaacacagatattattaccacataagctgtacttaccattctacggcagataagtagagatcgaaaactgtaatatataatatagaacctttcagtcagacaaatttcggtcggacatttttcacagcagattgaaaacctgcacacaaaaatgatttcggaaacaagttgagagtgcattgaaccatgctcaaatacataattaatccctatatcacgagagacaaacatccttacaacagattgatctcagaggcgggcttgaaaattgcccaattacagtgctcctttgactgaatatactaggctccaggtcgccatttcattgtcagttaatcatctctaggtctcttcaggttcactgctctatacataaccttggctctgttgccgtgcaagtaaatttccatgcaaatccctggactacacctcctagagaagctaagcagctcctggcacacctcctcgctgacagttactgaaggaccaaacattactgtaatcatcttgagcactggcgcccatgtcaacagtcgcttcacaaaacatatttcatactctgctccactcaaattgttgatttcaactttctggagaaaattcaagcagatatccatactctcccagtccgacggcttgtaacagatgcagccagatgagcaagaaacttctccctgaaaacattggtttcataatattgagtggcatatgatttaaatctatcccctccagagaagtgactgtgacatgtagagaaagggagaaatacaaaaaagaagtaaaaaacattacacagatacaccgaccacaattacaatatttactgttaagatttcaatttatcgtatggcgtggtttgcttctaagtcaccaacctgaatatatggctaacaaatccatatcaatcaccagtaagtaagtaacatcggcagctatatttcaatcatatatcacagaaatccaaagcagcactactctctttggtgggtacaaggatgagagagagatgcactcatcaccattgcaatttttcacatcccatgtgccatatgtaacaatcggatgcaaggagttgatctgacaggaaaatcaaaggcactatagtctgaaactctgaatatggaaagaccattagttgtaatagatacaccatggaggggcatatcagtatcgagaccgacacatcaagtaccactgtgtacagttagaggaacaagctgagtgcgtaaaagaagaaatacttctatcacttttgacagcaaccaaagtatttaatcacattgaataagtatgcattaccttaaggtgatgatccaagtccaggtgcaactctcttacaccagtagacgtcctaagcaattggaatacacaaggtccaaaggcatggcctgctgttattgacctcagagataagatctcaatggcagggagagtattcatgtcctccatcaagaactcacagtcaaccatgctctgcaaattaacagagattcatacaatgtcttacataacaatgtgtaaaacaggaccaaatggaaactgaagatcttgatcaatggtcagaagttgtagattcattaatatagttattgtagtaagtacaccattccatcccttaattaatatgtgtattttgacattgcacaggactaaggaggtgaggagattgagaaatgtacgaggtatatacagcttcagataaagaacatccagaaagttccatatgtatggcttgagaaatccaatgggaacacttttaaagggaaattgatccaggaatgccctcaatttctccattatctaaccaatcatgtgcaaatacacataccagagtgcatacatgtcctcccaacttatatattcacgtttgattaggacacttatttagatgctaatgtgaaacatatactaaaacacggactcggacaaatgatatctggaccatgggttatatcaacaatttcaaaatcctcttttaaaatgttgtgtgcctatgccggcatactagcagtggctgctggggaactacaaagagagtattacgacatttcgttcaacgtttcgataatgtagttcagcaacaagagagaaggtgtactcacagatggataaatgagatagaggtcgacatttgagactgctttgaaatgctggaggagtgacatagagcccgggtatcaagaatcgacaagattcggcggtccatacaccgaaaggttcaaggtgtcgagtctcttgaggtgttgtatcacattgaagtggaccgagttccaatcgcacagaccaatccacccaagtttctccaacgccgcagcagagatgtcagcggctcttaccgccctcttgtctaagcaatggaccagatgcagtgttctaagcatgggagcagaaatcgtgagctgctgcagttcttccagctcaaagaggccaacggtgaggagagtcttggagcggatggctgatttgacaagccttgagaattgcagagagtgagcgcttgcagcgacgggcaccgctcggaggagacgatgtcgccgagatgatcacactggctgtcgtcaagccggaagcgggtcaagcgcagcacggacagcttcgcgaagacaccgaagggaggcagccggatggtaaggtaggcgaagcggatgctgatctccgtggccttccggaagcaggggatgtgaaacgcggccccaatcccggccgccgccgccgccaccggatttctcttcttcctcatcacgatgtcgaggaggagcttgcctgctaagctgcgcgcggccaagtggaggacggcggcgacctcgtgcggggcggggtcgtggctgcagagctcgagacggtggaggagcggggcgtcgtgggagaggagcgcggcggtgacgcgggcgaggtcggtgacggcggggaaccgtagctccgggagggtggtccagaggctgcgccagcggcgggcgaggacgctggtgcgcgccgcggcggcggcggagcggaggcggaggaggatgaggtggaggacgtcgtcggggagcgcgctcaggaggtcgccggccccgccgccgccgtccgccattgcaatttcgtcgggtagggttttaggaatgcggttttccaatttggtgtgactccctaattgtcttttttccccatcctctctctgtttaattcggaaaaaaaaatgttcattggatcatgccattataaatttacatgtttagaaaaatgtcattattatttataaaattggaagcatgttgtcgacggtggatacccgtagaccggatatagagggtattaggatccgttggtacgaggatctacgtaatacgacattaagcaagcaaaagacaagcattgtactagttcaggctccttggtatgtaatagctctaatccagttggtataggattatatgatgaaaaccacagattacaaagtgtatagcaaaactcgatgataccgacgagaccgtagtcgagttggtccgactagatctcccggcgacttgactcctgcaggctccgactccgtaggctatggtggatgtgttagcggtgatattcgatgtcttaggtcctgcccaggggtcccttatataccgcgggtcagttaatctccgagtcaacgtacatccaaggatagagggtataccttatccgtaaccctgacacatgtcattacaatttagaggctgctaaggatcggacatccgatctgatgcaaatcatcggacggtgttgcaccgtactattgagaaatgtttcacatgtttcatccctcagtaaaaattgtttcaatgaaaatgttccagatgtttcgctgctagagaaaaatgtttcagcacttgagcaaaattgtttcaaccaaatgaaatattcaacaatacggattgccacaccatgaaatcaatttaagcaacatcaaattaaaatggaatgaaacaccttaatataataaagtgcaacaaaaaataaaaaaaaagctcaaacattactaaaaaaatttcacgcatttttagatgtttcatcaaatgagaagaaaaatgtttcatcgctttgacgaaagtgtttcaaccaaatgcaatcgaaacatatcgattgcaacatgaagaatcaacatatgtaacattgaattcgaatcaaaataaaatgaaacaccttaatacaacaaagtgcaacataagctaaacccacatctgtcttcttcttcaactccaaccacccctagacgagcaacggcacgagatggacaaacttggctaagaccagttgcattcgcatcaggtcctcgacggtggccatgtctagcgccgtcgccattgccatcgctatcgcgtcgcctccgcatgcttggaacggcgaccacctcggcgaggtggtcaaggctcgccagggcaggaacctcttcttcagcatctatgtgactatgtcgagggccatgtcctcgaggaaccaagatagagctcgtcgcgtattcgggatggagcacttcgcgccgtcgaggatgagatggagctcgtcgccgccgtcaaggacgagctggaactcgtcgcgccgtcgagatggagctcgtcgctgttgacgacgagatggagctcatcgcgccatctccgctgtagtgaaagagaggggagagagagagcatatagagatagaggggagagatgagggaatgtctgtgagaggataagattgacgtgggtgacgaagaatgggttgagtcaatggcgggtcccaccaaacgtttttcgtccaatattttattcgctcccggacactcgatacgaagcgttttccttacaatttaacatgtcttcgagatgtaccactgcttaccctttcactgatatttctaaatttttctgaccaaattgccctcatcttcttcctttattcccttctttgttcccttttctctcttcatctttcggccagggacgatgagcagcaccggtgggaggcgcgcagctgcacgtacagcttcggtgcacgcagcggcaggggacgacgagcgattgcacggcttcggctgctagggaggaccagtggctccggcaggagccgggtagctgcacggcttcggcgcacgcggcggccggggaagacgagcagctacacggcttcggcagccagggacgacgagccatggatcaaccttctttcttccaacttttcagtttctccaagaaattagttcacttagttatctaaaaaaaactaaagagctgaattaggcagattcaaaaatgcgcactaccaaacatgattgcaaaccactactagtaattcgtgttctttcacagagcctataatcatgtgccaccttttaagcgtgtagggcaggctgcacgaaaaaaggaacgagaagagaactacacgcaaggaccatagtaggcgcacgcggcggccggggacgacgagcggctctggcaggaggcgcgtagctgcatagattccgcgcacgcggtggccggggatgacgagcagcttcggcgcacgcacagctgcttgcttcggttgcatcgtgcgcggcggcgggatggaggaagagagaaaagagagaaacgggaaggaggaagaagataaggccctttgattccaaagaaattcataggaattttaaaggattttatttctataggaattttttttatatagccctttgaatcaaaggaatgaatcctatggaatcttatgaaattcctatgaaatgcgttttcccatgtaaattttagaggaaatttaacatgaggttctacctcatgataagaattctttgagtctttccctctcctcaaattcttgtgtttttcctgcggctcaatcaaacggtcattcccatgtttttcctgtgttttgcaatcctctgtttttacaatcctatattttttctattcctccgttttttcattcctgtgattcaaaggggccttaaaggataatttggtcagaaaaatttagaaagtatggtgaatgggtaagcaatggcacatctcgaagagatgttaaattgtaatggtatgattccaattttgtaaatagtaatagtatttttccaaacatacaaatttataatggcatgaatccaattaaaaaaaatattactaaatagtgtactggtaccgtgaggcagttctaaccggagtccggagatcactctattccgtgtataagatttgtgtataagatttccttggtatatgatacatgtctttttcttaacggaaaatctaagttgagagcgattttgattttgtcttatggcgcgacacctgcggaagccgtccgatgaaagcctcacgtgcgcgtatgcatgtttacgatgaaaatttatatccacgcttttgatcgagtcaaatgtgagtcttcaaaacgtgctatgtagtactagtctactgatttttctattaggaggtaagatcaaatagctcttatcatattttgcttgcatatgtatgttttctttatgtataaatatgtctgtgatttaaaaatgagctttttgtaagaggagctaggcaagttggctcctggttctcatgcattccactcatttgttatgagtttagatatacttcctccgtttcacaatgtaagtcattctaacattttccatattcatattgatgttaatgaatgtagatagtcatcaatatgaatatgaaaaatactaaaatgacttacattatgaaacggagggagtacttgttattgttgtaatgcttctgaattagtgaaattaaaagctacttgttgtattttagtcgctattttgtttggcacacacctcatttctaaacttacatataacattactttttttcctcatgcatgattctattcaaaactatttttttttcgaaaacgcaaagagacatgtgcttcatttcattaagtggaagatgacatttcgaagattgcttctaggggagttttgtcatcagagggctgcatatgtagtcgctttccctggatgtttagctactcctagggaagttttgtaacgcgttgctatagtgatttttttttctccagttttccgaagagacgatgtcaccaagatcacattggctgtcgtcaagcacagcacagatagcttcgcgaagacaccgaagggaggcagccagatagtaaggcaggcgaagcggattgtgatcgccgtggcctgtgaaaataatttggagatacaaaatcgcatcacagtaaaaacaaatactaataattaaacagaaacattccactacacatatatctgaaattctgacgtgacacagctgatcgacgtgagctgtcactacccaaccccaaaaatcaaatttggaactactaatataaggattattgtgtctaatctatttcttgaatgatcgatcgctcaggtcgatttctggaggtggcgttgaagctgataaatccaatggtttcaccaacttaagttatctatatatttacaaacataatagtagtgacccaaagtaatgtacttattaaatatctattttctaattaaaactatttattattgcatattgttctcttaaaatatttatgtgtttgggttaaaatagaaattcgtttaaaaaaattaattaattattaattattatttaattaaattaatttaataatatatatatatatatatatatatatatatatatatatatatatatatatatatatatatatatatatgattttccctataaatgtgttttatttcttttacttactaaatatatttagtttgggtcttgaattataaattttgtggtaaataatctaatgatgtgttatgtattttctactccctccgtttcaggttataagacgttttgactttggtcaaagtcaaactgctttaattttgataaactttatggaaaaagtagtaacattttcaacccgagacaaaatatattcaattattgatttgatgaaactaatttagtattataaatattactccctccataccaaaatataagcattttttcaataatggcaagtcaaacatttttaactttgactattaatagcaaaaaataaaaaaaatatcaatcatataaaattgatgttattagatttttcactaaacaaactatcataatatgcaacattttttatttaaaatattttacttttatagatattgttggtcaaagtagtatctcggggaccatatcggagtaaaaaaatatgtatattttgggatagagagagtactatatttatctttaaactgagtcatacctgaaatagtttgactttgacgaaagtgaaaacgtcttaaaatttgaaacttgaaacggagggagtatataatatagtatgataggaggagggaaggatatatggcgtacatacatgcacgggtgcacgtacatgatacgggttaaaagtggatccaccgtatttaaagttttcctttttaggaattattagatattccaaaaatttattaaaacgccacgtgataacttaggagcgtttgtaaagatacacgtggtggcttgagagcgtttataggacgtttaatggacttttagtatatcattgatagatagatagataggtaaatttacgatagcatgatccaattaaccctttaaaatatcagagaaatatattttgaagtttgtaataattaaaattcaactagaaagttagcccacgcacatgcgcgagcaccttcttatataatgcgagtgaaattttattataaatatttttgtgcgggtggttttttattaaaatatcttgtattatgttctaaactaaaattaaacttattttttgtgctttgaacgccggttattttatagttatccttgcaacaaataaattctaaaataaaattacttgagatcatagttgaattgatgataaaatattttgtcgaaacaatagatgtggttcctatgagaaaatttagggtatcttaactcgccagaagaatatcttacaaccccaaaagcaatccaataatatcatttttattttattttaaaattttatgtatattttcattctaacagtgcttgtaaaatgtttgaatttttttaataagtatgggttttaaatccaacaacatttgttcaattttcaatttatttcatgtccatttttattttttttattttggatattttcattctatgaatcatccttgaaatgatttgatatttacaatttgggacaaaaatataagtgcatataacctggcagggggtaaaggcatacgttctaaattttctcttgaaatcttgaagtaatggtcatagtgtatttagcaaatcatcactaaagtggactgtcacataacaaataaatgtttctagattgttctatgtcaagactttacaatgtactatgtactgtagcaagtttaacaaaaaaaaaataaaaaaaatggacatggtctttaattcctatatggaacttacttgttttattgctaaggccactgcaaggttgttccactgttaagattcctaggtgcaacccacatgcttatcggtatgatgttcaaccaaccaaacctttatttttaacatgttgtctatatattgctagatgaatacatgctatgattagtgacttcatagatcatatgtgtaattcagacgctatgatcatctttcttaaaaatatttatttatctcctaaaaagatcattttaaaagtatcaaggtcaatttgtataggtatgtagccctcatatgcatgttaagaaattaattaagttggtagaaagtcgttagatgcttaacgggatataagtaatagatggaggtccatttgtgtttttttcccatatagataatttcaattttaattgttaaggagataaaaaacagagataaaagaatagggcacgctatacacgagcagggagggagggaggtttggaatgtttttctaaatgattaatctaaaaacctaaaataatgcgtccgatgtttatgtcgaaactgataatcggatgtttttttgttttattgtatcaggattttctctaatttaagagaacgatgtaacatcttaagagtatttataagatgtgtaatagactttttaataccatatgccgcaaagacggagggaggaaaggaggtttagggtgttctttaaaaaaggatctaatgacctaaaataatgtgtccatcgatttatgtcaaatccgatggttggattttttttttccaaaatttctaagatttttctctaatttaagaacatcatatagcagcttataagatgtttaatggattttaacatcacacggcggtggggaaggaggttgagaggtttgggttttttcttattgaaaaactaacaaatcaataacctaatcctttgttttttttaagattttctctttaatttaatagcaccacgttacagcttagaaacattcatagaatgtttagagtgacagagcgagagttgctagacctaataggtggaggtattttttaatgatggttttttaatgtaaaaataattttgattttaattcctcatgaatatagctcgttgatacgtacgtgatggggaggtttcggatgtgtgcttttttttaaaaaaaaatctaaccttctaaaataaaataatggatccaccgatttaaataaaattcgatggtcggattagagtgccacttagaaacctaggagcgtttgtatggtgccacttagcggcttagtagtatgtgtaggatgtttaatgaacttttaatatataatagtcttttttaaaaaaaatcaaggagggagagaggtttgggatttttctattaaaaaatctaatccattaatttaagtacaaaccaatgatcaatttctttatattttttaagatttttagtactttcactaatttaatagcatcatgtagtgatttagaagccttcgtagaatctttaaagcgacggagggagaactgctagacctaggagggagaactgctagatctaatagtatgtcttttgtgattttttttcctgtaaaagtaattttaattttagtttctcatcaaatagaaaatagcaaagtaacaacataaaggaagtacgtacagacacagtacatacgtacgctcgtatgtttgttccgaaaaagctaatgggcgaccagtcacgcgcgccctcccccgcgcgactggacacgtgtcgcgcgcggagggggcagcggacggcacccacgcgggatttttttttttccgtttctcttcccttttttcgttctcttttggtttttttcggttttgttcggtttcttttctttttttttccggttatctttctgtttggtttttttttctttttttttctcttctttttttcggttcttttaaagatgtacgcatgcaaagtttatattcgtacgtatactaagttttgtattttcatttttatttgtgttttttctctcggtttttaatatgtacatatacaaagtttgtataagcgtatgcaaactttgtatacacgtatacaaactttgcatacatgtatacaaagtttatatatgtgtacgtacgggatgcaaggtttgtatacgcgtatacaaagtttgtatttgtacctacgtataaaaatataaaaaaatacatgtatataaattttgtaaatgtgtatataaactttatatacgcgtatacaaaattggtatacgtaggtataaaaacctaaaataatacacatatacaaactttatatgtgtgtatacaaactttatatacatgtatacaaaattggtatacgtacatataaaaacctaaaaatacatgtatataaaatttatattttgtacgtatataaagtttgcatacataagtattaaaaacagaaaaagatatggaaagaaaaaaacagaacggaaggtacggaagaaaaacacagaaaaaaccataaaaaaaagaaactgaaaaagacaaaaaagaaacggaaaacgcggacgcttcaagacaaaccgaaaaaaaaggaaaacgcgggcgctccaagcgacacgctgtcccgccgcactagtagtagagagaagagactagaggggtcagaactgatcgcgcggggcgcatggagcgcgactgatcgcccattagggctcccccgtttgttccgcctgttggttccttttttttttttatttacaaaatagatctaaccatccagaataataggtccaccaatttaagtaaaaatagatggtcagatttctctcatttattaaggtgccacttggtgacttgagagtgtttatagggtgccacttggtggtttaggagcgtttataggaagtttaatgaacttttagtatataactagaaaggaagcccgcgcatatgcgcggacaccttatttattgttgatagaaataatgttaatagaattaagtcgtatatcactatatgcatataagaaattatagatttcgcattataactaaaatattatatgtcgtgaaatagaccgtagactttaataaacgataagaatgtttcttatattcaaataaaaatcactttttttagattacacgtaaaattacctattgtcaaaattactaattatcattggtgctagatgtctttttaataatggaattacaactgtatcaccaaaataagcctaatacataattaatgcattgttagtacgtaaaacgttaatctccactacatacatacctaaatatttatgtcaaaactcttatttctaaatatataaatgaatattctaaaaatactacgttaaaaagataatactgttaaaaattagacatgaatatccccgctagagctaccaaggatttatttttctgttgccttcaaacatggatttcatagcggcgtactcatgcctctcaaagccagcgtggatcatataactcctatttcactatcagcaccctcaaagatgatttcattagtaagtaggaagttgagtactattatcaacggtggcctctagttggtctgcctcaactcaaccatgtgtatatctctcctatacttatgttaactgcacgatgcctttcaggaaagaaagagaatatggatgcgataaaaaataattcttttcataaaaatagaatttttgacgtttttgtgtagacacaatttatttatagtgttaatcagtactacttaaatttttaaatttttatacagtataaatacaatactttgatcattgaaaaatatatatatatgaccgtgagaattttcagagtattgtatcattgtttatgttttgataaagatctatactttagcgtctagtttgttttcatcacctatggttcataatgggtctatcaatttaaatgaaaatcgatggtaagattacatagtaccatatgacggtataaaagtataaaagtgttcgtagaagtgccatgtgaccatatttgtggactaataaatttaattttgttagtatagaaaatcctttaaaatgatcgtctatttttccacgacagttctagcatgtacatatatttttcattttttaccgtacgtacgtcctgtttttcaaatgaacagttgggtaaacgtcttttccatggtatgttattccggtaaatgatacgtacgtgttgttctttttcccaaaaatgaacagtacgtaaaggtatacttttttccatgtacgcttttcgatatgcgtattcttttttaagtaaacggattctgtttatagacgggaagcataaatatttaaattttaaatagatctgatcgaacggtctaaaataacgggtccactaatttaaatgaaaatcgacggtgagattataaaatgccacgtggcaacttaggagtgcttgtaggagcgccacatgacggcttaggagcgtttatagatagattaatggacttttagtatataatagatagatagaagatagatagataatagatagatagattaatcatactctaatgcctttttcacttttcgcgcctaacttcgtctacatcttaatcgatctcgaacaacactgtatatatcaccatgttggtgctctgatgggtgaacatcgtcgagaaggaaagcagcagacagaacactggaggagatccatctgtggcgatgaagacggcgatgactctcccacagtctactgcacaaaaatgcataatcaaactcacatactctatccattccataatatcacctgaacctgaaccagatgcatgcgacactacattacaacaaatccggacagaacctatcccatcctaggttgctatattttggaacaaaggttgtataaaaagcatgggacaaccaagaaggaactctgtaacaagttaacaataaattcagcgtataggagaattgaaggcgggtcaccaggctgaaaccacaagccgacaacggcatgatgtgaaaacaaagatgatggcccttgtcatcacatcattcacgtctatcttcaaactgaaacacataatagtgtcatatagatgatgagtacatggaagttatctgataacaaacacaaacacatcgatatgacagtatgctatattgatggtgtatgcatatatggagttggaacaatcagacatcgactgtgttcaaaacccaggtggacgagctcttcacactatgataactgatataatcctccgacagcagtattgaacagtgaactagctagtgcctggagcagaatgaacaagtcatatgcttctgcaaagaaaacacagatacagcacaagcaatacttaccttgctatgagagaaaattagagattggaaactagatatttgaacctttcggtcaggcagcattcacatttaaatggaacaaactttcgatcagacaattttcaccagcaggatgaaaactttcctcagagcatgtaaacacacattaaggcgcaagttgtgagtcgtgcaatcaaccataaccaagtatacgacaatcctgtatcatgacagacggacatccttaaccctagttgatctgaaaggaaggcccgaatttgcctggtttcagtgattactgtgctccatttcatcgtcagttaatcacctctaggtctagttcgctgcactatactttaccctagttccattgcggtgcaagtaaatttccatgcaaatccctggggtagagaagctaagtagcttcctagacaccttctcgctgacagtaaccaaaggatcaaaacttagagtaatcgtcttgagctctggcatcgtccatctcaacagtcgtttgacaaaatatatttgacgctctgctccactcaaattgttgatttcaactttctggagaaaattcaagctgatattattctttttccaggcctggggctcgtaacaaacgcagccagatgagcaaggaacttctccatcctgaaatgaaaagcatgtaagaaattgattttaagaatattacgaaaggacacagataaaaggaagtcaggaaaatatagggaaatgaaaatgatcattctcattaaaagcttttattcatataagagcaatatcttttagatctaatcacctccagatgtgatgtgtggagaaagggggaaagaaaagaaaattggaaaatgtagcagacactttgactacaattacaatattttttgtcggaatttcaattgatcatttggcatggttcgttggaagtctcattgacatgaatctactacgaccacaacatacccatatcaatcaccagcaactgaacatttgcagcgacattccaatcatttctattttatcattgaaaaccaaagcagcatggcaacacttggatcaaacttttagatcgtagtatgaagaggggaaagacttgtagttttaatagataaaccatggagggacagatcggtactgggactgacacatcaagtgctaccacagtaccactcatagtaaaaagatcaagctgaggtgcattaaattgcaaatacttctaccactttcacagagaccatggtatttgattacattgaagaggtatacattaccgcaatgtgatcttctaacttcagcttcagctcccttataccagtagacatcttaagcaaatggtaaacacaaggtccaaaggtatgtcctattgttaataaccgcagagataggatttcaacggcagggagctttttcactgcttgcaccaggagctcacaggacatatccatgatctgaaaattaacagaaattcacaaaatataattacttaatatgtgcattttgactttacacaaggattaaggaagtgatgacattgagaaatgtatcacagaaaaatataatgctacagaggaaaaacttccagaagcctccaactttatggcttggacaaaacaatgtaaacacttcaaggccttgttcggttaatccctcttccaaagggattgaaggggaattgggggggattaattccaactattgagatgtggaattaatccgctccaatgctttcctcatggggattaacctaagtacctaacaacccctaaggaaaattgctttaataatgtgcctctgcattacataatcacttacgtccaaatctacatgccatagggactctttggatctcccctagttacatatttcgcatctgattaggagtcccataaatattatcttacttttatcttttaaatgggcatgagcctatgctaagatactagtaaatggttatgagctacaaaaacattgtaagtacattagcttcatcataataataatgtaatgcaacaagagggagaaggtgcactcacagagggatagacaagagatagatgaacatcgcgggcttctgtaaaatgctgcacgagttgcagagagcctggagtatttcgacgtccatacaccatgccatagacggagagtctatggacgttgggcttctcaacaaatcggactgaactcgaactgaaaaaatcaacccaatgaagtgtctccagtgctggagcaaagatgtcaaccattggcatcccccacaataagcaagcgtacaaatctagttctgtaagcgcaggagcagaaatggtgagctgacgaatcccttccagtcgagacagctgaacaaggcggagagactccgagcggatggctagattggacaccacatcggcatcgcggatacggagctctcgtagcgacgggcacccctccgacgagacggcgtccccgagatcgcgctggccctggtcgtcgaacctgcagtggctcaagctcagcgcggtgagcctcgcgaagacgccggatggtggcagctggatgccgaggcggccgcgcaagcggatggtgatctccgtggccttctcgaagcacgggatctgaatcgcgcccccggtcccggccgcccccgctgccgctgccgccggcgtgatgacgtcgaagcagagcttgccctcgaggaggggcgcggccaagtggaggacggcgacgatcttatccggggcgcggtcgctgctctcgatgcgcaggaggcggaccggggcgacgcggaggcggagggcggcgccgacgcgggcgaggtcagtgacgccggggaaccgcagcttcgggaggagggtggaccagaggtttcgccagcggcgggagatgaggctggtccgcgcggcggcggcggcggaggggaggcggaggaggatgtggcggagcacctcgtcggggagcgcaccgaatccgctcgacgaggaggattccgcggaggacctcgtcggagagcgcaccgaatcctcgtcgggggtggtcaccacgtcgacgaagcgcccggggtcggagacgatactctggcgagccgactggacgagcgcgtcggcgtcgtcgcaggcgacggcgaagagcttccggcgctgctcgaacgcctcgcgcgctgcgtccatggccgccgtgttctctccgcccggctgccgccgcgcctccaggatggcctgcgctgccgcgacgagctcctggtacgccttgctcatctcgtccaccttcgcatccatcttcgccggagttggggcggtggctcttggcgcggccgcggcgacggcgtcggcgttggcgctccccgaggcgacgtcgacgagggttttggaaatgggatttctggtttggttggatattttttttccaccgaatatgattttgaggttgaagagttgccagtcgactgaataccccaaatctcactcaattaataaacacaattggattaaatgtcctgagggaaaagaattacaaggactcgtaatcactggcaatgctagattcttcgtaacaatgactcataatcactctttccgtgtttccttatggcctgtttagttggtgaaatgaaaattttttgatgtcacattggacgtttaaccggatgttggaaggggttttcggacacgaatggaaaaataatttcataactcgattggaaaccacgagacgaattatttgagcctaattaagccgtcattagcacatgtgggttactgtagcacttatggctaatcatagactaattaggctcaaaagattcgtctcgtgatttcccctcctaactgtacaattagtttttctttttatctatatttaatgctctatacatgtgtaaagattcaatgtgatgtttttacgaaaagtttttggaactaaacagggtcttattgagaccacctccaaaccggaggaaaaatattagagtggaactcatctctttctttctccttctgtccccttctcttcctctccctcttttcccttctctttctccttttatcaatagcgatccaacgggatagggggacttgagtcgagtccctccaacacccacactagatcagtccatgcttcgaacgaaaagagattgcatggcttaccatatagtgacacaactataaaccatataatgccgggagatttatttttcatttgaacactaacatgtttttgcgagatcagattgatttttttttttgcgtgggataggatttagtaggatgaccaaggaggtgggtaggatgtgcatccttcgctgtaatacagataggctcattgtgtcaatagtatatattagtttgctgctacattaaatgcctctctgtgtcacctgtgagctgagtttgctgttacaatgaaatgtggtaggacagtaacaaaatactccctccatctatttttgatagtcatatttccaaatctgaaaaatttatttttaataggcatatttcaatccaacaatttattattttaatggctttcttggatttaatgcatgactctccattcttccacacaagattggctacatgggcatcgagaaatttaatattaatgatataatgaatcgcttgtttacgaggaataactagtagcatgtttaaatggatgataagtagaatcacttatcgttggtctgtgtgccaagacgaaatatgactatcaaaagtagatggagggagtactatttacacattgccaaattttactgttttgcaaagtattgttaatctattactccctccatctacttttgatagtcatatttcatcttggtacatagaccaaggataactaatcctacttatcatccatttaaatatgctactagtcattcctcgtaaacaagcgattcattaatatttacatttctcaatgcccatgcagccaatcatgtgtggaagaatggagagtcatgcattaaatccgagaaagtcattaagatgataggttgttggattgaaatatgcctatcaaaaataattttttcagatttggaaatatgactatcaaaagtaaatggaggaagtactattcaaggtcactctagcatatcgttttgtcttttgatgaagatccaatggcaaaaacttgtttaatgcacatgtactctaagattctttgaattttctttctccatgcagaggagcctgattgggtaggcaaggatcggtggcaagggcaagggaggccatgtggttaggaggtgagggtgaggatggcgctggttgatttggtggctcacaccgctggagatatagaggaggttagacgggtggggtaatcacgccaaatatcgacaagacaacaatgacatttttggtggagctgttgcgagttggtagataggggaggtgaagaaaagggagggaatacgtgagaagggtgtcgttggtggccctcaccaaggctagtgagaagacaggggcacatgcagcggaaatgctaatgggcgggtgatcnctcccccgcccacccatctatcacccagacatcctctcccctatactactacatacactcctcccctactacagtactacacacaattttttttaaaaaaaacataaagttagaaaaatttatgtataaaaatactatatataaaaaatttgaattcaaattcaaatttgaataggctatgtaaacctttggcttataaactttgggtctataaactttaggtgtataaactttagatgtatagaaatactatatatagaaaatttttgaattcaaattcaaatttgaatcgggtatgtaaacttttgccttataaactttaggtctataaactttaggtgtataaactttagatgcataaaaatactatatatagaaaatatttgaattcaaattcaaatttgaatcagatataattcaaattcaaatttgaaacgggtatgtaaacttttgacttataaactttgggtgtataaactttaggtgtataaactttagatgtatagaaatactatatatataaaaaaatttgaattcaaatttaaatttgaatcggatatataaactttttacttataaactttgagtctctaaactttatatgtgtaaacttgagatgtataaactttagatgcataaatttactaaaatagaaaagtaatgcggtgccaaaaaaggaaaccaagtggagggagggaggggggaggatcgatcgcccattaggatccccctgcatgtagtggcacgcaagcatagggatcatagttgtgtactccccctgtcctaaaaaaaacttaatctcgtactacgacgtgacacatcctaatacaatgaatctggacatactttatgtctagattcgttgtgtcacatcctagtactaggttgccttttttttggacgaagggagtagtggtttgcaaggtgtgaatttgagaggtgagaaaagagacgtaattaagatggaggtgactagggatcggtcgcccgacccaaatctccaaaaatcgggtgctgacatcagcatgacgtcagcgccacctatatgtgtaaaaccactttaaattaatttttctcttaaattatttatctaaatcatgatccgattgcaccattaaatttgttgcaattaaatcttcaaaacaagaccacacaaggatatattccaacgaaattttttagcttattattgatttttttaaaaatgttgcacgatattccaccaggtatatcggaattgtttcactaagtagatcgagaatgtttcaatcgttaaaatcgggtgttgtttcaccttatataaaaacaatgtttcaacaaatagtaaaagaatgtttcagttcactgcaacattagatccatacatagtgaaacattataaatacaaagggtgaaacattttttggtggaacaaaaaatgaaacaaattcctttaatagagggtttccaaaatatttgggtgatttattgcaatagaatatttcagttcactgcaatattaaatctatacatagttgcaatattagatctatacatagtgaaacattgtgagtgcactagatgaaacattttttatggaacaaaaaataaaccaaattccctttaatagaaggtttccaaaatatgtgggtaatttgttgtaatagagttgtgtgagtggacacgtggtgggctagggagagagcgcgcgcgtgcatagaggcaggggagcgcccgatttctgcccccccccctccccgcccgatcgtccgatggcaatcattctccaattaagattatagaagttgcacgaatcttcaataaatcctaaatatatcctagttgtgagaatggccgattattggtaaatttttaggtaacatatagctcatctaatttatgcatcacttaacttcgataacattgaggcataaggacacaatagattgcgacaccatctatttctttttcccggtaacttaccgctggaaagagacatttctacaaacagccatctcaaacatccacctataaaatttgtattttcataggtggtagattcctcataagtggaaatatatacataattccacagtagtttgcttagatgtgggtggctcacccgtacagatttcgtactaatgcacacgcccttacaacaagcgtgcacatctcaaactcatctactcctatttcggttgcacatctcacatcagcatgatgatacgcagacgatgatgatatctagattcattaacatcaatatgaatgtgggaaatgctagaatgacttacattgtaaaacggatggagtatctgataacaaatgcaaacgcatctataacgaatttatgacatcatgctatattgagggtgtgcttatatggaattgacatcaactgtgctaaaaaaaacgaggtggacgtgctcttacactgtgaacttctcttctttttttttttttgagatatcttacactgaactgtgataaccctcccacggcagaattgaacactgacctgggtgcctggagcaaattgaacaaatcatatactcctgcaaggaaaacacagcattcccatttaaatggaacaaaattccaatctgacaattttcaccagcagcaagaaaacttccaaatgcatgttggaaacgttcctcagagaatgtaaacacacgttggggcccaagttgttagtgcgtgcagtcaacaatacccaagtatacgacaatcctctatcatgacagacgaacatctttgactctagttgatctgaaaggaaggcctgaaattgcctggtttcggtgattactgtgctccatttcatcgtgagttaatcatctctaggtctagtttgctgcactatacttcaccctagctccatcgcggtgcaagtaaatttccatgcaaatctctggggtagagaagctaagtagctccttagacagctcctcgctaactgttactgaaggatcaaaacttagagtaatcgtcttgagcactggcgtccatctcaacagtcgtttgacaaaatatatttgacactctgctccactcaagttgttgatttcaactttctggagaaacaccaagctcaaattcatggtttcccagtcacggggcttgtaacaaatgcagccagatgagcaaggaacttttctaccctgaaatgaagagcatgtaagaaatcgatattaagaatactacggaaggatacagataaaagggaagtcaggaacaacataggaaaatggatatgatcattctcatgcaaaccttttattcgtataagagcaatatgtctttcagatctaatcacttccagatgtaatttgtatagaaagggagaaagaaaaagaaaaattggaaaatgtagttcagatactttgactacgattacgacattttttgtcggaatttcatttgatcatttggtgtggtttgttggaagtctcatcgacatgaatcttactacatccacaatatacccataacaatcaccagcaactgaacaacatttgcagctacattccaatcatttctattttatcatagaaaaccaaagcagcattggtaacagttgaatcaaacttgtagattgtaggctgtagcctgaagaagggaaacacttgtagtgttaatagataaaccatggagggaaatatcggtactgggactgacacatcaagtactacaactcatagtaaaaggatcaagctgaggtgtattagattgcaaatacttataccacttccccagaaaccaaggtatttaattacattgaaaagctatatattacctcagtgtgatcttctaactgcagcttcagctcccttgtactgggagacatcctaagcaaatggaatactcaaggtccaaaagtatgtccttctgttaataaccgcagaaataggatttcaatggcagggagctcatctttcactgcttccaccaagagcttatcgttactgctgatctgaaaattaacagaaattcacataatataattacttaatatgtgtattttgactttgcacaaggattaaggaagtgatgatattgaaaaatgtatcagagaaaaatataatgctacagaggaagaacctccataggcctccaactttatggcttgagcaaaacaatgtaaacacttcaaggccttgttcagttaatccctcctccaaagggattgaaggggaattggaagggattaattccacacctattgagatgtgaaattaatcccctacaatgccttccacatggggattaacctaacaagccctaaggaattaaaattgggctaatactgtcatttatctccaaatctacatgccatatggactcattagatctctccaagttgcatactcctatttcgcatctgattaggagtcccacaaatgatatcttactcttatcttttaaatcggcatgtgcctatgctaagatactagtaaatggttatgaactagaaaaatattatcagtacattagcttcatcacaatgtaatgcaacaacagggagaaggtgcactcacagagctgtagacgagagagagacgaacatcgcgggcttccgtaaaatactgcaggagtggcagagagtgtgaaacgtatccatacaccatgacaaagacagcaagtgtatggacgtttggcattgctctgaatcggactgaactcgaacggaaaaaatcaacccaacgaagtgtccccagcgctggagcaaagatgtcaaccattggcatcccccacaataagcaagcgtacaaatctagttctgtaagcgcaggagcagaaatggtgagctgacgaatcccttccagtcgagacagctgaacaaggcggagagactccgagcggatggctagattggacaccacatcggcatcgcggatacggagctctcgtagcgacgggcacccctccgacgagacggcgcctccgagatcgcgctggctctggtcgtccaacctgcagtggctcaagctcagcgcggtgagcctcgcgaagacgccggatggtggtggcagccggatgccgatgccgcgtagtaagcggatggtgacctccgtggccttctcgaagcacgggatccgaatcgcggccccgatccccgccgcccccgccgccgaattttggttccccggcgtgatgatgtcgaagtggagcttgccttggaggcggggcgcgaccaggtcgaggacggcggcgatcttctccggggcggggtcgctgctctcgatgcgcaggaggaggaccggggcggagtggtggcggaggacggcggcgacgcgggcgaggtcggtgacgtccgcgaaccgcagctgcgggaggttggtccagaggctgcgccagcggcgggagaggacgctggtccgcgcggcctcggcggtggaggggaggcgggcgaggaggaggcggaggacgtcgtcggggagcgcggtgaggaggtcgtagccgccgccgtccgccattgccgcttcgagctcgtcgccgaggagggttttggtttgaaatggggtttctggtttggtttggaggggagcggcgatttttaccggatttgcttctgaggcaggacacgaaccgactttacaatttctttatttacagtaatatacttgtagtaatattactttttttttttgttagaacttttttttttttttgagaatttgcttagaactagaagtcgggcgcttctaattaggaaaatcctcagcgccgggtgcccgatgcgcgccaaaaaaatatcggggcgcccccacaccacgcctcccgtgcgcgcgccgcccccaccacatgtccctatcacgcgccgacgcgtgccccgttgcaacagccgttcggatataacggaaacgccatattagaaatatcagttttattatttgttctaccaacaatgtttcagctagtgtattcacgatgtttgactatgtatgaatcaaatgttactgtgaattttgatattgtttaataatttcatcttagtggacacgtgggttgtagtgttgcaatagtttcaaatcgttttttcatacgttaaaccagattatttcatctagttatctgaccgtgtttcactttttttaataattgaaacattcttttgctatttgctgaaatatttttttaggtaaattttgcgacaggacatcgtaattatatggttttagctcagggacacgatgaaagtgtagttttgggggaagacatcccataatcgtggatatttgtcgatggacaccatgccgtctaaaggatacttgtcgtgctaatggcggatgggaggccttttttgacacagtcagacgtaaatacccctacgccttgccgtgttgatgaaggagggagtagtgggtcccacgttaaagcggttgtgttggttaagaggaggattaaatagaaatttaccacagtggggcccagttgccgttgaggcattggaagggatgaggagagataataaggttatgtggggcccacttgacagtgtcccactcctcttatttttcttctctcttgatttcttctcctctcgatctctcctcatctctctccctctcgtttccctttctccccacgcgcatgcgtgccgccgtgccctgagcgggatgcggcaggtgcgcgacgacgcgggccgaggcgacggcggcggcctgaaggcggcccgggaacatcgagtggatggggagaaaaggctggcacagcgaggaggtgtcggggcagcgccgagcataggaggcggaggtggaggcgctgtgcggggtggcttggccgcgcgcgggggtggcgctcgcagcgtggtggtggccccgagcaagacgaagacggcgggtggtggcgtagcggcagtggtgcgcaggtggtgctcgcgcgcggcagcagcggccgagcggggtaacggcttggtgcggcggcggagaggggaaagaggtagctggctgtggtggggagtggcctgacgggaggcctatttttgctgacgtggtgcaggggtatttgcatccgaccgtgtcaaaaaatggtctcctgtccgccacgtcagcacgacaagtatcctttaaacggcgcgttgtccatcggcaaatatccatgattatgtgatatattctctctaaaacttcactttcgcagtgtctctgagctaaaaccacacaattgcgattttctgtaacaaaatttgtcgtgtttttatatagggtgaaacaacatctggttatttagaaaccgttgtttcatacgttgttgtaaaatgttttatgaggtgatttggttgtgtttcagctttttaaaatactgaaacattttcgatctatttggtgaaacatgtttgaaatacttggtgaaacagcacccgattttttttaaaaaaatcgggcgcccgatttgttggcacctcgttttaattggcacatagaaatggcgggcgccaactggcgctagctctccccacattttctttttttattgctatttgtttcatcgttttcattattttctctttttgtggtttttccccaattttttttaatctattgttttcaaaaatatttgagtagaaagttttcaaatcattacttgaaagtttttcaatttcagaaagtttcaaacctgagttgaaagttttcaaatcattacttgaaagtttttcaatttgaagaaagttttaaatctgagttgaaagttttcaaaatttgtcttataaatttaaatttagagttgaaagtttttgtttcctttcgtccttcactcgagacgagcaaaggttcaatcttagggggttttgttgatggtcgttagcggtcagtttcgaccgtcaatattaccaaaagagaggagaactggttatgctttcaatgcatatacatattagaataataatattccactagtatttggttcactaaccttttgcagagaataagtataaagtgaaggagaatcgacatcaaatcaaacgataaatcaacatgtgtgaatgggccaagaactcagaattgacacgacgaattgggccaaagttcacaagtcaccctcctcagcgccatccgatccagggcttcacctggacggtgtggattagcccccaatgacggttggagggtatttccgaccattccaaccatcacaaccgtcattgggaggctataaaagaagttggcattctcacttcactcatacacctcaagcaagagctctctcatattctctcaagttagtttagtattcttaagctattggaatagaaatagagtagaaatcagagtccggaagccttcggaagagttcggatatggctctagtagctcttctcttctcttttgtaagctttgtactttatttagaatactcttctttatacatttatggtattgaaatactttctgagtatacgaaagctaactctatattatgttcatgttatactgattatactgctagcttatctgggagatgctttggtacgggtatagtgtttgtttatgcaattactctatgtcatgacgatgatattagagtagtatctggtagtttaggcgtggtgtctagactacgggatatcattatttggggttatatgttgtggatgagaggtgggccgttgatgatgatagctcagtatgggtattcctccgcgcgtgtatatagtcctaagttaatttcctgggagcgtattccttcgtatttagccccggttgtatggccatgacggactgtcgtaaggaactcggcagtcaggggtggcttctcgaagtatcaggagggcatcggatagagggtattagctagtatatcatataactaggatgtatgtatactatatatactagaagtataggaatagattctctttctcttttctttccacttagcttagatattttaatgtgagaatgagtagcttcctgcttgtttgtcactctacccttgaattatcttaacccctgtttagactatgattattacaagtaatatataaattattagtcaagttctctcaaccatgatcttcccacgggattaaataaatacgataccgttggaatattctcgggtgaaatgctacaatggtatatccgtgcggttgcggatgaactctgtaaccataatataccaggagtatttctgcgccatagctgggaattatatttctagtaatgtcgttaagaaataccagcacttaccaccacacactaggtcccactaaaaattcacaatgttctcaatacataatatctataaatgggggtaacaataaatattctctcattccttttattttctctaacttctcactattggtcatatttgtttcgaaaatgtgttgaggacatttttctcctccaatgcaatattaccttcttagtttttgtgtttaaaccacttctcacgcaagacactacctcactttttttcttctttaactcttcacaacatataatataaaatcctacggctcaagaatattaattgccatagatacccattcggagggcccttaggtccatacaatatgaatccaagtgtaaggagaattgaggtagaatttacacatgaaaaaaatttagatttactatagcagacactattatagttatctatctaagcaccatgcatgttcaatagatagatggatgagatcgtacagtcactagggatctcaatccactttccatacactctgtgtagcccattgaattgtgtctaagtattgcattgcgtagccgcatcactggaatgattctaaagttagcttatgacacggctttaaagatggactgatagaacttctacaactttagctactatttaatacattaaaaaacctgttcaattgaatttgtgtagatttgatcattaaatttttcatgacgagtacttccttaacataatattgtactaggttacaagtaatattttcttaaaaggttttgctaagcagcatatttccctataaacaccaaatggtatcgcggataactttaggtaccttgcaagaaaaagtcccaaacgttggatattatttgtaacaaaagggtgtaatgcaaaataggatttgctaaaattttgattaatcccaaagtagccacatcgttataattcaaaagttagcaaacggcgtgattttaaagatgattgaccaaaccaacttctaaaactttagcgaatatttaatgtattaaaaaattatttggattcaatctttgtagattcgatcattgagttttcatatgagtactcccttaacatatatatcaatgtactagattttcaataatattttcatgaaaagttttgattaaataagatattctcttgagaccaaatggtgtagcggaagacttcaggtgcaatgccaaaatgtcctggacgtttgttgtttatgaaacacaaggggtgtaatgcaaaactggatttgcaatatgtgtgattaatgtgtgtatatatttcatttaaaactattaatgcatatttcatttggaactattaatgcatgtatatttcattagaaactattaatgcatctatagttattgcccttgctccaaaccgaacctgtttagacattaacaacttgctacatatacggcctctccctcgttgtattcttccacaattcacatcatactaccatggatgtgaacgtcgtggtattgccgacggtagtcagccgtagttgccgcctgaccgtcgtggtcgagccctttgacaaggttgttgagatcaagcagaaggtggagagttgctatggcatcccggtgaccatgcaacgccttttattctagaatagggagctcgctgatgaccacgacattgagtattatcccatctttgatggctcgcatgtcctgcttctcccccattggcaggtggcggcgaggttctgctggatccacgggctggccaagtggagcggcggtgataggatgcatgacacggtccatgtcaccgcctacctccctccggctagttggggacggaaggtcacagtgttcgcccgtcgcgaggagagcgtggctgccctaaaactccgcatccacggtgcgcaaaaagtggacatgcccctgccagagtgcatgtggaacgacttcgtgtgtggcagcctcatggtgatgatggatcactggcctctaggtgcctacgtcgagttcgactccggcgtggtggaggtgacaattgttgattgcaagaagatggtggagacaggaagcagcagtggcagcaaccgcaataccaacgtggatgccaacaacaataagattgtgatcgggctactgatggagggctcacactcccagcacatggatttcttgttggaggcgtcgccagcggacatggtcgccaccctgtaggagcagctgaatgacaacttcgagggcgacccagagacgccgctgctggccgaaggggactaccactttgagctcaacggggtggccatgaacgaggagctgtcgctggaggtgcacggtgtcgttgagtctggtgaaaccatcatgataatttccgggaggctgcctatgcctgggtgtgaataaagttcagactaaggtttgtgagggttttacaagtgtatggtcttgtggtttgtgtattggcgtatgccatccacctatatggtttttagaaacaaacacggtggaatgctgaaaaacttgagtttttttaaggagataaaagttttgttttagcttggtggatgtccagaccatctcctccattgaatgtgtactccgtatcattaaaattagtatgcgcaaataaatataaatggagagatagtagtgcatatgaggcatgcaacccaacattaacaccgtagcggactcatagaaaactaagtgtgatgcagtcaactaagaaatctgcatatgcttatgggtttaaagttggaaaccgccgcttttaatgtgttatggttggtgacagttgtgagcttgcaatttggtaatatttgcgtgtaacttaggtgaatctttgaaaacaattaaaaatttcaaaaccacatttatacattgtagtatatagtgctatttagcttcaagaattatggtggtacatcactataaagaggcgactattgttttgtattttacaaaattaatctgttttcacccacatctacaagtgagaacaattttctaaacaaattcactgaactgatgaagtgatgtacctgcctagtatagatgttattttggtcacccgaaatctctatcattttcttttgtgaaataacggtgaaggaggtatgtatctttctctatttgaagttcttttcacggttgatgaggtaatattttggcccacctaaacattgtatttcttgaaaattggacgagtaaacatatggcttaattgtgaagagctgatcttatatatttacacggcgccccattgttatagcttccaaccttctacttgtgcaaaaatgagttggagggagaagttggtgcaagatagcttacacaaacaagtcaaagtgtaatgtaggtgtgttgtagaacttgtatcaagcttaaatgcaaatgtagctcgaacattgttaatagcataagcacaaacttggtagaatctaaatgaaatggtatatttccatagacccagttgctgtgcagtcctagcaaatacgagtgtataattgaaacttcaatgccacatagacaaaactagagaaataactttctcaatacatagtatatataagtgggccaacaataaatattctcttattctttttattttctcttacttctcactattggacatatttttttggaaaatgtgttgaagacattttttctcctccaatgcatggaagacactttctgttctctttccatatcatctaaaatcctgtgtgtcaagggtattaatatccatagtaacaattatagctatcaattgggagtgcccttagatatgtacaatatgaatccaagtgtcaagagaagtgggatgtaatttacataggatagaaatatcgatttgagcaccatgtttaatagatggatggatgacatcacatatggtcaccaacttgccgtccttaatgactgcaggtgatatcaatatgctgtccatagtcattgtagcgtgttaaattttgtgtctcgtctccacttatgatcagccctcggttcgccatgtcgtaacgagggatcgtattaaaatggatttgcaaaaataactctactactatgaaaatggagtcgtcctccacccctcccacaatcgtactcccaccacgttaaaaacacctcacccaacaaaaaataatgaaaaacaaatatataaaacaaaacctgataaaaccattcattcgtattcctcccaatcatgttgcaaagcacacgcatagcattattattgattaatgcctaattattccttagccacaccattataataattctaaggttaacatacgacagggttttaaagacgattaacccaaccaacttcaacattatttcatttttgatatattaaaaacaatgtttggattgattctttgtagatttgatcattaaattttcatgacaaatacttgcttaagattataatgtactctttttagtaacattttcttaaagggttttcactaattagggcattcactatagaccccaaatggtgtcacggatgactttggataccttctcaatatgaccgaatatcggattttttttaaacacaagggtgtaatgcaaaattggatttggaatatctattattactgcctgcataaggaccacgattcacaccattctgtcatggaagtgaacattgtagcactgccattgctgcacctcccccccccccaccccaacacacaggggcggagccaggattatatcaagagtagggcttaatcactagagtataaacttcttgaacgaattttaatagaaaaattagtaaattccttgatattttttctgccaggtgtggggcccgggcccaagctgccccacacctggctccgcccctgccaacacacacacaggcacgggcggctacttcgacaacaacctgaggctcgggatggaaggtctatggtgcacttcgaaatttcagtgttgtgctaaaattttaatggagcggtccagaccttggtctatttctggtgaccatgcagcgtctttctttcagaacaggagcttgtcgatggccaaggcattgagtactacccgatcctccatgtctcgcacatcttgctcctcgtgcgttggctggtgatagaggcatggcactgatggtccatgtcactgccttcctcgtgctagccagccagggacagaaggtcaggttttccccaacaaaattttgatgacttcattaatagcacattgatgtttatttcgataccaactaaatatcaattctactctattaaatttgatagtgccaaaaaggttgtaccgttacaaaacagtgtaaaaattggatctagatgtgattaaaaattgaaggagtaggaagaaaatgtgtcttctccaaatattaggggtacacacatatgctactagacatcaccaaacttgacacacaatcaaagcgcgttgaggccaattaatcacggcatggcgtgcaggccgtgagaggagagcccaggttcatgatttcacggtcggttcaacgttacgggtttaatcgggccgaaagtggagtggccgtggtggaaaccatgcacgttacttggtggaataagttcgcttcaggattcaggtaccgtaatatcagatataacatgtctcttaacttgtaaaaccggtacaaatatagtcctaaagcattatggtaagcggttttagctgacatggtgcggacgtggcatcaaataaaaataaaaaacatgtgggccccacatgaaaaccacacaactgcttattctcctttccccatctcccctcccttcccccatctctttctaggataaatttttgttgatatgattgattactaataatttactacctttgtcctaaaatatagttatttctagcacaataccttgtcccaaagtgaagttatttctccacctacctcttctcaaccaatcacaacgttttctccttcacttactttctcttttcaatcaatcacacactttcttcaatcattctcacatattttcttaataccgtgctaacctaaaaaatgtatacattttgggacggaggaagttctactgttgtggtgaaaacaacaagaaaactactccctccgtttcaagttataagacgttttgattttggtcaaagtcaaactgctttaagtttgaccaagtttgtagaaaaaagtagtaacattttcaacccaatacaaatttattatgaaaatatattcaattattgatttgatgaaactaatttagtattataaatattagcaaatctattctacaccccccttagaataactattctacccccctctccctcccatgggcaaacccacctcccccacccttcctagggcccaaaacccccctcccaccccagtcaaaggtcggtcaaagcgtcctcccaccagtcagacctcgatcaaacccgcccactcactccccccccccatgtccacctctttgttgtcctcgtctcgcatgaattgtgcactaacaagacaaccatcatgcagtaacagggttactttctcgcattaacaatattataacattatcaaaatatagtgataacggatctagttttgtaaagctctttttttaaaagcattatggtggaaactgttcaacaatataatatgtgatgcgagagatacgattgtttaaagattagaatttcaaataatccacttgtgtttagtttgctactttgtatcttttgtgttgctcacttccctccacgcccacctctttggtgtcctcgtctcgcatgaattgcacaataataagatgactatattgtagtaatatgattacttactcgtagtaacaacattcggtagtttgtagaagtaccgttactactacatgcatgttctgcgttactacaatttccataggatgttactgtcaaaactgcagtaacaacctatatatttttgcagtagcaacctacatatttttgcagtaacgtggcgtgttactgcactttttcaataatgttactactggaacataataacagattataagtttcacaacaatataagtgatttgctctcacaaagtttgaatagagatatattaaattgaagcagtaaactctaatcacaagatgtcatagggtgaattggttaatagagaatttctttgaaccatgaggtcatggataagtcttggttttgtcactttaattttaaaatttctctccaatgtgagataaaaaaaattagagggagagaggccgtcgggcgagagaaaaaaaatcagagaagagagagggcgtgccagtgagagaaaaaagagagagggagagggcgccgggagagaaaaaaaagagagggagagagatcgatcagagggagagggtgccgagaggtccgaggggagactcgatcgagagaaaaaaaagggggcgcagggagagagagaggggagggcgcgcggaagaaaggacgagggaggggcgggacgagagagggaggatgagggcgggatcgggtgggccgggtggagttgttgggtaggataggaggggttgtagaatagctattttaagggggaggtgtagaatagagttgtcctataaatcttaactaatataaatattcgtatttttccatttgttacaagacggacgaaggcgctttcgtccgtcggcgggacgccttcgcagcccccgaatcccaatagctctcagaatcggatataggaaacatatcccaaaatcggcacaaccaaaactcaaccactctttgccccaaaagatcattcacaatcatcaccaaatcacaaaatacatcacaaaacttcacaaaaatatacatcaaaaagaagaagccgcaggatccgccctcggccatcgccaccacggccctcggccgttgccaccgccaccctcaaccttcgccaccgccgccggattcatccgcggccgttgccgacgctacaaccaccgccgaagggagaagagaggccgcggagggagccgccgttgccggatccgccagcggccgccgccactgccggcggatctgctgcgggaggaaggcgaacgggggcggagggagccgccgccgatctgccgcgggaaggaggctagagggagccgccgccgatctgccgcgggaaggaggctagagggagccgccgccaccaccctcggatccgtccgcggccgccgccaacccgccacaaccgtcgtcatatccaacgagggagaggaggaggggacgagggaggcgagacagggcggggggagcggccgccggcaaggaaggggagatggtgttaacaatgaaatttggtaagcccggagtagtcgtcggctcagagtcagcatcggcttcgaagtcctgagattagccgatgagacttgtcaagtcgttagttgtcggattcttgctatattcggttaaggaaattgatctactaaaggaagcttatccagaagagaccgagttcaaagagaatgcggcatggcaagttatctattaattaggaatagtttgttaatttccttttatctttaggaaagtgtgtttagtgtcctataaggactttatcttttccttttatctttaggaaagtttctttcttgtccgacaaggacttgtatcaacccatgggtataaatatgtacacccggggtctatgtaatctatcgctatgatcaatacaattcggcgcatcgccaccctttttacttctacttttgtttttacgttccggcggaacttggcacctgacgcggggctgcatcgtcttcgatctccggcgaagggataagtccaatgtcccgtcggtccaggcaattgtaccatctacgtcggcgtcgttcaaggctgcatcagtacattcgacctcttggattactctggtttggatgatatatttgcctggctatttatcatatgtctatgttaatctagtcctagcatctcaatttagctctatcggctgtctctcgctttagggtttatgccggtatcggctaaatcgccttgctagattagattagcctagacatctaccaccctgaaaaattagtcaatggcttgattgtctagatattgtgtttcttttcatacttagtgctgcatcagttaattttgatctaataagtcatgcttagaaccataatctctagcctgctttttgactgccaataagggtttcatcggggtttcagccgatgagttatctaggcattgcatcggctcataaggattgaatacatattggatttagccgatcgcaacatagatttcactgtttatctaatcttgtggatttcatgacatcggacctccagccgatgtgtgctttaactttcggatcgatgcttatttatcatatcattatttgccgattggtttatactggattatattgttattttattacatcatcatcagccgattgcctttatatcattatctacattggacatatagccgattgcttaaaccctatcgctatcggctggtatcggcatcggctattatcggctatcggctggaactactccatcggcttgtcagccgatcggctgttttgatctactatttgcatatcttgttagttgcaggatcaaactgactggtacgcccgcatctcatcaagatttggacctgcacaagagctaagcagatctcccaggccggtgtgttcgattttttcgtcaacagatggcgcggagggagtcgccgccgccgtcgcttttcgattcgaaagagaaaggtgatcggggcgagttgggggagggaaatgaaatctagggttagggttagggtttggctgcagatatttatgtaggttaggatcaatctggaccatccattcgattggacggctccggcttctcccgctcgggccgccggactattgggcctccaaataggcatgcaagtttgcgcaatcagaggaggagttggagctggtaaattagactttatttacgggctgagacaatataaggactgaaaatggcccatagagaaattgggggttttatttacatttttatttaaataaatgctgaaatgatgtttgtattatcaaaattagcaattaagctccgaaaattccaaaaaaaattcaaggagcattattaatcatggttaatttaataaaaattaaatgcaaccatatcatattatttcacagcatgcgatggggaaatgcacagctgatgtcgcttacggtgagagagaaggggaattatttatgtccagaactatctcttataactcccatggaactataaaataactataatcattatcataacattagtttttttcctgttgcaacgcactattgaataataatttattatgagctactatatttctctctatcatttgagacttcggttaaaaacaaatatttttagttttaatacactgtagcgaagcacggtcattttgatagtattactgtatttgtctataaacttagttaaacttgaaatagattgactttgaccaaaatcaaaagggagtagtacctaattaatactccagttgcagttattagttcacagtggaaagcacattgtacagaattagtatttcattagatcttaagaagaaacaacaggggaaatacgagtctataaaagagcaccatcttttcttaaggcaaacagatcccctggcaaaaaaaaattataccctgtcacatcgaatgtttagacacatgcagggagtattaaatatagatgaaaaaataactaattacacagattgcgtgtaaattacgagacgaatcttttaagcctaactgcgccatgatttgacaatgtggtgctacagtaaacatttgctaatgacggattaattaggcttaataaattcgtctcgcggtttacagacggaatctgtaatttgtttttgttattagactacgtttaatacttcaaatatgtatccgtatatccagtgtgacatgccaaaactttacacccgtgaatctaaacacaacctaaatacttcaaaagaggagagagataagaagaaaatatcatcaccttgtagatgtaaaaactcaaaaaataaaaagaggtgaagaaaataccaccaccttgcagatataaaaaaaaacacaagaaaaaaaaaaagaaaagaggaccaccttgtagataaagtactgcagctcctggaatagtggagtgcaactttctcaaattggaagattcttcttcaaccgtaaccacttgccattcaactctggagacgaggcgaaatagacagttgagaaaagccagattggattgcattttcacttctatgacagtatagttgcgtgagcttatttgggaaggaggcatcacggtatgacagtacgtgcaaaaataaatcaccttgagagaacagtacgaaggaagaacaacaccacacgacgaattaagatcaactgcagttacacgacaggtgaaaacttcagctcatgagcatgaccattatggcattattgcatccaatggtacaataaacaagactgataagtacaacagcagtagcctgacaatgcaagcccaacggccggccattatgcagtcaaatggcactagaacaaatcgaattcggaacaagctaacttaaggggaaaaaagatgaaacgggcccagataagcagggcccgaaactaacctgcctgtcaaactccagggtcaactacactaacacttctcagtaggatgtgcctagcttagcagaacttccagtgattgttgcagttcacgcaggtcacgaacgtcgtcatcggctcgtcggcgctccgagtctggagctggtagtaggtagtcttgcgctggccgcacctgccacacttgaactgatcagtggtggccttcggtgctcctccacgctcgcactcgaacagagccttctcctcgatcttcttgttctcaagcttcctggtgtcgctagccatttctgtcggggttaggtcagcaattctctcaggctgcacttgtcctagaagaacccttctccggaagtctgtgttgtgatcatccttcagattgaacatcaatgatctgtacctttgcttattaggtccattaaaattccccagcttctgaaacaaggcacactctaccatcacagcaatcctgaatgggtcacatgcttttacttcttctatgatgttcctcacttcctccctgtcatcctttctagtctcttcagaaactctggagaaggcatcaccaagtatcgcccgaattctgtctcgactagcatcaccacatttaacaacggatgtcagtcttggaggaccaccttggacaggagacggcttctcaacagaagatactttgtgaactaccttttgtactttctcaaccttgatagattgggttctcagctcagcattagaaaacttctcaacctttccacctttgtggttcacaactctggtatccatattattattattgacagtagcccttggtgatgccttttcaactttcataggctccaccttctcaacctttaccacagtagaactcgattttccattctgcagtgccccatttttcttgtcttcttcaatgacaacctttttccagtgtcctaacaggtctgaagctgttgcttttatgcttgagtgaggatgcttggtgagatagcgaatacgtctgccgatctatatcagaacaaaagataaaattggagtaagtatggaagagtcaatctcctaatggacgagctgcaaacaatcgaatgaaagataagcttacaaaaggaaaataaaagcctagacacccagttttcagaacatggaaagcaacagctcagcactaagagttgggattaaaaattcaattcgcttttgaaattctataaaaaccttaaattactgaaggtatttcagttcatgaaaaatggtactccataagtgtatcttatggaatgattttacagatcagcaaacaagagtattgtgtaagtattagtaacttagtatatgacataaagagagttgtattacccaaacaccacatgcatatgtacaagttttttagctttccacattaataactagatatcaaacgcaaggtccctctgggaagatatgatgctgtcatgaagaaaaacaccgtaccattatgaaggaaaacatttgcatgctagccatgctgagcaaaacaggaaggaaaataggtggaattacatatcttacataactggacatggtaataaatagagcaatataagctaaacactgggtgcttgctaaaaatggtaagcaagattatgtgtgagcaagcaataatgcagcgtagtcaaccggtaacactaagcaactgctgtcctgcaaggacgtcatctaccgctagagcaccagtgcttcagaatcaacttttgtttactggttatgaagacatggaaataatcctaaagattatgtgtcagcaagcaggaacgcaggatagtcaacaagtaaatgctcagcaactgctgtcatctactgttagagtaacatagcttcaaatttgttgaacttttgtttgctggtgatgaagcgatggaaagaatccaaaatttcatctcatcttttagtggacaataagaaagttattttatgacaaaatcaggagacaacccacatctttctacgaactatccaatggtatcctttcgccatcgatactttttatattttacttttcaatagaaaagaatgacttggacatgagatacccccagggccaaaccccccaaaaaagaggcatttgtgttacgaggtacgtctgcacgtgtaagggcatacccagaaatgggccaaggcccaggccgccctattgtaatttgagcaatgttctagaaaaaggtatactaggccgcatacaaggagcgggttccccaatcttgtacctcttaagtcgtataagcaccgattatactgcataagcgtcccattatgccatatacgtactacaaggtggggccacctcttagaacaaaccttggatatgggccaagtttatgccaagacggagaaaattctgtcccggggcccaagccaagggcctgggtccaaccttgttcgcgtgtcgcacactaccacacaattctcacgttcaacaatagttcccgcgcaaacaactcctagaacattgagcaatatcaccatacttcaattttctcctaagcagaacaataggtccacaagcaacccataccacatgggacaccaccacctcaggcaaaatcagtacctacgaatagtttgcgcctgcgcagcataccagtatagtagacccatgcttgatgtttagacatcacggaaatcccaattatcattatagtataccagtatagcattgctgcaaccccttatccaaatctaacccaaccaacacccctcaatgaagcgtccgtacaatagctaccaaatcaaccaatctgaatattctaaatattccttagatttgcaagcagggtaaaacaagcatcctaatgttcataatccccaacctttccacatctaacaacccccaccccgcacgcatatacagcaataaaactatcacgcgaaaatcctatccatgcgaatacgaacaatttgaatctgaagccacaaaaacaaccctaaaatcgcttcccaggaacccacattccccttcctcggcaagacacctcgccgagagatctcccaaaccgtcggaacaacaaccagagcagattccctacaatccccagtctacttacggcccccgcgctcggtgttttaacaacaaacaggggggcggcgcggcgtggctcacctgagtggagacgagggcggcggtggtgacgcgagccccgcgcagcctccgcagcgcgtcgacgcagcgcgcggcctccggcgactccccttccccggccccggccgccgccgccgcctccccgaccgcgtccgccgccttcctcgccgcctcgaacgcctccaggagctccctctccatcgcccccgccgcgcccatcaacccacaccaagccgcctgcctccggattttctctctctctctcctctgcggcggtggcgcgtgtcgtggcgtggcgctccaatggcggtggcagctcgagcctcgaggaggaggaagaggtggggtggaggaggggggggcgggatatttataggagggggttgggtgaatccgatacgcacacgtgggcggataaggcgggatccgacggctgggatcgtcccgagggcgtttcggtatccaggtggtgtgggcccgggccgccagccctctgcttccaggttttttttttcttcttctctttcgtaaaaagagaaagatttctctccttttcttttctttttggtattttgttagtcacacttcgtttctttttggctgctttgccatgtgtcactgcatctttttttttccttctctgtgttagcaatgcttgtgtttcattgttcagttgggttgcttgttgtctctatttgagcaaagttgcagggtatcttaagatttggtgacaaaaggggaaattcgaggtatgtcttttgttactgtagcagtgttttgtaagtaaggaacatgaatgaaatttcaagaggaagtttctttgtagttttggattacaattaaaaaaaaaaggcaatgctcttggctcatttcctggtaaggctcatacggggaagggcaagagtgcaagactatggtcggcactgttccatgcaaatttattggagctcatgatagaaaataggaaagatgtttagaaaaatgaggtgtgacttttgtaagtataactcttataagcaacatttggtatgtaaagaacataaatgaaatgttgttgtaattttgtatgcaacacataacacacaatgcataagaaatactcctatatcagataatgataacgtgatttcctcattcattaatttcaatgttttctagttctccatgagcaagttttcgttgaatgaataaaatgttttcgctaagatattgcacctgtaaaattgaagaaaattcactgcatgttttcgatacagaagaaaaataagaaagaatcatatttatagatcaaatgattctaaaaagatcagaaacaaaactgtggtcttctttcggacaacgaccttgtcctatttctttctggtgctataaactatatcctctctctatctgtgcatacgagcgtacacacgccttcgttttctcgtgtaaaaataacattttcatatctgaaagctcaagtggattaagagagagaagagaacatcttctgaatatgtagataatcaaacacggagaagcccattttggagcatattattagtttaatttgagtgcagcaggcggccggcagagtcagttaaatcattccattagattgctgttatacttcctcaacctgtaaaccaaagttacagaaattgtcattccatactaacaggtttatgactcaagaggaaataatggagcacggttgctaaaagcaagtagcagtccagaatctggctgctagtgtaattgttgattttttttaataaaaaacatgcaagatcaatttccatccagattaattgtaggctgctggatcaaccattagtatgatggagataaataattgaaaatgtgtttttacacttacttacaaagtgtaatcacaaatgcaaatacctattctacaaaagccaaaaggtgttaatttcttttgtattatgaaaatgttatcgatgggatataactattaaaggaccttgagcaaaacttgaagacattgcaagagatacgcttcacatggtttatacaacatgcatgcttgacatttactttgtaactgatgaccaaatgttaattaccagccagcgaaatcaaagagggatctgaaagagatcttaactatattaaacgtgaagtcatttctatgttatattaaaatgcaagtattttgatggctatgtttgcaggataaagtagtttatcatgaagaacagaatcaaacatgaagttaaatgtatgacctgtggaagattcattaactccataacagccttctttggggttagttcattgtcaattatccgtgcaactgctgtcaagactggcatttttacatggtacttctgagccaatgcgatgacagccccagcagttgatacaccttcagcaacctatacagtgagatgaatatattaaaactatgtatggtggcaacattcatccaaaagttgattcaatagcaggaatgctccagacctgattcatagaattcatgatttcgtcaagtttttcaccagaaccaagacgcagtcccacatttctatttcgtgaaagattgacaaaacatgtaagcatgatgtcacctgagccagataaaccagaaagggttgttggctttgctcccatcttcggattgtttggaaaaaaaaagaaggaatcagtgaacttcataagttgatccttcaaagattacattctgatgataaaagtatctcacacctttgttgctaaccagcgtatttctgaacagccttgagcaacaagggccgccatacagttatttccaagatgcatgccttctactatacctgctgctattgcaagaacattcttaagtgcgccagcaatttctacacctgtaacatcactgaagcatcacaagtcacattcaagtattctttctcatgaatgcatagttaaattcaatgtacattatttttactaaactaagtgatagcccatgttgcttgtctgaattcctaaatccttacagaagagaagaaacagttcttggtctatacataaaagaattctcggttacatagtgatcagcatttatatatggccaatggttagtaatatttactttgatgtgcttatcctcaaattcggtgaggccaacagctgctgaacagcagctgccaactttttgtccttggatgccaccaccatagctgccatgtaaagtttaataactatgaggttccttccttcattgcaaataaaaacattccatgttctttatagaaagtaccagagctgggcatcctcacaattattaaacacaagcaaaacagaaaaaaaaaacatgaagtggtgccaattgacattgcatcctaaacaagctagagggagtatgacatagagaagattaaacttgtcaagaaatgatcttactaaacctgttggcaatttgttcatcagttcgattgcaaaagaaggtcctgacagaacaataaacggttggcggggattccccagcgcttgagggatgatttgagacattgtccgaagggtgttaagttcaagccctttgctaagcgatatgaacggcaacttcggatcaacatgtgttgaaataccctcgagaaatgatgaactgaactgccacaaaaagaaacctcaagagtcacaagagggaagggaacccccattgcactgaacaatgatttgtaatgaactgttctgaatacctgaactgggacagcatggaagcagaaatctgctcctgctaaagcatcactagcactagttgttgcagtgatattttctggtaacctgtggtctcgtaaatatttactgagacaaattgaagaagctgaaagttagattcagcaagaaatctaatcaccagaattagaatgatatgatattatttctcaaatgaatcaagaaatggggggcaatgagagattggagctgtacccaccagttgatgtggctgtggttgatggatcggcagacgaggtcgtcccggagcagcatggagacctcgaggtcggccttcttggccgccacctgcgccgccatggccgtcccgaacgagccccctccgagcaccaccaccttgcgcgtcgtctcgaccacgtcgctccggttgcgccgccgccaggaccgggaccaccggacgagcttctcccacgctttccgcaccacgcggcgccgctccttccctcctcctcctccgccgccccgcggggccgacaccgccgccgccgcctcctcaccggcgtcggccttctcctccgccgccgccaccgacagggcgccgtcgggagggccggagaacacgagggagagacggcggcgggtcggtgagtggacagcgacggcgaggcggcggcgcggggtgggcgtgtgggggaggaaggtggcggcggcggcggcggccatggatcggcgtcggagaagaagttttcgcggctcgggagatttgctatcttatccgttcccgcctttccctctcgctagatttcatcgagattcgtgctaaggggaagatactccctccgtactcgcgaagggagtagttttggacagcagagacattattcaaaacacaacttttacttcttatttctataaaaatatttattaaaaaataatatgtgtatacttttatgaaagtacttttcaagataaatctagtcatatagtttttacatttttaaacacaacaacttgaaagtaatttataatttatatttgtaaggtttgacttaaatattgtcctaaacaactttctttacaagtacgaagggagtatttcacatattcagattcgctcgattttttttgccgaaaattcggatgtccacaaaccgttcgatttgtgacaattttcaaataaatttcaaaattgatgtcattgcggttcgcatttaagccagaaacaattcagatctccacgcaaaccgtttggtttgtgtcaaaattcaaatgaatttcgagattacttcaatggggctggcagctcgcatttgagctcaaaaaggaaaaactgtaagccctagacgatcgaaatccaaagacaatttgataaattagtcgcatggtgtatcaaattgtcttcggagaaataaaatcgtctttgcaaacgtacttgtttccatgaaaatcgtaagattctctcatctcagcgtgatcacgcagtcctgcttagttgtccaaacatggtacacctatgcacagttggtgaaaatttccttgctgtaatatcaaataccatgcagacctcaccgaacaataaaaccaaactgaaaataaggggcaaacagatcctcagctcatgatgatttcagataaataaacagctgatccagcacagtaaacataaagttcagaggtccaaattgctcatatccccttggctcacaccacaaaaattttcttatctcctagcaagccacagaaccaagcaaaatataaaggaaagtacacaatgtcaagcacaagttctggatatcgggaacgctatatctagtgggacttgacatagtcctggactatgttgaggccctctgactcttcaccgaagtcctggtaaatgagaaagaacaagccaacattaccaaatgccgaagatggcaaaaagatatttgaagtagtatggtgggtaatcaattatctaccttgacaacgacgcaggagcagcctacgaccttcctcgccttgccctcagaatcaatcttgcaaagctgcaaacaacgtttgttgtgatattgttaaatcagaagatatgcagaaaggagagatgcagaacgatatcaacaacaaaatgaaattaaaatttagataaaggattacaaaattaaatagcacattttacactgagctggtaaaactgtagtcattagcagaaggctaaatcaaaaaatcttatccggcagcctagacatcagattaacacagtataacaattgacaaggtatagctaatagaagagtaatgtatctcacccctgcccactcgccaagagttttagcactaggcacggtaacgaggtgaacattgtgctcagcgcagagtgccttgaccaacttgacataatcaggctggtcacagtcctcagcaagcacgcaaagctgagcggcatgcttctcaatggccttggccgcctcacggagccccttcacgagcccatcatgagcgcttgacttcttcatcacaagctgcagagcagtcatcaggtccatcggctctccaagaaccggggcaggtggggcctcaactggagtctcttccctgcatggatgcttaatcttagtaaacaaggtagcaacacgttttccttttagttttgttctactggaaatgctctttagataattgagttccaagtaatttgacaatatatggtgctgcattctcaaaatagttagtaaacataagcaaaagtcaatttcccactgtattagcaatgacgtgcacaaagctaggtttttccgaattcaagcaaaacaaaacaattcgaggacaaatgtagaaaggagaactaataatatgcccccactcagccagaacaactcgcttaacgaacaaaaactaattcagcaagcattaagccttctttctatctggccgtatgttctatctgcttaatattaccatgtacaccctccgtcccaaaaatacaacttctggaaatgaatacggagaagcacatgtctagattcgtccccagaagtttggtctttttctgagtatgaaccagaaatctgcttgcaaaactatattacaggcataactaaagaattcctaaagcataaatttcaatcccatccatggcagctcacgctttcgctaaaatacgagccacatgagcatgacagctttccaatcgcacaacattacagacaagctgaagactcgccgggttcttgaatcaattcgtcaaaacaagccgcgaccctcacaattccaaaacaaaaaaacagaacacgaacagcaagggcatgatcccgcaaaaccgctaggagcacaacccatttctcaggcgccatccatcagcagccagaccaacagaaaaaaatatatcaactatgaagcgagtgggggcgccgagatttcggtgcggggggaaacttacgccatgtctcctgcgctagaaagacccgaggggccgacagcgacgacgacgggagggatctgcggaaacgaaagagaaatacaattagaagcaaaacgggagggaagcagatgcaaggaagaagaacaagggggaagggcagcgccgccaccttgggagagcggcggcggcggaggaggaggagggttagggttttcgcgaggagggcaggtggggaagaggcgggtgggagaatggtggggtttatatggctctctcgtgtcgggcctagatgggccttgatctcccgcttctgggcttcactacgaataagtttacttttactcccttaactagtgaccggatctgatttgtttccctgaaccacgataccgatatcttaacccccaactattaaaacaggtgtaatttaactccctcgaggtcttggagggtgtttttgctgacgtgacccctatgtggcagtgttgacatggtcttcgtttcacgtggtgttaatgtgacgcttatgtggcattggaattaaaaaaaatatatgtgaacccatttatcatgaacacaaaaatattaagcgccatagtatggacgtgtctcgaccccgcgtcgcccatgcgcgggccgctggggggaaagcctagcgccgccgcctcccctctctcctcctctccctcccctcgccaccgctggagaaccgagcggccagccgggatgacggcgcgtgaggccaaatctcggtggcacccccgtctctgcacgtggaaggcgggctggcgcacagagcagaggttgacgacgcagcgtggaggcgtcgtatccgacgccaccgcggccagatccggtccccccgtgggtggatctggtacctctgcgcgcggatctgaccggtgcaagccgctcaagcagcgacgacgggaggcggaggcagcgacttttggcggtggacgacggccggtaaaggaggccgacgagcgtagaagccgcggtggctcgtgcgcaaggctcagccgatgacggcagatgactgcacgacacaaggtggagcggccgggggcggtggtggtgcctgatagcggtggtgacgctcccgatggtcggcggcggtcggcgaggtgatggctgcggtgaggaggacggaggctgccgtggtgagaggacgaggcgacgggcagcttggtcgaggcggcggcgatggttgcgctatgagggggtgttgaaacctgtggcgagcttccttccaggcgtatgtcctcttgcggcggcggcttgccgccataagatggctacgctggacaggctagtgcagggagaagggatccattcttctctatcatcctcttcctctccaacccaaccacgtggatggatttgaagcgcgacgagggttgagattcttctttgatggtcggcctgcgacgcggtggttgcacgtcgaaggagattagctggtggttttgctgaatctagcatgcactctttagcgtgggtgagtagaacaatgggcaaaggcctagcctttgggtcagcaatggcgacacctgcgggtgccgttttccgttttccccttggggcttgctgcgttttctatcatttcccaataggttcctcgagctacctctcttcgcggccggtggggttgaggggactctcgctggccacctcacactgccaactaccaagcataagatgagaaagagagaagaaagagagggagagaagagtaattaacacatgggtcccatatactgactcagtaagttaaaactaagtcaacgagccatgtcaggaaaaaagaacaattgaaggatagtcaagcctataatttttttcatttttaaatttttattttttaatatttatagaaatattgtaccggcgaaaatatttacagaagtagaccctgccgccctcggcagggtaacgtgagggacggataaaatgaaaaaaaaactagaaaaatgcatttttggcggggtgaaaattgcatttgcccccttgtagcccttgcagagagtggcaagggacctcagtgcaaaatgcgcacaccttgccctcctccaattgggcggaaggggccatttctataaatattttggatagtccgtaaatattaaaaaataaaaatttaaaaatgaaaaaaaattcgtcaggcctatatttctggcccgagtgactggactctccccgcctcggcccatcaatgttctcccgtacgccgtgcccagcccaaccgcggctcaggacgacgctagctcctcgccggcggcgactcagttcgctcgaccgggacgggacgacggctcccctctcccgcgaagctcgccgacggcgacggcgaccgccacatctcgtccatgcgcagctccggtcggaggtacccttctccccgacctctaacaacgagcctcctcctgccactggaatccgtctgtcttggatacgccggtgtttttttacgtcttcttcttctgcagattcctgcctttcagcttcagtcactccatgaagcacacaggtttgctgtttcgtccttttcaaatccccttttccatgctaaatcatcctatgtccttgttcatttatcttaatcctgtttttttcctactatgtaaaattcaatcagattggagatccaccagccctgctgtgtgatgtttgtctcccccactcatcagtttttgatgcgtgtgctcatccgtcaacgactcaacggtatgcacctaaatactttcaattttttttagagcaaagcatgatttctgttttgttctacaatgcttatcagaatagtactagtttttatgatagtgaaatcaagtagcacattagcactgtgtattttctatgttgcaaaactgctctgttcctgatgggaaatcaatttcctagttattcaatttcaatatattttcaatacttttagcacagttagtttgtcatttttaactgccattcttaactagatatcccccagcaacatgcggggttgcatccagtataagttaaaaagccaaagccctaacaaatagaatatgctcattggagatattaaaaatacacaagccactcttgtattaatatgcttcttggagatattgcaaatatttttggcatttctaagatgtacaaatatctctcgaatatcataaaaactctatgtattggtagtcacttggcccttttcttttggatcaaggatatcccactttcactggaagcaaatattgcatcattcaaacaaaaagaaggaaacaagaacaggatgtggtcccaccagctgtatatcaaaagcacaaatcacaccccaaaacaatataagtttgtgcagttttgcgagcaaacgaaaattgtgacttgtattttctccatctcctccttaccagatcctattctccagctgcattgcagggtctgtcccagtaggcttgccacatgtacatcttgattttcattgttatcttagctcctccagaatctctccttctccctgcttctcatgcgcataaaaacatgtgccaccctcttttgaaatggatgatttttttataggatttgaactaaatcctccaaaaatcatgtaaaattcttgcgttcgaaaagagcccttagcccttttccgaagagcccattttgcatctgtcctcaacaggatttggccaacaattttcaatcagatcaaatagctgatagttctctccagcttaacagatcaaggaggttgaaaacgctaatccttgatccaagaaatgagaccttctgaagccaaatctcccaaacaccaaagctgcaacagttcttttctctattaagaatttattgcatatgtcaaaaatgtaacggtgcctatgtttgagaggcacgcccctaaccatgtgtcatgccagaacagaacataatcatttcgtcttacactaatttgtttgatttgaggaacagaataggctggtctatcaccaatgacatttgcttaccctctgcacacaaacgagagagacatatgtatattccagaacaaggcgtcaggagtgcatcaagtttttataatcatgaaaggcaatgtcaatcaatggaagtatagcaaatctgaagcgggtaagaaaaatggttagtaaaacaatcaaatcaaaacccaatacatgctgaaagcatgtatgggaaggaatgacgtagatttgatgcagatcaatcttgtcttaatattcctttaactactgtatacacgtgacgagataagtcagcatacacagaaacaaaatcaagggatggatgattgtgatgatcattagctgccttcctgatagcggcttcagcttcctgaatctcctctcctgaggtttcaaatctatccaagtccacaaaaatattccggagagaagggaggttcaccagtccaaaatcaatttcaccgtagacatcaatagtctcccacaccgaaaactgaaggcaaatcctttgaagctcttgcatagcccttggttcaaaagagaggcacattctatgacagtaaaagtgaaattcttgtagacaacggaatgcacatgtgcctctgtgaacaatgagccttctcttcttacgttcaacatctatcacttccactacattagatgcaaatatcctgagaaactgtagagagggaagctctgcgagagtcacaaggtactcctgctccatataattgttcagattgatggataagatggtgaggcaggagagtgaggaattaacccatcgagggaatcccctatagaatgggccactgctcataaacctttggagacagcaaggaacttgttgcatgaaatctaggccgtaaaggcctggggatctagtgtgaggttctgcaaacttttgtgcctacttaggctgtcggcaaaggcatccctgaagatctcacaatcctcttctgaagaaagcataagattcagaatcctaaggcctgttagatcacacacctcttgcagtaagttttcagtgagaccggcgcatgtcagctcttgtagagatgtcatattccctagggtcaaaccatctgccagactaactttgtgagcaatcagccggactaactgtcgtaatctgacaaaagaaggtggtaactgaatcactgagcgagtatctcttatgtccaaagtctgtagaacctgcagattcccaatacactcggggagtttactgatattccctagccgcaggaaccttaggtgatgcaactttgcgagatcattgagatgattgtcctctagattcgaacaatcatccagtcgtaacacacgaagaacacgaaagatcattagaggtggtatggatttgacactgttgaagacagtaaaagacctcactctggacaagctctctctagcttctgctgtggcatatgtattggtggtatagtatgttccatgaagaaaggaatcgttgtctctgtaattgtaagatagtcggcgaactttcttttgaacagacggtaccagtataccttctttttcactatctaatggcattgctgcaacaaatccttcttcagcagataactgatttgtgaactcaagcaccatgtcatgtacttgacaagcatgcacctgaccatcgttttcacaaatgcggccaatatctactggttggataaggcttttattcaggagctcattgaagtaattttctccaatctcctgtaagcttctcccatgttctccctcgttggtaataaaaccctctgctatccaactccaaatcaaaatatccttcgcgataatcgcatcctcgggatatttgcttagatacaataagcaagtcttcagatgtggaggtaggtcatagtaactaagactcagtattttcctcatgttgtccacatcaaggtatttccaagtccaaagcctatagaattatttaccttctcccattcctgaatttgcatcggtttactggctaataaacttgctatagtaattatagctaatggtaaaccaccacatttatttaaaatacttctggtgacttcactcaattccggagcgaacctgtcttcagtgtcaaatactctcttgctgagcaacttgtaggagtcgtcataagaaagaggttttagttcataaacagcaccaccgacacgttctgcaacagccatttttcgggtggttgtgattattttgcttccatgatcaccatctagcaaagcaagcttgataacatcccagctgactcttcccatatatcatcaattacacacaagaatctagtcgtaagaagtataaaacacatgtcagtaaagctagatagtaattgtgtcaaatgactccatggaaagagctcccatggaaaggtatctgttagattcagaaatatatgatactatagaaagcttaatctatattttacaaccttgaaattccatgaaagtcgaagaaataacccgaagcgtcagaaccaacaaaaaccattgaaccctgaattatcataaccgttaactttttatcctttgaatgaatttagagttgttttaggtgatatgctgctgatggacattgacaagcatgtttttgaattgtttagaattagtagatcacctaaaatttagaaaaagatgcttcctaaagtatagttggcccaaaaataatgcttacaactattttttttaaaaaaatatgaccacattaaacttgagaattgataaaaaaaattgtcgtaacattttgggtgaaaaactttcaaatgtaactctaatataattgtagtgtaattacattgtaactatattatgttttctataaaacttatgtacaagttttatggaggtagtgtgcgtttttaatacttacactactggagttctctgatctttgctggatggtggaaaaaccacgttagtcccgattttaataggaatcggaactaaaaatcatttttagtcccagttaaaaagcccaacgacactttatgatctttaccaaccgggactaaagatcatttttaagtcccggttcaattcttgtcagatggtgctaggccgccaacaatctttagtccaaccgggactaaagatcagcactttagtcccgattgttcataccaaccgggactaaagattaaaaaaaagcgcacaggaccacaggggagggagagccgcgcgcatcgtgttccttagggcctgtttagatccgttggcaagttttttcaccctgtcacatcgaatgtttggacacatgtatgaagtattaaatatagacaaaaacaaaaactaattacacatattgcgtgtaaaattgtgagacgaatcttttaagcctaattgttccatgatttgacaatatggtgctacagtaaatatttactaatgacgaattaatggctatagttacatttgaaagtttttcacccaaaaaaacttgtggtaatttgttcaatagtccctcaaacttaattactctccgctcccaacttatgtagtttttttagtactccaatgtgcgtcttaattttttgtgaaatttgcttgaagacatttactaatttggagtttttatgctttgaatagagcatgtcctttattcttttgtgtaaaaacaatttagagttttccgatcctaaatcaatttagtaggtaaaaaaattaagtcaaattggaccctaaaaatgggtttagttagtttaaacactacctgtctttgccttctaaaaggagagttgtttctagccacagcccatttatagcctgacaattaatgtctttgaaaccactttataattttcgcttaagacattgcttaggatcagcaggtcacttcatctttgaaatcactctaaattcttgccatctgccatggttgaaaatcgaatggtttttgcaaaagtagggttgaattgtatcttattgtaaagttgatggatgtttccaacattcccccaatagttctggcctccgggagtcaaacttcaccatttgaccactctatccgtttcaggttataagacgttttgactttgatcaaagtcaaaccgcttcaagtttgactaagtttatagacagtaatatttacattaccaaattagtttttattaaattaataataaaatatatttttataataaatttatcttgagtcaaatatattactattttttttctataaacttagtcaaacttgaagcagtaaagtcaaaatatcttataacctgaaacagagagtacaatatatcaaatggtactaagatttgtaacttgtaaatgaaaccattaaatctctttcacaaaaaaaaaaattcaaatctgcctacaatattcatgtattaggtcatagtagaagtttgagactaggcgatatctaaatttatcttaacatggtgggtgctaaattttataaagagtgaagtccatttaagtatttaacccaccttaactatttgccaagtctagaagttaagaaatcaatgtcaactacgatactggacaacttatacccttaactattaaaattggttagaataccccttcaacctggtaatggtggttttcatgttggcatcctaataatatgttttttatgtgggaactaatttttatttttctaagtgggtgcatgcttagttaaaaagtaaatgttttggattctaatcacttaactttgcaaaaacaactgttcaaactgggttgaattgttctttggggggggaggggggtgggggagagtgtattttgagcggttttgggtgttgcggatacaccttgtgaacaaattacttaattcaataaagaacaagtttaagcatccagaagtgtcttgttgctttttcttagtgtcttcattttctttttcttttttcgcttagcaccatttttttcaagataataaacctaaaaaactttctagtacgctaagaaagaattttgtaaagttccattggttaattcctcatcgtttaggagtaattgtattattaggtttggtctagtttaatctatttttttacctcttacatgatttgttatgtttggttcgtcgagatgatattacactaacagttcaacgtcaaggaaacaattggagtaactaagacatgtaatcagtcattaggtatgctagcaaattgaaaatgcataggtaaaaatagtgtacaaaatttaaatgaatgtttcatgttggcaacttaaaaatgaaataaatatgttcatgataaatcaatgtgaataattgaaaagttatatacataaatgtacctcttattctgcaggatttctctaattttatttataagttggaagtctgctagtccttcaaatatgttggctttgttgtcaagttgatggagtatactctttagaatattcctgatatcagatttgttggacaccaatgcaaagaaatggcaatcaaactttactctgagctcatgaagcaatgcgttggcaatcgttgtcttgccgaggcctccaaatccaacaatcgaaattatatctcggtgtttcctcaattttccatcttcctccatgagtgtcttcactagcacattctttggcccatcgagaccgactagctccgtctcctttttgtacatagcacctagccgaggatcaatactctccgatcttcgtgcaatgacagcatcatcaatcttgtacctctcgcggcgcttactcgcatcctcaagaagtttcttgatgtcctttatctcccttgcaatctgatggtgagccacaaccttcttgaataagttgttagtcctgtcaatcatccccttgaagctgaacaacttggcaacggggtgcccatccttaccggcactcaccatgaaggtatcgatagaatcctcgatgtcgtaggacagctccctaacatctctcacccaaatcttaacctgctcgtcgatctgatcgacgggcacctcggataccttgtggagtgccgcacccaagcttaccaacgtactcctcctggagggactcgatctccttcttcacgcccttctgcagcttgtactccccaaccagcagcttcgcaaatttgaggagcagagtgtttattgctcctgttacaatctccatagttatgtcataggcaagggaacaagaggtgttgagggtgttggtttgcaaaaggtgttcttgcccttggctttatggagcaccagcttccaaaggcaggcataaatggctagatggttaggctcgatggaatataatgatcaccaaagctacttttctcttcttcttttttattttaagaaacatcaatcatcaatgagtagtttagttgcattattgtactagctagaacatgaccctaacccgtgaaccatgactattacgtcacgtccatgaggaaagaaaccactactttaattcccaaagtatgaaaccggatattgtaacctgaagtgtaaatagttacggaggtggccttcatatgccacggctatttgtaggatcgaatcataagaactaagccaaccagagggggggtgaatggttggtatacccaaaaaccgaaaatttttatcggaaataaaagttaccctcgaaatcgatggatcgcggtttgaccgaagtagttgcaccggtctgaccgcctgatgaacgtcggtctgaccgatgtagatcgatcagtcgaaccactgagaatgcctgccgcgcctgtcgccgctgccggtctgaccgccgtgtacccgccggtctgaccgccgcttgccgccagtctaaccgccggtagatcgccggttagaccgccgaaacccggtaaacacaaatcgaagaactcttaaagtggatgacgactttattgattctctctgtgtttagaaagtgcaccaacagctctccttacaaaaatttcgactaaactcaaaaccctaactaaaaactcaacttaattgctctctaaagcgataccgggaagcctcacgctccccctctatttatacatgaggtaggcagcctaaagccacgaaccaaactcatactaggagtcctaaacaccttaggaaaccctctagtataagaaagaaactttacataaccaatcgtaccaaatttggactccttccaaattcgactccgcatcccatacgcacacaataactccatcgtatgccatatggaatctccatcaaccacgtgcatcaactctagccttagtatcccgtatgatctctgactgccacggacgtcgtcttatccccaagccgactcctggtccatcaccgcaaatactctcccgagacatcgagtcacctacacatggaacaaacaaagaaaccatattccgagaccaagctatctccaacttgactcattagcaacaaacaatagtattacatacgtatagtatctatctaaaagtcataatcatgaaataaactcggatatccaaataaacaacccgaaaccgaaactgacactgtgtcggccggtcagaccgtgggctggccggtccgaccgctcaatcaccgccggtccgaccggctaccagagcccggtctgaccggtcacatgaaataataaacctgcgatcacctgtgaaatccaatcatctccaaaaccacttcgtgaaaaaattccaaataacaaaaccaataatctccaatgcccaattgttcatcacataatagtaatcaaaaacttctttgattttacaatctcccccttgatgaacacattggcaaattcataaaaatgttttggtgtttggaaaaataaaaacaaaagtggtaaaaagcacacttcgtacaattgtacacatcgtgctcaaaaatccaaaagaaaacttctccccctttttaaaagaaagaaattcccaattgaaccaaaaacatgctcttctcaacaactcttcaaaaaaatttttccttgcttctccaaaaatccaaaaattttcacattacttctcccccttttgacaatgatttcatcaagcataggaattaggttcattaatgttcaagagctcagcatacatatagcatatcatgtcatgtgttgcaataaaaagaagatgaacccatctatatcataacaagcatgcattaaagtataaccatgaaccaaagattttacaattaagcttgaatcaacaatcagaattcatgattttaaatgatttataatgcaacatcttaacaagcacataggttgaagaataaacacgaaacacatatatctattgcatttatcactctttctcaaataacctttagcacaaaataaccaagagaatttttcaactttttcttttcttgagcctttttctcatatttttctcttttattccgggtacgtccctgtcgtcaagactgtttccagggattcggcacccattattttgctcatatcgaatacgtccttgtcgtcaagactgtttccaaggattcagtattcatttttttcatatttttattctctttttcacaatgagcaattaaagctatttaaggaataacaagtcaataaagcatatatatagagcatttataaatcaaaccatatgctagcatcaacattgcatattttcttaattcaagtaaagaatttaagtgtcatgcatcatctcccttaaaagcaaaatctaaatatcatgaaaagactagaatacatacaagctatgctagagacaaataaaccttcaaagtattgctagcatgcacaagaaaataccatatgcataaacaaaagctctcttttctcaatttttatcattgtcatattattgcttgctaaaaccatgaggtacaaactccccctcaaaccatgccaaaagaatgaattatgcccaattcaccacgaagaaaagtaaagcgattagaatccaaaggtttagtgaaaatatcagcaatttgcaacttggtgtccaaaaactgcaactcaacatctcacttctcaacatgatccctcaaaaagtgaaaacgaatatcaatgttctttgtgcgtgagtgttgaacaggattcttagcaatattaatagcactagtattatcacaaaagagaggtactttctcaaaagtaagaccataatgtttcaaagtagataaaagccaaagaatctgtgaacaacaactagcagcagcaacatattcagattcagcagttgattgagcaacactagattgtttcctagaagaccatgcaatcaatgatgtaccaagaaaatgacatgttccactagtactttttctatcaattctacaacctccaaaatcagcaccagaatatccacttaagcatatagtagatgaagtagaataccaaattccaaactcaagtgcatgattcaaatacctcattattcgcttgaccgcttgacgatgtcaagcacgaggagaagcttgaaagcgcgcacacaaacacatagcaaattgtatgtctggcctagaagcagttagatacaataaagatccaatcatacttctatactccttttgatcaacagtttcaccatcttcatcaggatccaacacagctgtagaaccaattggtgttgaaattggcttgcaattctccatcttgaaccgtctcaaaagatccttcgtatacttcgtttgatgcacaaaagtaccttgaggttcaaaagaagcaacaaatgcagaatttgcacaaacatcatgagtcgttaccttagaccttgtagtccgctcacctatattaccaataatttgttcaagcggatgtcgtcgttgaatgtgcaaaggagccgtgacttctgaagttgatccacgttctgtattagtactggtcaaagtagtaatctccggaggaccatctcgatcagcatcagcagtacccgaacccgacgaccctggccggtctgaccgctcctcatgagccggtctaaccggaggtgtgccggcggtctgaccggcctagcgctcggtctgaccggccgagccaacctcgtcgtcatagtcatcgtcgctctcgtcttcaaaaatacaaccatcctccccctgaacctgtgacagtgtacttgcaatatcgggtctagtacctggactagcctcatcaaaagaaacctcgcaagtctccacgattttgttagtccccaaaataagtacacgatagccacgagtatgtgcggggtaaccaagaaacaatccatcggtagaacgtgcctcaaacttatccaaatttccagatttcaagacaaagcacttacaaccaaaaacacgcaaatgtgaaactttgggttgatgaccaaatcgaagttcataagaagtttttctaagtttagatctcaagaaaactcgatttgaaatataacaagcaatgttaatcgcctcagcccaaaattttcttggagttttatactcatccaacatcgttctagccatctcaaccaaaacacgatttttcctttcaacaacaccattttgttgaggaacacgaggaaaagaaaattcatgttcaagacctctttcgttgcaaaattgttcaaaagaagcatttttaaattcaccaccattatcacttcgaattcttttcaaagaaccaggaaattcaagatccaatcgaagaaacaaaccacgaaagtgttgaaaagcttcgtccttagttgccataaagaaaacccaagaatatcgagaaaaatcgtcaacaataaccaacacataccactttcctccaacagattgcactctagctggaccaacagtgtccatatgtaatagctgtcccggtgcatctgtcatcacagaaacaataggagcatgtgaagtagaaaccatcttagcattacgacacggtgtacaaaccaaatcaagatctttcttaagtttaggcaaaccacgaacaagatccaaaccacttaacctagtgagataatcaaaaccaacatgtccaagtctacgatgccaaaacatcacatgtttatcaaacttagcaaccaaacatgttatcacaggtgaaacaggattttcaaaatcagctttaaacactcttccatagcgagaaatattcaacacagaatcaccacaagaatcaaaaactttacttccagttttcttaaagtgaacctcaaaattttcatcaacaatttgtgaaactgaaagcaaattgtattttaagtcctcaaccaaagctacattctttaattcaaattttttatttactttaaccaaacctgtagcgagaacggcacttgtagcagcatcaccaaagataatcgattcagtcttggatgccttctttagggaggagaaccaatttttatcaccggtcatatgccgcgaacaaccggaatccacgatccacacgttctccttctttgccaccaaagcctacacacaagcagaagtcgaaccctcagtactggggttagatgataataaaaatttagaaatccagtactgagacacacgaccagaagatccaataggcatatatccacgtgcaaaatcaattttagaattttcagaaaaattcctctgaggccggtctgatcgaggtacagtggctggtctgaccgagggtattcagccggtctgaccgcgggacccactgcggtttgaccggtttcctcgagggaaaacccgatttttgccactttgattttgcaaaagcaatttctctctcctttttctgtttatgagctaatctgaaacaaaaaccaacaatatgtccatctttgccacaaaaagaacaagtatatttttcacgatgattagacacattgatagcattagaagatttagcaacacaagcaacaacaggagattttccatgcacaacattggattttgaagaagatgcactcatagtagacatgataccagcagatttaaacacagttttgttagtatcaggtttaaccaaaatctcaccacttctagcaccagcacctaacacaacaggaggatgtctagaattatgagcataaggattaaaacctaaaccacggttatgtgtgctaacctttgattgatccaaaatcatgttgaggttctttttaccatcagaaaatcttagcaaagaatttttcaagtaagaaatctctttttccaaattagcacaattttcacaatctaccatgacacctttgcttttacgacatttagggcaagaaagcacttcattgtttttcacaatatcttccatgtactcaacacgacctaaagcatcttttagtttcatcttattcaaattacatgttgagcaatccaaaacatcatgaggttgttttaactttttagccgaaatcatgttaaacatcaaactagcatgaaaagcaatttgatatttttgcaacaattttttggttaaaaacaactcatccaaagtgcgtgtatgcaaaacaaaactacaagcaagagaagatctatttttcaaatcatgtgcagcattaacatctctaatttttgaaatctcattcattaaaacctcacaattttcacaatcatcatcattaggaataagagattttaacctatcaatttcaaatttaagagatttaatgataaattcctgttttctatacatcttctcacacttcttattttttgcactcaaaatattaatagcttcctcaaaagcactcacctcattatcttcatactctatatcagatttaccacgcgccatgaagcaaacatcggagacgttatttcccttatcatcatctccactttcaccatctatatcacttagtggctcgaagacggcgcaaacttgttgaaaagccttcctaagattctccatcttcctcccttggtaagaacccttcgacttgttgttgttgggcttgttgttgttggtcttctcactatctttgtcttctcttttgcctctcccaagcttaggacaatgcgaacgaagatgatcaattgaaccacattcaaagcaacgatttggaccacctcttttcctgttcctggcattattcatagctcgagcaattctgttagcaaccaaagccaaatcctcctcctcgatttgttcgagttgatcatcggatgtggcattaaaaacagcaagaaaagaggacttagatgaagaagcatcaacatccaaagaggaagaagaagaaaccaacgcactagacttagaattagcttttcgagaaagaacattcatctcatgtgttttcaattttgtataaagtgaatccaaagtcaaagtagacatgttaacagactcctgaatagatgtaactttcatctcccaaatagacatgtcgagaccattaaaaaagtgacgagaaatctcagattgtggataattagcatcataaaaagaatcaacagatctaagatcactcaaaattttattaaaccgagaaagatagtcatccaaagcttcttcaggtttcatctcaaatttaatatactcctttttgaaaagatctcgacgaagctctttaatgttatttgttccttgatgaaaattactcaaagcaacccaaatctcatgagcagtttgaagatgagcaatacgatcataatccgaacgagaaataccactcaaaagaatgttacgagctttgcaattttgttcaaaagcagttttttcagcagtagtattaatagcttcaggaatcacataagcattagaaacttttctccaaatatcataatcttcagccataatgtaagattgcatcctactacaccaatgagaaaaatctgttccatcgaaaacatgaggcttagttgaaaacctagcgggagtagccatggcaaaaactctatatcgataaaaatctaaagaagaaaacaaggctctgataccacttgtaggatcgaatcacaagaactaagccaaccagaggggggtgaatggttggtatacccaaaaaccgaaaacttttagcggaaataaaagttatcctcgaaatcgatggatcgcggtctgactgaagtagttgcaccggtctgaccacctgatgaacgtcggtctgaccgatgtagatcgattggtcgaacagcctgccgcgcctgtcgccgctgccggtctgaccaccgtgtacccgccggtctgaccatcggtagatcgccggttaaaccgccgaaatccggtaaacacaaatcgaagaactcttaaagtggatgacgactttattgattctctctgtgtttacaaagtgcaccaacaacactccttacaaaaatttctgactaaactcgaaaccctaactcaaaactcaactcaattgctctctaaagcgataccgggaagcctcacgctccccctctatttatacatgaggtaggcagcctaaagccacgaaccatactcatactaggagtcctaaacaccttaggaaaccctctagtacaagaaagaaactttacataaccaatcgtaccaaatttggactccttccaaattcgactccgcatcccatatgcacacaataactccatcgtatgccatatggaatctccatcaaccacgtgcatcaactctagccttagtatcccacatgatctctgaccaccacggacgtcgtcttatccccaagtcgactcccggtccatcaccgcaaatactctcccgagacatcgagtcacctacacatggaacaaacaaagaaaccatattccgagaccaagctatctccaacttgactcattagcagcaaataatagtattacatacgtatagtatccatctaaaagtcataatcatgaaataaactcggatatccaaataaacaacccgaaaccgaaaccgacacagtgtcggtcggtcagaccgtgggctggccggtccgaccgctcaatcaccgccggtccgaccggctaccagagcccagtctgaccggtcacatgaaataataaacctgcgatcacctgtgaaatccaatcatctccaaaaccacttcgtgaataaattccaaataacaaaaccaataatctccaatgcccaattgttcatcacagaatagtaatcaaaaactcctttgattttacactattgaccgacgtacatgtcccttcttcttttatgtgttcatcatcgtcaaccattcgtgacatggccacatgtcagccagtaccctccatattttaatgtatgacgtcgttgacttttcgaccaacgtttgaccattcgttttatttaaaatttttgtgtaaatatgaaaatatttatgtcatgcttaaagaacatttgattatgaatcaaattacaataaaataaatgataattacataaattttttgaataagacgaataatcaaacattggacaaaaagtcaccggcgttatacattaaaatatggaggaagtacaaaacaaaacacctccgagggatttttagcacaaatgagcagttttaactggatcaaattgacatgtggttccaaaatgacatcatggtgaaagttcttcaaaaatggcatgtggttatttgaaacgatcgtcatctttgtgggtagaatgcatgcttggcttcgaggctaataagtagagacgattggttaaatatactactttttgtgtatatttgtctattcgccctccttttcttatcgaactctattagtctccatttggttgtttcattagaatgtaaaactgtttggattagagaaacttccttgccaatgcagactgaactaatagtggtgagatgccacactctcgcatctagagttttgaagaaaaaaaaatgtgatccatttggaaaaccggtaaccagataaaagtttcaatccaaattatttaataataaaaaacggttgcaagaggaagttcatatcttcagtggcggagctagaaaatttatatcttggatcaattatcattactgaatatttcagtgggatcatttatgcaaatttgaatggatttatatggaaaataaaacaaaagattctcaaaggtgattgtgaaaacgctatgggatcaaccggcccgacatcataatatggattcaccactgcatatattcttgtggaatatatacattattatatctaatcttactgtttcaccaaacatcgattgggctagcctcgaactaaaggtgacaagcgcacaactccattttttttcaatcatttttcctttttcgccactgactgtgtgtgccacctttttcttttgttttcttaattactccttttctccattataaatgtactactacctatgtagtgcgattttatatttaaatttgacttattgcagatggtacgccgacggatctcgaccaataatcggcaggatttccatcccacagctcgcatctgtataatctgcatatcttataggtgtagtatgtaggaatttaaaatgtgctgcatttaatttctacgtttttcactttcctgcattttgtacaaccagtgtgctctaaaaaaaaaactactgttcctgctttgcggaatcacataatgtaatgcaagatgggttcgtcgttcggcgaacatagtagcacacaggaaggtgtttcaaacaattgtatcacgaccaggatttctgtccaccgggttttcttttgtcttgctagtagacgattgtaaagagtttgagtgactcctagctttggtgtgtaaccctaaacataatacatatggctcaatgttgttgcatactctctccgtcccataaaaaactaacctagtattagatgtgacacattatagtactacaaatctggagataccactgtccagatttactgtactaaaatatgtcatatccagtcttagacattttttcgggatggagggagtatgttgccatgctacacgcacgaccaatataaatgtgtgtatttgactctcctggtcggttagtaactatgctactgtaacaatattttagtattcttatgcatgcacctgaatagtactagcaatcagattgattcatgtacatatgggccccatacaaaggacgtacacgtgatggagtatttccaccgcgcatcacacaatggcttctgcatgtctgcgcccgtgtggaggagggtgcatgcgtactgcggtgccttgcaggggagcgcacggcgacgggatcttcgtaggtatcgcgccgatcccgtcgcgatggcggatggtgtaccgatgtatagcattcctaattcaaaatagcgcaatgaccacgatgaataactcattatggatagtttgattcttggaaccaaacaatgcttccacacgccactagcccactagctctaggtgtctccctccttactcttaactattacttccctgcgcgtcgctccaaggcaaggggcgacacgggaggcgattcttccccgactcataaacattgtgaaaaaaattaattggccacgtgtaggacccatcttgagaccaccatcgtttggcctaatataatatcagcaacgaaaaaaattaacatgcgggtaaaatttatatatatgtatgtccttatgatctaaaagacaatacttaaaaataaaaatcctaaaagtcaaccctaaattaataatcaaattctagcaacaacttataatctaaaaggtaaacgatggaaagctatgtataacaatataatatcataatacactatttttatatggttaaatatttaaatataaaaagggaccatgacaaacataagggattaatcaatttccaaatggcatttaagccagaaatggactagccaacatatcacacgtgtacgatttagggcttttcgtaactgcccacatacttggcaaagaatgatataaggtttctcgcgtctgatgacttcccaaccagtgtccaaatctctaaattaagatgaatctatattcttccaagtgcattacttctagaattcaagccggtacaaatgactaatgccagcacatacatgtagcatcttgcctgaaatttcatcacacctaccaaaattaatttgtttgaggaaagaagtagataatgatgttaactatcacgtttatggaaaacaattggtgtcaaaccgggccatattcctacccatctccctttcccgttttatgtagattgctagataccacatgctactgtggattatatactttgattatagagatacattaaatattttgatagataggtttaacaaataatttgttcgtctaaacattaataaacaatacagtagaagatttttttttaaaaaatgtattttttgaagcatagagcaaatcaaatataatctttttcaatatttcggtaaataatccggaaaaaaactgagaagttgaaacgaaacgaacgcaaacctaagtctctgatgacacaaatactccatccgtactcgtaaagaaagtcgtttatgacaatatttaagtcaaaccttgggaatataaatcatgaataactctcaagttgttgagtttgaaaatgtaaaaattatatgaatagattcgtcttgaaaaatattttcataaaagtatacatatatatcactttttaataaatatttttatagaaacaagaagtcaaagttgtgttttggagaccgtgttgctgtccaaaacgacttcctttacgagtatggagggagtatgctatagccaaccacatttattcgcaacaatttctccacatctaccgtgcagtacataaatgtattttttagcaacaatttcatagtactccagtaccattaccaaaccaaactcccatgacatcaaagttaattagcctaatagtctgggcccactttccagtgtcacacgtgtactcttctagtacatgacccacagtgtgagaactgagtggtttggtggcaacctgttcttcccccacaacagaaatggcaaacagcagcacacagttgccaccccaggaggtgcatgcattaatcaatttaatcacacctaccaaaacgatgttaacttgttcaataataaggacaaggatctaattcgatcgacagacaccgacgactcacacaccaaatcgatggatcaaaatatagctggtctgtagcttatttctgcccccaaaaatacaaccattattaattggaaataattcacacatgcaccaaatatttggtaggtaatattccagaccttaagattcacactgcatatgcatatacagggtaaaactatagattttcatatttttttaagatagtaaaaatggttcatatcattgacctttttaagatagggaagatgaatagtaaaaaactcgagcttttgtgggacaaatcgctatccccttctaacgatgtccactgatgtatggaacagaaatatgtcatacagagtactataatggaatatctatgttatctaaactgaaatagaaattttgattattaattctaagagtataacactattgtgtatagtatcatgttaattgtatataaacgcactacattaaagaacaagtgtagggcagttgaaagacagaaagataatttttagttattgcaaacttaattggcaatgccaaactgactaattttcagtggatctcaggggcggatctacagtgttaggcaccgacgactttcagtaaaacctgtaacaaaactgctaatccatatgttataacaccatgatataagtataattagcatactatgacaccgatagacacgttatgacaccaacaaatcgattttctggatccgccactggtggatctacatattactgaaatatatttagcaattcggggacgatgaatattacagtgtaatccattctgaacctaaaaccaaattattactttttttttcgtcgttttcacttggatatcgtgtgtgtcggtttataagccgcagtcggaaaaaaaagcctataattgcagacatatccatgtctgaattcactgcatatatatgcagagctaatgacagatagatactatcccacgtctgaataattcagcacgaagcattttcacgcgtcgcatcggccgtcgcctacgtgttttacggtacagcgatggctggacgacggcaatctatcaaacctgcaaactgctttttatcgtctgcctgcagcagcttagcttcctgaacagccacaacaaggacgccctaacaaccgttgattccaagcgtcaatggggatttattcatgcatgcacatatttgtaagtgacagcatgattagatgattgctgcagatgattagatagcaggtcggtttatttgtgtgtgaggtcctctttttcttcagatgttcttttgtttccaaacatttaaccaagacagaggaaacgattaaataagtcgcaatatatttcaaagaaatttaatggcatattttgtttaaagctgatgggtgatcgatgaaactgagtttgtgataattatttaagggcataaacaaataaattaaatattagaaagttaaaaggttgattttaaaagtgttccttttgaaaatcgttctgtttgagagcttagaaagcatgccagtgataatcatcataattttacctcccgtgattaaaaaaaagataatttaatggtgccatatatacgactatatgtgataccattaatttatgaccgaacaaagttgttgttctacaactcttgtaacatttggaacggcaatgccttattgattttctagagtttgcaaaattgtactgcataattaattatttgaagaaattaaacactcgtcatacacatcgctcgaatggagtattgttcctagaatctgcagcaagcttagctaagtcttaatccaaaggaagacagtaacttgcaagctaagtactaaaagttagttaacctaatccacgacaaaaaatctttgtgcttgtttgactaaaaatcacatgagctgggtcaattacatccatacactttctcttgtcctcacattgtaccttcacttccatcgtcagatgtacattcaccgtcacattctaatcgtacaaggctacagataagtactgacaaaagtggctaacgtgtgtgcttaattagcagagacattatgaacaaatcaatgacctgatgactgtctgaaagtttcaggggagatgagatggatgacactgcaccagcttaattatagctttgatttttgtgctggactgatccgaaaaagcagagtcataaacttggactagctgaactcttttttgttcttaaatgaagctaatgaaacctggtcaatttgaaacctttaacaacagttcttgcactattctaatatgttgaagtgcaaagtttttcgcgttctcaaaaaataaaaaacagttcttgcattatattagctcaatagaatgtttcatgtgatgccaagagtagtttcagttatcgtcattgtcgacatacttttataagtatcagtttgattgataaattttaatcaattttcaatattggtaaatttattactgatagatatgtttcgaaaagaaattttattgacagcactatgcatgcactgcacatgcctttctaacaacacatttctttgaacttttcaacacagttcgattgctcgaaagttcagggaaatgaccctgtaaccactgcaataacttactgtcaatcatacaccatgcaatttctctcagaatcactgaattgctaccctttcaacagttttaattggtgagttaaaaggcctagatatgatcatgtgaccagcatatatgcgaagcaaccaaacattattcttctgaattcagatgccctataatcaaactgttgcagcagagacctgcttttgcaaaaggtcttaaagaagaacaaagaaacataaagtaaagcaaccttagatttttgtactggtatttcatctgcatgaaccaatgaatgtgtgcaagatgctgatctatgaaatgataagtggttacgagttcaattcggtgtctgccttttttctcatccatctatcgtgttgcagggtacataaattcttttcttcgtggggaaacaaacatgtgtaattaaatacgcacgcaccggtaggcagtttgttaagcatataggattatgattagatatacgtttgtgaatgtagtccttgtatttaatttttcttttcatgttgcagagtactttgcagccttttctgtagctaggttagatgacacaatcatggaggcaattatcaaattaatcgcgctgagtattttaattcagagatattgatgtgatctcagagtaacactagcaaacaaagggattatttatctacttcaaggatctttgctctcatttctggaaaaagggagatctttggaggtatttttagaagatgatttatatttcaatttattccaaccaaatatgaaggaagttaattaattaaacaagatatatttcagtcatgagatcctttctttttttttgtggtgtgcttaaatatatactcatttctatttttaatatataccattgtttagacaaacatttaatcattcgccttatccaatttttaacataaaacaatataagtaatgcttaaaaaatctttaatgatacatcaagttataacaaaataaataataattacataatttttaataaaatgaatgataaaacgtacttatcttaaaaagtcagtggtacaatatattaaaaactggagggagtatagggagtatgttctaactccgtattaacatgattttcataaaagagatgagcagataatcactagttaaatatatcgtagaaaacggttatgaacacaagagaagctacctccacaaggctgccaacacatccttctatctcattctcatccccttttttctcctgatcttcaacctaacacagcacctagctagtacttgcatgcacaccatcttcttctttactacacaactttgcagtttgtacacactatagctagtactagtactagtactacttaaactacatcattgtactgttaattaaatcatcatggtcattatcacttaagctcaaaacttaattgccaacacacatcatcagtagctagctagctacctttgtgctccaccattcttcatcctcaagctagatactagctaggtagctagctaattgccaccattgacaaagaaaaaaaaagccatctcaatcaaagctcccatatatatacacctctctcactcactcaatcacaatttcacaaacagctagctccatcaaattcattttgagcagtgtaccttctaattagcaaacgcatacacttttccctttgcaaattgcaaatctctctctctttaattaattggcttgaaaatttgtctctggtttggtttgatttgtctcagtgatcatatctctgaattaatctgtgtcttaatgagctcgagtggtggtaagggagaaggaggaggagggaagccgcagttgctgatgagctcgaggatcatgtcgtcgtcgtcggcggcggcggatcgcggcgccgcgggcggggcgtcgtcgttccgggtgtactacagcctcggcgccgccggcaccgtgccgttcgtctgggagtccaagcccggcacgcccaagagcaccgtcgtgccggcgtccgccgccgacggcggctacgccatgccgccgatctcgccgccgccgtcgtactcgtaccagtggtcgtcgtgcaactccgatcagccgccgccgccgtcgaaggccaagaagtgcaggaggaggctgtcgacgtcgtcgtcgtcgtgttcttgggcgtcgtcgggaggatggatgagctggctgacgagcttcaggcggcgacagcggtggctgccgccgtcgccggggaagacgacgtatcgccggcgctggctcgggcaggacggcggcgtggccgtcgacgacgtcgtcgtcgtccggcgatcgccgccgcggcgcgccgtgccgtgcttcggagcgggcaaagttcactggtgatcaaattgaattggtactgttcatcaaatcaaggttgttgattaattaattaagtgtacttttgtagctgtcacaagagtatagtgtggtgtttgtgctggaaatttttcatattttctaggttggattagtcttttccttcttctgagtttctggtagatttcatgcagtgtttggttgttaatttgggggatgaataattgtttctgtataagagtcgtttggacttttcggtcctatttgctaaagcttcgactcctagagtgaaactgtggatgggcctgaaccgtgctacacccctctagttctttttttatcattctaatccacttcattttttttaggtgaagctgaactatttgattgagctacagctcttgatgcagttagtgctgaagtcctgccaaacaggtctttcatgtatttagatagttcattaactaagaacatattttttaatgtcatatacaaattcccgatctctggatccaggatatgcacaaccatactctctctatccaaaaaaaaaccaacctagtattggatgggatgttttctagtcctatccaaattcgttggattaggaaacattccatccaattctaggttggctttttatgggacggagggagtaactattaagaggttctaacatgggttgagaactaactttaaaaaataaaaaaaaaaaccaagaagatcaagaatctatcaagcgtcataatgtttattactaaatctctatccatggttggtaaagactaaaagagctccctatatgtgcaataaaaacattaatatttattgttttaaggaaaaaatatttgttaattgaacaaaacgatcaaatttagagcccacacaatggtctccatggaatatgttcccttcatttagagaattctagcgttatggtggtttctcaaaaaggaaaaggacaatttgataagcacacgcataggtccagacacttaacttttgctaacaccacctactatttgcaacatttatgtggattgtttatgtatgacctttggtaatacttgttttattgtggaacatgacatcaagtccagggctggaattttccttcagatatatgtcagaaccatggttgttaaagacaagttgttttcatttgttttaaagaaatccacactggagttctgaagaagtatgtcttaagctagattaggaactagcaggttagaaaatatcatcaactgcagatacaaacaatgtgcacctttgaaaataataacattactctgccaaattggaaaaaaaatagaggaaacaaatgaccaaagtacttttcacaatgttattctggatggcataataaatgtgcacctctgatagctcctcacatctaatcatatccatcattgtgctcacctatgttatatttagtggtggaaatttaaagtttcaggttggatatatccctttccagagttcagatcttgcatgggcgacaggtatcattataatgatgagttcaggttgtttattttgcaggacatgcatgtcttccatgactggatgtgcatccttgtgaatctgtggggttttaattaattatctgggaaccacatggataacaaatactccataatatcatgtatagaatcgtgatttgtttttatagttctccataaattattttttgttcgagttgtttcatacctgaacagatgaagtcacttaattaggagtgccaacaacagctcgatgatttactgaagatgcttcccctatataaccatactattgcagtcaattcttatcatagtgtagtggatctctctcacaggggaaaaaaagagactttaataatatagaagtccataaactttttttaataggacaaacttgaaccttgatgtacatggatcgatgagatcttaagaatatttggcttgttgaaatctgaaactttcccctgttgtgttgatcaaagagtcaaaagtaatatgtttgggaattcattaagaatcagtacaagcaggttagaatttctggtcaatctctagcttcaaagaagcttcgatcgatttccacacatggttgttcagaaaaaggattagcaaaatgcaacatttggtgtgcccattgacacacaagagcagggtgatcattctttcatgcatctaactactatatctaactaatttcatctgaatgcagaacttagttagatgcaaaatttccatgcatgttcagataaaattacagcaggatcacctgcaaggaagcttttgatcttcagagttcttttttttcccctctttttcaccttgtcgatcggcctggtctctggctcgtgctgatctggatcactgctcctcgtcgtatatccctcgcgatctcatccaagatgacaacaagtgccatgacgaaaacgtagtcgacatgcgggaacacggtcacactgaacttgctcccaacgaatatcatgtctgaaagatcgctaaacttgcggtttatctgcacaaccaggagaaattaagctgtttatttcagagagagagagagagagagagagagagagagagagaaattgtggtaggcaagctagagtggtcagggtgatgcagggtttgcagttcccagtctggatttcaggggcaaaagaaaaagtttgcaggttttgcaaagaagtttatgaaacatcgagtgcataatttacacagaactgagatttgaacatgattatttttgctttcatttgggcatattctttgaacttcttttatgtgtctagtatatcttaggaacttcttgtcattgtacattatcaaaccaatcaatgtatagtacagggaaacaagaaacttcaagctaaaaaaataggatttctcatcatttgcttgttggcttatcttgaaagctaaaaaaataaactaaaataaagttatctagccgggaagaaaaatataaatgacaaagttacccctaatgaatatattaataaattactaatttatctttaataacgaatagatcatatcatttctactgacaatataatactatcagtagaaagtaccggaagatcactcaaaacttttactccctccgtcccaatataagtgcagccataattttccgtgcccaattttgaccgtccgtcttatttaaatttttttgtaaaaatttgagaacacaagtcacacataaagtattattcatgttttataatcttataaaaataaaaatactaattataaaaaaaaattcaaataagacggatgatcaaagttgagcacggaaactcatggttgcaattaaaatgggacaaaggagtaggtgatagaaagaaaaagcttaagtcggaagcttttccatttgttgatgattggaaagacaaaataaaaagacaaagtagaagtcagacttttcaatactcatgtttttcctgatcagggcagctgattggggaaaataatatccatgtcactttcaaacacatttcattatttagataactgaaataagatcatttggcattataaaaccccaaatcagattaaatttttggaatgaaacgccaccatatgcctgtttttcccctctacacaatttaattatgattgacctacagaaaccatgctgcaaatggcctatattcaactgaattttgatcagcaacacttggctctgcaacctgatctttaaacagaaaacattcactgctgtaagcagttatacaacatcgatcaatcttgaaggtaattacaaatcatggaacaccagcgaaaataaacataattcaaagaaaaatttacacacatcctcaaccagatagcaatacctagaacagaggtaatttgacagatatgaaagtgaaatttaaaagggtgcttgggatgagagtgcttccagttcatcactcctttctgtccctgtgaacatcatccagaatcgcaacaagagccgcgatgaacacgtagtcgacttgcgggaacacggtgatgctgaatacgtccctccccagcaccacacttgcagcggtgtgcttacggttcatctgcaggtattaggacatgcataacaaatctattaaagttttgttctgaacctccacaatgtgatgagagacataggcagtaaacttacttgagctatgattgtgtttgatttgccaaggtagaaggcagatgatctgtcacagtagctgcccttgatcttgaaatcgcagacttgctccgcggtattcccggccaagaagatatccatctccgtcttcatcaactggagcattgaggacttcttcacggtgaagagcttatcgcacgaatgtgcgctgtcccctctgtatacttcccatctgttgtgcatgctaagtatctgaaaattttgctgttcttaggtggatattcaattggggatcattctcaacttgctgaaatgtttgcttttgtaaaatactaaaaatgtgcaagaattgaatgccttgtgtggatttcaacatctaaagaacaggtcaagatcacaagaatcacgaaaatagtcaacgttccaattgaaattgtgacagtgattaattaggcagaaagaaagattcagttcaccaagacggcatcgattgccaaacgatccataatccaggcgcctttacgaagacacgaaattctaattaattcgatcctaatttccacgagctctctcttctcagcgaatttgaccacctttgtatcattctcaaaaggaagaagaaaaaattcaaggaatataaaaaccttctcatccaatcaatctccatgaaacgcgttgaccatgtgattaacatattaaaaaaaacacgaaatcagatcaagacgaaatcctctctctagctgttggtgtacttgaaaatactactccttggatttcttggattccctcgagtacttgatttcttggattcccctcctgaatccccgatcaagtctactaggtctagacaaatcaaaagaaaaaaagaaagaaatacttaattaattaccttctcttgcatggagaggagtggttggccgacggcgtcgtggaggacgcggcggtggcggacgctgaagagggtgcccttgacgttgaggacgacgttgtcgttggcgtcggtgacggtgaagtcgccgtcggtgaggctgatggacttcttggtcaccgtcagcggcaccacgtacggcgcgcagtactgcgggccaaccaccaccaccggctccgtcggccccgccgccatgggcgccggcgccggcagcatcggggccatcggattcatttttagttagattgtcggtgaatggaagagagagagggaaagagaggtggtggcgtcaggttaattagcttcctcgtgtgcgctactggttattagtactcgctccctccatatggagtatttcttttgacaaaattaaatcattaatcatgtgacaaaattaataaactatacacatgcatgtaactaacaaggattaagatagcttcttggattccaatcattttagtttagtcctataaatgagtcttagacttttgaaaaaaaaaacaaaaaaacaaaataggtcttgacttttggacgaagagagtaccacactgggaaaaacgtggacgtttaattttagttttcccttccgcatgattaggcatgcaagtgggtgcatatgtgcaatttacattaatttatgggaaaattgtaaaataccatcgtaaatatcgctgtaaggttgagattccaccctataaaatgattggatgtaaatactccctcctaattaattcacctttatttgatatcaccgggcctacgtaatacggtcatggcattcccactcatgactagggatgtaaacggaatctgtcggtcggaatttttcggaaacggaatcgaattcggaaatattttcttagaaatagaatcgaataccataagggcagtttccgtcggaactcggaatcggtcggaaattttccagaaattttctcggaatttccagaattatgaaggcccttaccatagtctataattcctccccagcccaacccaattcagcatcgtaattcctaagtcactcaatttagcccaacccaatacacccaattcaaacttgagaattgaacttgacataattgtgttttgagatgtaatgttgaaatttgagacttgagaattggatttgacatagtttaaaacttagtttgaggggtttttgtatttcgataaattttcgttactgtatcattgccggtccgttttcggtttcgacaatatttgatttcgttttcgtattcgaggtttttgattccaaaaaaaatatgaaaacaaaaacaataaaggtggttttcgtccattttcgtatcgttttcatccctactcatgacactcaacacgcgaacatcggtaatttgggaaggaatatcaaaccatgaattaggaggggtgggaggggggatattggcaacaaaacttctttacaaggaaaatctcaaattttgggtgacatttaggatggttatttaatattccttatttttatttggactgtccatcaagcatttgacataaaaccccctcagaaaacatgcgagttttggaccgtatgattattgtaagattcgtgtaacacaatctaaaccatatcacccctccctcctcactcccagccactatgggattgctcattcgctcgatccccttcctctcgctgtctagccttctaaccacaagcttgctttgtccctgctaccaacgctggatcacctccctcctccatccttacggcttcaacgcagccgcttgtggctcatcgctcgcccatatccactgcccaccgccacccatggctatccatctaagcttgactttctcggttcgagaagtgcattgttggaactggattggctctctcccgctctttcctcgcccccacctcccccaatctctaacccaacccgggatcctacatccctaactccaccacctttgtcggtgtcattggagccggcggacccggagaaaaagctaataccagagcatgaatctgtaagattttggcccaataattaatctatcgaatgccatttagcatttcactcatttatttgttatttatgagttatatctatgttactgtcaaattggataaagagtacacttgtagttaaattgagtgactctatattctatactctccccgctcaaaatattatgcgtattctgaccgtttaattttacattttagttaatgatttatttaatactatattcgttttaaaatatagtaccataatttagataaacccttgtccaaatatataaccagaaattattatattttacaacgcacatagtactccctccgtttcacaatgtaaatcatcctagcatttcccacattaacatcaatatgaatatagaatatagaatatctagattcattaacatcaatattaatatagaaaatgctagaatgacttacattgtgaaagtcattgtgaaacggaggaagtaatatttatgttttgccataaaattgatattgtcaaatttatgtcaaaactactttctcgtgactataattttacaatcgtaagcgaaaattgcgtaagagaaattacagtagacaaaactgaaataagaaagaaagaaagaaaataagatcatttaactacggagagtcatgtaacataatttagagcccacaagcagatcaaagtcacaaaggcaaaaactcctttgatccagacatccagtcacttcttctgtgtcccacattaattctcactgatggtggttagaagcagatccatctctctcagcctacagtagtaaacttttttcttcactgcgacaataattcgcagaataatctgttccaaacgtttgccaaaatcttcataagttcctatgtgtggagattatgggtaccccatacccacacggtatggttatccgactagttataggggataacttatatatatatgaaatatgtaacagatcatgacttgggtattacgtttccctgaatattatggaacggcctaaagtcctggtttgataagattgtaaagtagatttaggaaaccgataccgtattggttaaggtttctatcttgtaaccctgccccccaacctatataaggagggcagggagcccctctaggggcaggagacaacctgatcgtcagatcaatacacacccggcagattcaaatccccaaacaggagtagggtattacctctcattgagagggcctgaacctgtctaaatcctttgtctccacatccatccacttttaggtctcgtgcgctaccccgttttattattgccgaattcatgtttcgacagttggcgcgccaggtagggggtgcgtcgaattacctgtcgaaaagtgcgatggaatcaacttcagaagaaaccccgagatcaatctcatcaatttcgatggctcaaatctaaatcttcaatcgggtctaccgttccaatttaatctctattagattaatttttaatcattgtttgatttcctgatattttgacgaatttcatatactggatgagatcgaaacacggccatcatcgtcgcctacttgggtgcccttgccgtgtccgagtgctcctctcttcctttccttgcagatggacgtgttgcaggagtggcacaggccgccaggattcgattcctgtttgcatgtatgatggttgatgggctccgccggctacctccgatgatggcatcatgccgaaagaacatcgagttagctgttagttgccggggcttatacatgttgcatggcacgtcgccggctatcactcatgatccagcctcactgctcgacttgagtttttcgtttcaatttgttatcaatatatattagattgatttctaatctcagattaatttcttgctatttttttgttgttgttcgcatataactacgcggcactattgaggcgattgatgctggtcatggactcgaggcgtctcagctttccggtcgatcggccgcgagtccactccgccggcttgtcctcgccaccgccattgctgatagcaacaacgacttcaccaccggcctgcctccgtcgccgccgactggtgtccccgcctatacggttggttggtcacaccaccgttcatgggcgtctacgacttcaccgccggcttgcctccgtcgccgccgagtggtgcctccgcctacacggctggcctattatgccaccgctgttgggcgtctacgacttcatcgccggcctgcctccgtcgccgccgactggtgtcctcgcctatacggttggttggtcacaccaccgttcatgggcgtctacgacttcaccgccggcctgcctccgtcgccgccgactggtgtcctcgcctatacggttggttggtcacaccaccgttcatgggcgtctacgacttcaccgccggcctgcctccgtcgccgccgactggtgtttctgcctacacggctggcctattatgccaccgctgttgggcgtctacgacttcaccgccggcctgcctccgtcgccgccgactggtgtcctcgcctatacggttggttggtcacaccaccgttcatgggcgtctacgacttcaccgccggcctgcctccgtcgccgccgactggtgcctccgcctacacggctggcctattatgccgccgctgttgggcgtctacgacttcaccgccggcctgcctccgtcgccgccgagtggtgcctccgcctacacggctggcctattatgccgccgttgttggatgtctacgtcctcaccgttggctcaccttcgttgccgtcgactggtgtttccgcttacacggctgacctattatgccgccattagtgggcatcttcgctttcaccgtcgaccgccttcgtcgccgccgactggtgtcttcattgttattgatggacgactttgttcccacattggccacttctgccatcaccaaggggaatattacaaagctaagtcatcatttattttattctttatatgatatttttccttttcctctgcctcactacaccaattggtcttccattgagtagtgagtcgggggctacagatgttatatcatatttttcataatatttatcttgattgcttgcgacataatctgagtacaaaagtacctatcgagttatggagttctatcttcctatgctttccgtttggtttgccaatggatggttgcctttgggccgattcctagcacccgggggctcgttggatggaccgagtaacgcaaggtgctaagtattattcggaataaatcaaaaacatagagatgagataaatttattttctgctcttaataattgcaaaagtacccgagtagtaaactccgatccgtgaaactttgttccattaatgacgaactcatgtcactcatatgcatgtttgggaagtgcttaggccgactcccagtgctaggtggctatgactagtcgggcagagtgtttaaacgtaatgagtcatctgctcggggaaatcaaaattaacaagagaagaaatacgtatttataaactgcttgaatttttctcgagtattatatttacatcagatactactcatcctatatgtttgttctgcaggatccaaatccagatatgcataaaatggattcatggctttaagcttatctcttacgctccaggaatggatcagtcagaacatcaccaccggctcgccgtcgtcgccgccgactggtgtcttcgcctatacggttggttggtcacaacaccgttgtcaggcgtctacattttcaccactggtttgctttcgccgccgctgattggtgtcaccgcctacacggctggcctattatgccgccattgttgggcgtctacgtcttcaccgaccggcttgccttcgccgccgccgactggtgtttccgcctgcacggctggcctattatgccaccattgttgggcgtctacgtcttcaccgaccggccgcctcgtccgccgccgactggtgcttccgcctacacggctggcctattatgccgccgttgttgggcgtctacgtcgtcaccgaccggccacctcgaccgccgccgactggtgtttccgcctgcacggctggcctattatgctgccgttgttgggcgtctacgtcttcaccggccggccgccgcatccgccactgactgatgtcaccgctagcacggctggcctgttataacgccaactgatgctatcttcttcacggctggctacatcgctgtcactactaataggcatcagtatcttcaacacaagctgcctacgtttgccatggctgccgactggtttcttcacttccatggctgcatgattctgccagtgttgattggcctattatgccgctgttgttgggcatctacatcttcatcgccggtcgtctcgtctgctgctgactagtgcccttacctctacgtctggtttatacagctaccactactgatggacatcatcatcttccgtcgccgactgattatgctgccgccgattggtgcttttatcttcacaactacgcgtcttcactaccggtttgcttctgttgccgccgacttgtgttcacttcattacggcaatacaactttgtcatcatggtggagcgacttcatctttattatcttcggcaccggcaaactctattgctgctacttcgcaagttttactacttcaccaaccacgacgtctttgtgaacctcgacatctcggcatgcaatgccatgatattttactacaacaagtgactctccaatattcaggatttctacttggacaccttcaacacatatcttcaatcaagcaatgactactcgacgacaagaagctataattctcgactctatgttcagttgtttctcaactaaccaaagagtcgggggctacacaaatataaggctcaaaatttgacaaattttatgtcaagctgaagaaatcaattaatcagccaatgagtcaactccaggagtcattatcttcatctttgcttcggaacagacattctacttcaacaacttcaaatatttcggtttagacgagttgggcaacaacatcaactctcctccaattatttgtcttcacggttggcctactacgcaactgccgatagaggatctcatcgttatcatcggctgctacatcgctattgactggatcaccgacatcgtcatcttcatcaacatcttgtcaagcctcatcaacatagccaactctgctgccgttgatgggaaacttcgtcatcatagtcggctatctctgttgccgctaatcatcattaccgtcggatgcgtttgtcgccgccgattattttcttcatcttcatgattggtggatttcgccatcaccgttgatgcgcgtctacgtcttcatcgtcggtttgcttttgtcaccaccgactgttctttcgttgttgttgggcgcctacatcttcactgctagctgacctgactgttgccgactggtttcttcacctccatggttatgcaacttcattacatttgattggtggcatctttactaccactgacatcttccgttacttctgatgagcaatttcgtcttcatgttggtcatttcatctccatgccgactgcgtcagttattgccaatagacaattttgactatgacagaaggacaagctatatgctcaggggctcatcaactcaagcgtgaggattatatctccaatttggacttgttccggatacattccacatggattcatagtcatgagtctattttctatgctcaaagactggaccaattattattccccgtaagggctatcaaccgaatacttgcgccagtcgggattcaattattatatttattttggagtatcccataagggataatcattcagatcagaagctattcatatgagctacacttggtctatattacccggaagatttattactcgggagcatgttacacgcgtcatcctttaaagggtgtcgaaggcatattttttggcctaggcctaatatgtctgcagcccatattttcaggtgtggcctgtcacgttcttttagggacttaggcactttttgcttaggccaaagtgcgcgtgatcaagtgcccaataccttaaaatccttttataccgcagttactcaactttttaggagttggtacaatgcatcttaaaaggtgtcaaacagtaaagctttatatagctggcccgctgacttttttatatataagtcaaggtgctgtttgggtttttaagcaattgattagatacaatatcattgcttttcgccacgtaagtgtgtatttttattgaccaatattatggcttaggctgattatatattgtggtcatttttcaggcggttggtaaatcctttatgagtttatttacttggattttataccacatatgccatatatttccgggtgtggtgaaaccatgtgtcttttagggacttaagcacatctgttaaagcagtgtgcgcatggcgtatgcccaatactttggaaatttctttattcacaatatataagcttctttatagctgttttgctatgtgaattttcaatgatgtaaccaactttaggttacactcatcatattttacaaagcagtcggtatatcacttggatcatattattcagggattcacaccgcatatgctacatattaatattaagtcgcttggttgactacaattatcaaaaccactcggttggttagattatttattccttgattatatgtttggtttgttcaattaaccacatagtcgggggttacacctattaggtgcatctagtcgatgcatctgactttattttttcagccctccacagtcttctgatttggaaaaagtactcgggagatcatggcgaagatgattgaagcactcggctttggagtaatctagttcgagagaagattatctttccgactgtgaaggtctcaggggctactgtggagattatgggtaccccatacccacacggcatggttatccgactagttataggggataacttatatatatgaaatatgtaacagatcatgacttgggtattacgtttccctgaatattatggaacggcctaaagtcctggtttgataagattgtaaagtagatttaggaaaccgataccgtattggttaaggtttctatcttgtacccctgccccccaacctatataagaagggcagggagcccctctaggggcaggagacaacctgatcgtcagatcaatacacatccggcagattcaaatccccaaacaggagtagggtattacctctcattgagagggcctgaacctgtctaaatcctttgtctccacatccatccacttttaggtctcgtgcgctaccccgttttattattgccgaattcatgtttcgacagttgacttaggctccgaacatttgacttaggctgtgtttgaggagaatgagatagtgaagattgggaagatacgcaaaacgaggtgagtcattagtacatgattaattgaatattaactattttaaactttaaaaatggattaatgtgattttttaaagcaacttttctatagaaaatttttgcaaaaaaacataccgtttagtagtttgaaaagcgtgcgcgcggaaaacgagtgaaatctcccctatctctcctaaaagaacgcagccttagtatatataagagggttacaaactaggacaccaaaccaccaaagcagtgacatcagaaattttggcttgattgttaattcggcagtgagggagctttatcagtaatcaagagggtgaagaagcatgattgattaaaggaaaaacaactggttttaagcataacaactggttgtaatacatgaccgttcgcgggacctgagcaagttctgaccaggctcatgtgtatttttctacgcgttccgacttccgagtgcgatttcgagtgcgatttcgagtgcgatgtgtttacggagtcactgcttccatgtgattagtctaaggtaattaacacaattcctactcgtaactagtgcgtgattagtagtatcactcaagcatacgccgtgtttagttcactcccaacttttaactttccatcacatcagattatatccaaaactttcctacacacataaactcacaactttttttcaaactaccaattttcctcaaacttgcaattgtttttcaggaactaaacacagccatagtaggctatctagaataccgatttcagggtgcaagccctactaactcactgggccacgtggctaaacctagaagcaaagtttacgcatgtttaaaacgcgccacgtggccgtgtgtgattccaaggttcggttcttacccgcatccgttgattatgaatcaacggtagagaaggtttaaaggacgtaattgtcaaatttgatcttccaagggtttttagcataacaatatgtaatacgcgaacgttggcaggaccctagcaagttctgatcaggcgttcaggccaatgtgtatttttctacgcgttccaacttctgagtgcgattttgagtatgacgtgtttacggattcactgcttccatgtgattagtctaaggtaattaacgagtcctacgtaactagcatgtgattagtatcacaaagcatagtaggctatgcactcctaaagtcttggttatatttgaattaacttgcttttctaaataaaatatattattttcttacataagtatcaatttaaattttaaacttgccacacataatttttattcaagaaaataaaaaactttatacacgtaagctttgtacaagaaaatagtaaacttatatgcataaaatttttgtctcaataactttctatttagggtaaaaaaatacttcatacctaaattatattttttagacaataattttggttaaagttgaattgttaaatatatcaaaaaaattaagaagatataaaaggaaaacacatatccctatggaacaaacaaaatacaaaagtacatgctagaaatacctatgcaaagttgtgttgtactagtttcagttccatacaaattcaaacaacacacagaaaaaaattgtacaactccaattcgtcgcctctctttgtggcccataaagaaataaggcaaaatttgctacaggtcgaaaaaatgtgtaattagctcgtggacaccgcaagaacgagaatttgctgtcggatatcacaaaaaatgtgtaattagcttctggacactcggggccttattttattatttcctgtgaacttggagagagaaacactggtgaaagtacgattttgcccctgccctcacaccggccagagcaccgctgccacctcctccgcgcggcggccgacgcgacgagcgcattgggcagagggggagaaaggcgagcccgctctgcgctgcccgctgccgcgcccacgcaggccgccaacgcatgccatcgcatgcacatccgcgccaccgccgccagccaacgttgcgcatgccgccgccgccgccggcggcaacccgacgcacgcgcgcgccgctgccttcccccaactgcgccgccatgccggaagatgaggaagacgacagtgacaaggacgacaggaagtaggaggccgtggagctcgagatgctgcgcatcgaccgcgcgtggaagtccgtgaagccgacaagctccgccggtggccgccgtgggctgatgcaggtggagctgctccggcctgtggccgcggccgaggaggaggcatgctcttgtcgacgggaaccgagaagcactcttgtcgaaacaaattttcggcaatatgaaaagggggtagcgcacgagacctaaaagtggatggatgcggagacaaaggatttagacaggttcaggccctctcaatgagagataataccctactcctgtttggggatttgaatccaccgggtgtagtatagatctgacgatcatatgtctcatacccactagagggcctcctgcccaccttatataggatggggggcaggattacaagatagaaaccttaaccaacacggtatcggtttcctaaatctactttgcaatcttatcaaaccaggactttaggccgttccataatatacagggaaacgtaatacccaagtcatgatctgttacatattccatagatataagttatcccctataactagtcggataaccataccgtgtgggtatgggatacccataatctccacagtagcccctgagaccttcacagtcgaaaatataatcttctctcgaactagattactccaaagccgagtgcttcaatcatctttgccatggtctcccgagtacttttaccaaatatgaagactgtggagggctgaaaaataaagtcaggtgcatcgaatagatgcacttaataggtgtagcccccgactatgtgattagctgaacaaactaagcatataatcaaggaataaataatccaaccaactgagtggttttgataattgtaatcaaccaagtgacttgatatcaatatatagcatgtgcggtgtgaatcccccaaataacataatccaagtgatataccaactgctttataaaaattgatgcgagcaacctaaagttgacaacatctttgaaaattcacataacaaaacagctataaagaagagcttgatgttgtgaataaagaaatttccaaagtattgggcacacaccatgcgcacactgctttaacagatatgcttaaatccctagaagacacatggtttcaccacacatggaaatatatggcatatgtgatataaaatccgagtaaataaactcataaaggatttaccaaccgcctggaaaatgaccaagatatataatcagcctaagccataatattggtcaataaaaatgcacacttacgtggcaaaaaagcaatgatattatattcaatcaattgctttataaacccaaacagcgccatgactatgtaaaaaagtcagcggggcagctatataaagctttactgtttgacaccttttaagatgcattgtaccaactcctaaaaagttaagtaactgcggtataaaaggattttaaggtattggacacttgatcatgcgcactttggcctaagcaaaaagtgcctaagtccctaaaagaacgtgacaggccacacctgaaaatatgggctgcagacatattaggtctaggccaaaaaatatgccttcgacaccctttaaaggatgacgcatgtaacatgctcccgagtaataaatcttccggtgatatagaccaagtgtagctcatatgaatagcatctgatctgagtgattatcccttatgggatacttcaaaatagatataataattgaatcccgattggaataattattcggttgataacccttacagggaataataaatagtctagtatttgagcatagaaaatagacccatgatcatgaattcatgttgcatgtatccggaacaagtccaaattgaaggtatgatacttgtgtttgaactagtaaacccctgatcatatagcctgtccttctgtcgtagtcacaatggtccattgatggtagttgacgcagttggagacaagatgaccaatatagagataatattgcccactagaggtggcaaaaatattggtggtagtgaagatagtgataccaatcaaaaatactgaagtcgcatagccatggaggcaaagaaaccagtcggcggtagacagatcaactaacaatgaagatgaaggcgcccagcgataaagttgtgtagccatggcagcgaaataattagtcggtgacagacgaggcagatcaaaggcgatgacgaaatccaccaattatgaagatgaagaaaatagtcgacgacgacaaacgcaaccgacatgatgaagatgacgatgtcggtgatccagtcaatagcagtgtagcaaccaatgataatgacgaagacgctcatcagcatttgcatagtaggtcaaccgtgaaggtgaaataataagtcggtgaagacataatcatccattagcaacagcggagatgtcagggttgatgaagcagaggtgctggtgatgatgttagtgacaataatccatcaaagaggatgaatgtaaaacttaatgttataactgttgtagatgcttcacttggaggagagttgatgctgttgtccaactcgtttaatctgtgttaattggttgataactccaaactcctggtcatgtagataaaatctcaaacttgatactggaaaattttgaagtagattgtggcggcgtggagaagccaaaattgctagtgtaataattggagtcgctgaaattaaatgtctgttctgaagcgaagacaaaattgatgactcccagagttgactcgttggctgattaattgattaattcatcttgacataaagcttgtcgaattttgagccatgtatttgtgtagcccccgactctttggttagttgagaaacaactgaacatagagtcgagaattatagcttcttgtcgtcgagtagtcattgcttgattgaagatatgtgttaaagatgtccaagtagaaatcctgaatattggagagccacttgttgtagtaaaataacacggcatcgcatgccaagatgtcgaggtgcacaaagacgtcgtggttggtgaagtagcaaaacttgcgaagtagcaacaatagagtttgccggtgccgaagataataaagatgaagtcgctctaccatgatgacaaagttgcattgccgtgatgaagtgaacacgagtcagcggcaacagaagcaaaccggtagtgaagacgcgcagttgtgaagataaaagcaccagtcggcggcagacgtagacagtttgcgttgaagatgatgacggctattagcggtgacggcgacgtagccagccgtgaagaagatagcatcagttggcgtcataacaggccagctgtgcaggcggaaacaccagtcggtggtgtacgaggcagccggtcggtgatgacgtagacgcccaacaacggcggcataataggccagccgtgcaggaggaaacaccagttgtcggcggacgaggcggccggtcggtgaagacgtagacgcccaacaacggcggcataataggccagccgtgcaggcggagacaccagtcggtggcggcgaaggcaagccggtcggtgaagacgtagatgcccaacaacggtggtgtgaccaaacaaccgtataggcgaagacaccagtcggtggcaaagggaaaccggtcggtgaagacgtggacgcccatgaacggtggtgtgaccaaccaaccgtataggcgaggacaccagtcggctgcgacggaggcatgccggtgatgaagtcgtagacgcccaacaacggcggcatagtaggccagccgtgcaggcggaaacaccagtcggcggcggacgaggcggccggtcggtgaagacgtagatgcccaacaacggcggcataataggccagccgtgcaggcggaaacacgagtcggcggtgacgaaggcaagccggtcgatgaaggcgtagacgcccaacaacggcggcataataagccagccatgcaggcagagacaccagtcggtggcggcgaaggcaagccgatggtgatgttctgactgatccattcctagagcgtaagagataagcttaaagccatgaatcccttttatgcatatctggatttggatcctgcagaacaaacatataggatgagtagtatctgatgtaaatataatactcgagaaaaatgcaagtattttaaaatatttataaatatgtatttctcctcctgtcaattttgatttccccgagcagatgactcattacgtttaaacgctctgtccgactagtcatagcccccaagcaccgggagtcggcctaggcacttcccaaacatgcatatgagtgacatgagtttactactcgggtacttttgcaattgttaagagcagaaaataaattatattatctctatgcttttgatttcttccgagtaatacttagcaccttgcgttactcagtccatccaacgagcccccgggtgctaggaatcggcccaaaggcaactatccatcggcaaaccaaacggaaagcataggaagatagaactccataactcgataggcacttttgtacttagattatgtcgcaagcaatcaagataaatattatgaaaattattaaaaaatatgatataacatctgtagcccccgactcactagtcaacggcgaaccagttgatgtagtgaggcagaggaaaaggaaaatatcatataaagaaatttaacgatgacttagctttgtaatattccccttggtgatggcagaggtggccaatgtgggaacaaagttgtccatcaataacaatgaagacaccagtcggcggcgacgaaagcggtcgatggtgaaagcgaagatgcccaccaacggcggcataataggccagccatgtaggtagagactccagttggcggcggcaaaggcatgccagttggtgaagacgtggacgcccatgaacggtggtgtgaccgaccaaccttataagcgagaacaccagtcggcggcaacggaggcaggccagcggtgtagatggcgatgcccatcaacggtggtgtgaccaaccgaccatataggcggggacaccagtcggcggcgacggaggcaggccggcggtgtaatgacgatgcccatcaacggtggtgtgaccaaccgaccgtataggcggggacaccagtcggcggcgacggaggcaggccggcggtgtagatgacgatgcccatcaacggtggtgtgaccaaccgaccgtataggcgaggacaccagtcggcggcgacagaggcaggccggtggtgatgacgtagacgcccatcaacagcggcataataggccagctgtgaaggcgaaagcaccagtcggcggcagacgtggcggccggtcggtgaagacgtggatgcccaagaacggcggtgtgaccaaccaatcgtataggcgaggacaccagtcggcggcgacggaagtaggccagtcggtgaagacgtggacgcccatgaacagcggtgtgaccaaccaaccgtataggcgagatcactagtcggcggctacggaggcaagccgactgtgaagtcgtagacgcccaacaacggcggcataataggccagccgtgtaggcggagacaccagtcggccgtgacggtggcaagccggtggtgaagtcgtaaacgcccaacaacggcggcataataggccagccgtgtaggcggagacaccagtcggcggcgatggaggcaagccggcggtgaagtcgttgttgatatcagcaatggcggtggcgaggacaagccggcggagtggactcgcggccgattgaccggaaagctgagatgccttgagtccatgaccaacatcgttcgcctcagtagtgccgcgtaattatatgcgaacaacaacaaaaaatagcaagaaattaatctgagattagaaatcaatctaatatatattgattattgataacaaattgaaacgaaaaactcaagtcgagcagtgaggctggatcgtgagtgatagccggcgacgcgccatgcaacatgtataagccccggcagctaactgctaactcgatgttctttcggtatgacgccatcatcggaggtagccggcggagcacatcaaccgtcatacatggaaacaggaatcgaacggcacatgtgtacatgcaatagaaagcaattagtagattaattccagtctgcatatacgtgttgattaataaatcaacagatgcgtgtgtttaatttgctcctggcggcatgtgctactccagcaacacgtccaactgcaaggaaaggaagagaggagcactcggacacggcaagggcacccgagcaggcgacgatgatggccgtgtctcgatctcatcgagtatatgaaatgcatcaaaatatcaggaaatcaaacaacgattaaaaatcaatctaataaaaattagattggaacgataaacccgattaaagatttgagccgtcgaaattgatgagattgatctccgggcttcttctgaagttgattccatcgcacttttcgacaggtaattcgacgcaacccctacctggcgcgccaactgtcaaaacaaattttcggcaatatgaaaaggggggtagcgcacgagacctaaaagtggatgaatgcggagacaaaggatttagacaggttcaggctctctcaatgagaggtaataccctactcctgtttggggatttgaatccgccgggtgtagtatagatctgacgatcatatgtctcatgccccctagagggcctcctgcccaccttatataggatggggggcaggattacaagatagaaaccttaaccaacacggtatcggtttcctaaatctactttgcaatcttatcaaaccaggactttaggccgttccataatatacagggaaacgtaatacccaagtcatgatctgttccatattccatagatataagttatcccctataactagtcggataaccatgccgtgtgggtatggggtaccataatctccacaactctggtcgctggcgacgagcaccgccacgctatcgtgccgccgagccggctggaaagagttagctcagcgccatatgcgaaagggaattcacgagtatatgcatgtgctctctccctcccgatcaaaatgtcccctcctttttttttgtgatctctccatctctatatgcaaattgttgtttgatcctctcccttgcaattgcgaagcagctgccattgacacggcaggagaacgggacaccggcgttgaggctggcgaggagcagctccgtgatgtcacaactctccaccgtcgcccacgcgccgggcaccgtgttctccggtcgccggacattgtcatcgatgtcagtgtcgttaatcaacacgtgcattagctccacgccaaaggggtcggcggcggcgacgagcccacgcacgccggccacagcgcggagcatcccagcgatggccgccgccgctcggacccatcacagggacaacacaagcgcattgtcgtcggcgtcggtgtcgtcagtcaacacgtccgttagctccacgccaaaggggtcgtcggcggcgacgaggccacgcacgccggccataacgcggagcatcccggcgatggccgccgccgcttggacccatcacagggacagaacacaagcgctgcacgtgttcggctccgtcgccgccgctggccaacccaatgttttgtcactatccaggtcgagacccaagggcaaagttgtctttatttagtgtttctctctccaaattcacataaaataataaaataaggctccgagtgtccaggagctaattacacatttttttatacctgttagcaaattctggttcttgcagtgtccacaagctaattacacgttttttcgatgccctatagcaaattttgccaagaaataaataggctgagcccacaagctaaaccactccaacaactccacgcacaccatcatgttgtgcgacaaccgaggacaagaacactaccaaaaacgaaaagttcttttgtcccgacagatttgcgtgatctatagttggcaaatgttcagcacctaggctgagtttactttcaaattttttcttcaaactctcaacttttccatcacatcaaaactttcttacacacataaatttctaacttttctgtcacatatttcaatttcaatcaaacttctaattttggtgtgaactaaactactatattttttttttgggcgggggtctaatacgtaggcagccccgtccacgatcacatccgcttaccaagcacgtgcgcagcaagtaccagtaactggtgtgttcggatgccatttttcccagtccctctctctcgtttttcgtgcgcatgcttttcaaactgctaaacggtatggcttttgtaaaaagtttttatacaaaagttgcttaaaaaaatcaaattaatctatttttgaaaaaaaattagtaaatacttaattaatcacgtgttaatgggccgccccgttttccgtatgcaccgatgtaggctgtgtttagttcacccccaacttccaactttccatcacatcacatccaaaacttttctacacacataaacttttaactttttttccaaacttttaactttccctaaactttcaacttttttcaggaactaaacgcagccatagttggtccaatatgtataacaagaaaattcatgtagtcccatgtttaattcagatgtatttcctttttctccaggccttgaatccaatgagcattgtatcagtgtattgacccaacccaacaaattaatctacccatagactctatacgtagataatttgtaaaaaaaaacattgtgtgccgaaactttgtacatgtttatctatggatctatatctatatgtaaaaatatgtagaaatttatatatagaaaatgtattcctagatatatagacttgatacaaagatagtttataagcataaattctatacaaggaaacgtttatacactttatacatagctactttttacatatacgcataaaacctttatacatgtaaatttgtgcatataaactttctgtgaataaatttgaaacacattctaaaacaatttgaaaaaagggaccatatacctaggccctagatgctttcaccattcaatttctagcccgctccaagagaagggaaggggttagagggaagcccaaaacaagaagaaatatgcccacggaaaaaaaaacaacaggaatgatatctcgcgcatatgcgcccgcatcgcacactccggcctatccgacacataagtgttagaggtggaaaaacttggtcaaaacacttgttcctcttccctagttccgctatttccatttgacgattgataaggcggctcgccgtggtccatcaatctcttgctctggcgcccaacagtccttcaccatctccagccaccctccatccctttccatctcaccggcatctggccatccctgtctcctgccgccctccatccctccccatctgctttctccgtccaagtggcggcacctctagctcctcaaaatctagcatgtgggtagcgatttcagccatcactccattgccaccatgtggcgcatcaagttcgtactgctccggaagatgtcaaccgtccagttcttacaaggagaagaatgatttcggtatgaaagatttaggttttatgaatcgaatttgtttgagatgacatttttgtcgacgtttgatgtcgcgattccggtatttgcatagtatggggatcgttggtgctaggatatacgcgagactaaggtaaaagagacggagacgaggatttttatacaggttcgggcccctgaattgtcaggtaataaccctacatcctgttggccgaagccggtcattgttcttattcatcataatcacaccagtacaatatttggggtagcctatctaactgttgtcgatatggcggtctgaagttctgactcatagtcgacaacagggtagtcttcctcatcgaatccatgcccggcgagatcaaagatagcgctttcgtctctcctgacagtatccggagacaccgtaagggactagccatgcttatccctgaagtcgatatcaggcgtcttttcttggcgtatgttggcttgtatgttgatcttgcgtctggatatattgttctgtgtatgttgattcttctcctctcctcctagggggccttgtatttatacccataggtgtccccttgtcgaagtagaactagggaaaccaatatgaatacaatccgagtaatccttgtcgtttccatgtagaactttggttgtctttccttatccggaactccctccgtatctgaagtcagtttccgtataagacatggtatgtggtgggtcctgccgagatgtagtcgactactattaggtatgtggtatccataaccctgacagtagcccccgacttcaatgcaaatgaaattcatattctcagccgcagaccttggagtaactgttatcgagctcacgtgatcgatctcggtgagttcagagataatgttagacttcctttatcagcctcgtgcggacacctaaaaggtttgtctgagtcaatctccgacgtcaaccaagaaagtacagagcatacgactaagtctcccgttttgctataatcgagaatttggattgaagtcaagaaattttatctcggcgggtacaccatctcttcattccgaattccttgtcgagatccaccaaccgttctcgagcgatcaagaaggcgtagaatcttcgacgaagccttgtcaacatttgtcgtactcgccttagtcgatcttggtgtagaaccatagagacgtgaagtcttcgacaatgtcgaatagaattttcctgaaatcaacactcagaaaagaacattagatagaaatagcccccgagcgaatgctcaaagggtaacatgttataatatgtatggaaaactgaaaatgaattaaatttaccgaccaatgttttgtatacgagcgtcttctcttttactgacttcgaacagtcagtttgttgagtcatacactctccctagcccctagccttgttgtcggagaatctttctcggaggataaggctcttggacccttgacctgccttggttgaacaagcactgatcctagccctcagccgtgaagttggaaaactcaatttccgattacatggcttggttaatacgcacggcgagaactattacacgaccagatcttacatggtcttttgtctctacaggatccgacaaggccttatcggctctgggcgtccccagccgaagttcccttaggttccttggaagccttgtcaagacggcgtaaagggacagtaggataggtttcaacgctaggtgtcatcgtggtaagggatctctgggtaaaacacttggcgatattgtgtacctgatatcaactttgttggagtagaggtagtgggagaatcgctacacctctggtcggggaccaggtagtagtagtaactcgaccacttaaaatggaaatagtgggagaatcgctacaccactggtggagaaccaggtagtagtcgtaactcgaccacttaaaggggaattagtgggagaatcgctacactgctagtcgagaaccaggtagtagtcgtcactcgaccacttaaagtggaaatagtgggagaatcgctacaccgctggtggagaaccaggtagtagtcgtaactcgaccacttaaagtggaaatagtgggagaatcgctacactaccggtcgaggaccaggtagtagtcgtaattcgaccacttaaagtggaaatagtgggagaatcgctacactgctggtcgagaaccaggtagtagtcgtaactcgaccactagaagtaaggcgagagaaatcactacgttctactggtttgagaaccaggagtaggagtctcttaatcacctataggggtgctaaagttggtttgttacatgtgcatctcatgtggcgagcatgactcacatacctaacttatagcatatctggatgtcagctcgtaatcatgtcgggtgatcaagccgacaacgttcacgagaatttatagcccagccatggtcggcgctatgagataggtcgtcggtcttcgttggtaggttgggtgcgacaattccgcatttgtcgagaatgttctcgataatggggtgtattcgaccacaacctactcgagtgctcaattgttcctaaaaaatattttctagaaggcaagatatatagcagagaatatcgagtatgtactcagaaaactgcatgaatcttctaatattatcaggatataacgagcagattaaatatcagggattatgtaggccgtaaacaagcatgatttatacagaagaaaatagagcgagcccccagtattagaccgtagtcagcctaatatcggaaacactcgcacaataaatattgtataaaaacacgctctaggtaaacataataaattattgatctgacaatattgtatagatcggaaaagtaggtacgataaattatatatttatatgccggatatatctacgaaattagtagattaatttacgaaatcaatctactaaataccttactgtgcatgcttggtgaggaacagcaactccttgatatgcttctgcgtgcatggtactgtcccccgtctaagcaccttgtattttggttctttaattgatccgtttgccacgtcatcggaacaaacaaccagggtgctgcctagagattggatcctagtgcaaacgtgagaatttacaccaatgatcgaacagatccacgccggattggatctagctccccggtgctcgttttgctggtggagattgatgtcgagttctcgactcagccagccgattcctcgcacaggtcgatgccgcacacgtggaggaatcggtattgcattgctcttggatgctgccgacacagtagctctcctcgacgacgatggttccgattccgtcgggggacgtactccagtcgggttagatctccccacagtcaaagtcgtcgagtagcttgttgttgaagaatccatcttttaaacccatctcgtcgaaaccttgaagcaccaaaagatcccctacctggcgcgccactgtcgacgtttgatgtcgcgattccggtatttgcatagtatgggaatcgttggtgctaggatatacgtgagactgaggtaaaagagacggagacgaggatttttatacaggttcgggcccctgaattgtcaaataataaccctacatcctgttagccgcagccggtcattgttcttatttatcataatcacaccaatacaatatttggggtagcctatctaactgttgtcgatatggcggtctgaagttctgactcatagtcgacaacagggtagtcttcctcatcgactccgtgcccggcgagatcagagatagcgcttttgtttctcctgacagtatccggagacaccgtatgggactagccgtgcttatccctgaagtcgatatccggcgtcttgtcttggcgtatgctggcttgtatgttgatattgcgtcttgatctattgttctgtgtatgttgattcttctcctctcttcctagggggccttgtatttatacccataggtgtctccttgtccaagtagaactagagaaaccaatatggataaaattcgagtagtccttgtcgtttccatgtagaactctggttgtctttccttgtccggaactccctccatatctgaagtcagtttccgtttaagacatggtatgtggtgggtcttgccgagatgtagtcgactactattaggtatgtggtatccataaccctgacaattttcatatttgaaactaaaagttttgttcttttagatgcaagttttatatctttcaactgaaagttttgtgatctagagatgaagttctggagttcaattaaaagattttttttatttgagatgaagtttttatatcttgatttgaaagtttttgcggtttaggatggaagtttacattttcaaattggaagtttttgtgattttaagattaaagtttgtggaacaaatgaaagtactgagacctgaaaatttttaaatcggggtctgatttctagcgtgagcaggaggtgtggcgcaaaaaaggttgcggttagatctaggggtgaaaagttttggcgtgtcacatcggacatacggacacatatttggacacacatttgaagtattaaacgtagactaataacaaaacaaattacagattccgcctgtaaactgcgagatgaatttattaaacctaattaatccgtcattagcaaatgtttactgtagcaccacattgtcaaatcatggagcaattaggcttagaatatttgtatcgtaatttacacgcaatctatgtaattaatttttttacctatatttaatttaatactccatgcatgtgtccaaatatttgatggaagagaatgaaatttttttgggtgggaaataaaccgggcagaagaatcggcgaggcaggtgcatgcgtgtgtgacttgagtacctagcgtacttgcgccaacttgtcatccgcaacaaacacagggaaaagagtattccgcagcaacccataaaagccaaggggcctgatcacgcgcttggcccccacattcagggttggacctatatttgcctatttggcatgcctttgatgtgtgttttggtaaagtctatttatacttttatactcccatgataaaataaaactaaaaacttgcaatttatcaaattatttgcgatttttccggatcaaccttgttgactacaaaataaacttgctctttatcaaaaactttcaggccagccttgttgattacaagggaaaagaaaaatggcatactccctcacattattcatggcctaaaaacatcgtcaatggttcgtattgtactgcatcacaaataacattatgcgacgacacaatttcacaaaactacgggaaaatgcaattgatggagtgaacatgtcatgtacatctattatatccgtattaaaatataaggcaaaatttgctacatgacacttaaaaaaaatgtaattagctagaagacaccataaagacgtgaatttgtccgaagacacttcaaaagtgtgataatttgctgtaggacaccagacgcattaaaatataatatccaccctaatgatgaaatagaaaccacataaaatgacaattttgcccttattatcttcttctcccttctcccagttttcttccgatgctcactcctagcaaggtccatcggtttgcccatggcggacagcaggctagcctcgagccgccacgcggctagctgatcgcgccgccgatgatgatggtgccacccgtgccagctgtgcaaggcgtcgtcgtgctgtccatctagccggcgcccgccggcttgcgtcgttgtgccgtctatctcgccggcgcccgctgacttcctgtgatgctacagctacaacccggcaacccggtgtacaagtagtcctcatactacggcgacggttgcggctacggctacggcggcggcggcgcgtgccgctgcggctcgtgcgccggtggcaacaagccgatggtcggtgtgtactacggagtggcctcggtgacggcgtcgtacgaccaccagggatggtactacggcaactagcagccgtactaccaacagcagcaatgctacgaggtccctaacgccggatgcagcatcatgtgatgtgtgtcggcaggcgccatcggcatagatgggagcaatcagtgcgtgtggtcattctcgctcacactcactcatcactagctcatggccagtgttaaaaaaatctttcttttttttttgtcgatgccccttctctgtttatttagggtgttgagttgtgtatgtgaacagttgagttgtgtggagattatgggtaccccatactcacacggcgtggttatccgactagttataggggataacttatatctatgaaatatgtaacggatcatgacttaggtattacgtttccctgtatattatggaacggcctaaagccctggtttgataagattgtaaagtagatttagaaaaccgataccgtattggttaaggtttctatcttgtaatcatgccccctatcctatataaggtgggcagaggccctctagggagcatgagacaactagatcgtcagatctatactacactcggcggattcaaatccccaaacaggagtaaggtattacctctcattgagagggcctgaacctgtctaaatccttgtctctgtatccatccacttttaggtctcatgcgctaccctttttattattgccgaattcatgtttcgacagttggcgcgccaggtaggagtgcgtcgagtttcctatcaagaagtatgatggattcaactttaggaagaaacgtcgagatcaatcttattgatttcaatggcccaaatctttaatcgggttggtcgttccaatctaagttttatcagattaatttctaattgtgatttgctcttatggtgttttcttgctcttcatgtgatggtcggccgagatcaaagtgcagctgttagcggcgccctcgtacatagaggttttattcactcgcgagtcaaacgccgaagcagcgccgacggacgtcgccaccacgggcatgggagcagccgcccacactttaccaggagaaattacacgcatgagttgatccgccgatcaacacacgcatcgttaatttaattaatcgtgcatgcaccatgcatatatactcctgatgttaaccagattaatctatctgtttacatgcatgtatttttctgggcctgtgaccacgcgtgaacggggccgtggcacttcgtcgccccgagtccgtttcccatatcgtctgaagccaccgagttggatttgatccaatctcggttctgcgatctgtacgcgcgcacggcaggagcatgaattggaaccgctgcaagccgctgtacgtcaagcagccgtccacgctgaggacgcgcgagaccaccggctgacagccgccgcacacgacctcgcgcgatttcgcgtggtctggcatgatcaggccgtccgtcttggttgcatgtaatccaaggcatgcaactaactattggtctacatgcatgacatgaccaatgattatctgggagcaagcaaacactccatgcattatttgactttgcatctacgtatatacatatgtatttaattcattgatgctgctgaaattgtttcccctttttgtttgcacgtacactcggggaacggcgccgcatgcccgggggcttcatccattgcgtggctgacgcggcccgactacacccgtggcgcgtgcatccggggcatcccgccacatgctcgggggtctcaccaacaggccgcctcgtctgtcgccgactggtgtctccgcctatacggctggcctattatgccgccgttcataggcgttcacgtcttcacagaccggcttgccttcaccactgccgactggtgtttccgcctacacggctagcccattatgtcgccgctgttgggcgcctacgacttcgccgccggcctgcctccgcagccgccgactggtgttttcgcctgcacggctggcctattatgccgccgttcttgggcattcacgtcttcaccgaccggcttgccttcgccgccgccgactggtgtctccacgtacatggctggcctattatgccgccgttggtgggcatctacgacttcaccgccggcctgcctccgcagccgccaactgttttttcgcctgcacggctggcctattatgccgccgttcatgggtgttcacgtcttcaccgaccggcttgccttcgccgccgccgactggtgtctccgcgtacatggctggcctattatgccgctgctggtgggcgtctacgacttcaccgccggcctgcctccgcagccgccaactgttgttttcgcctgcacggctggcctattatgctgccgttcatgggtgttcacgtcttcaccgaccagcttgccttcgccgccgccgactggtgtctccgcctgcacggctggcctattatgccgccgttgttgggcgtctacgtcttcaccgaccggccgcctcgtccgccgacgactggtgtttcctcctgcacggctggcctattatgccgccgttgttgggcgtctacatcatcaccgaccggctgcctcgtacaccaccgactggtgtttccgcctgcacagctggcctgttatgacgccaactgatgctatcttcttcacggctggcctattatgccgccgttggtgggcatcttcgctttcaccatcgaccgccttcgtcgctgccgactggtgtcttcattgttattgatggatgactttgttcccacattggtcacctctgccatcaccaaggggaatattacaaagctaagtcattattgtttttttctttatatgatattttccttttcctctgcctcactacatcaattggttctctattgagtagcgagtcgggggctacatatgttatatcgcattttttcaacgaatttcataatatttatcttgattgcttgtgatataatctgagtacaaaagtgcctatcgagttatggagttctatcttcctatgctttccgtttggtttgtcgatggatagttgcctttgggctgattcctagcacccgggggctcgttgaatggaccgagtaacgcaatgtgctaagtattattcggaataaatcaaaagcatagagataagatgaatctattttctgctcttaacaattgcaaaagtacctaagtagtaaactccgatccgtgaaactttgtttcactaatgacgacttccagtgcttgggggctatgactagtcgggcagagtgtttaaacgtaaggagtcatttgctcgaggaaatcaaaattgacaagaggagaaatatatatttataaacattttaaaatacctgaattttcctcgagtattatatttacatcagatagtactcatcctatatgattgttctgtaggatccagatccagatatgcataaaagggattcatggctttaagcttatcccctacgctccaggaatggatcagtcagaacatcaccgccggcttgccttcgccgccgccgactggtgtcttcgcctacacggttggttggtcacaccaccgttgttgggcgtctacgtcttcaccaccggcttgccttcgccgctgccgactggtgtctccgcctgcacagctggcctattatgccgctgttattgggcgtctacgtcttcttcgaccggccgcttcgtccgccgccgactagtgtcttcgtctatacggttggttggtcacaccatcgttgttgggcgtctacgtcttcaccgccggcttgcctttgccgccgccgaatagtgtctccgcttgcacgactggcctattatgccgccgttgttgggcgtctacgtcttcaccaccggtttgccttcgccgctgctgactggtgtctccgccttcacgactggcctattatgccgccgttgttggacgtctacatattcaccgaccggccgcctcgtatgacgccaactggtgctattgtcttcacggctggccacgtcgccgccgccactgctaataggcgtcatcattttcaatgcaagctgtctacgtctgctgctgattggtttcctcacttccatgactgcatgattctgccagtgttggttgaccttatcgttttcactgccggtcgtctcgtctgctgctgactagtgctctcacttctacggctgccgactggagtatctatcttcacgactacacgtcttcgccaccggttttcttctgttgccgccgactcgtgctcacttcgtcacggctatgcaactttgtcaccatgaattctactcggacatcttcaatacgcatcttcactcaagcaatggctactcgacgacaagctacagttctcgacttcagttatttcccaactaaccaaagagtcgggggctacacaaatacaagactcaaaattcgacagatgttatgtcaacatgaagcaatcaattaatcaaccaacgaattctatggaatctacttcgggagtcatcagcttcgtcctcgctccaaagcagtctcagcaattccaattattttactggcaattttggcttctcaacgctgtcataatctactccaaaaatctcaagtatcaagttcaagatttaatctatatgttcggaagtttggagttcaatcaattaactcagattcaatgagttggacgacatcatctattttcctccaagtgaagcttctgcaaaagctataacaccaaattctactgctatctttataaatcaaggggcattgcatcaatctttgctatgcacacgctcgcaccaaggaaactactcgagcttcgatatcttcttagcagtttgatggatttttatcactgacatcatcaccagctcctctacttcatcggcctgacatttctgttgttgctaatggatgattatgtcttcgccgacttattatttcaccttcatggttgacctactatgcaaacactgatgagcgtcttcgtcattttcatcggctgttacaccgctattgactggatcgccgacatcgtcatcttcatcaacatcctgtcaagcctcttcaacatagcctactctgctgccgttgataggcaacttcgtcatcatagccggctatctctgttgtcgctaatcatcattaccgttggatgcgtttgccgtcgccgactattttcttcatcttcatcattggtggatttcgccatcaccgttgatgcgcgtctacgtcttcatcgtcggcttgctttcgtcgccaccgactgctctgtcattgttgttgggcgccttcatcttcactgctagctgacctgactgctgccgactggtttcttcacctccatggctgtgcaatttcatcacttttgattggtatcactatcttcactaccaccaatatttttgccacctctagtgggcaatattatctctatattggtcgtcttgtctctatgccaactgcgtcagctaccatcaatggacaattgtgactacgacagaaggacaatctatatgcttaggggcttactagctcaaacacaagtatgatacattcaatttagacttgttccggatacatgcaacatgaattcttgatcatgggtctattttctatgctcaaagactggactatttattattccccgtaagggttatcaaccgaatacttgcgctagtcgggattcaattgttatatctattttggagtatcccataaaggataatcgctcagatcagaagctattcatataagctacacttggtctatatcccccggaagatttattactcgggagcatgatacatgcctcatcctttaaagggtgtcgaaggcatattttttggcctaggcctaatatgtctgtagcccatatttttaactatgtatatatttcacctacatagtcagaaattctacaagacagagtgattaattagttactatatcaaaataaatacgagagaacgggttttggcgctcgtacatatatgaggggtgattttttttttaggggtgcgctcgtacatatatgatgctaagtattcattgtatagagcttgtttgttttgttatagaaacttaaccatccccgtcaaaatctgacgatactaaaatttggcatattttgatattaaccttatcaaatcttggcatggttctttactagcttttaagggtggaaatttttgaaattttagtagggtgacaacggtaataatatatttggtttgttgatttctattaaaacttgataatcatcaatatttattaaggctaaaaattgacaacaaaacgaaccagggcttacaaacatactcccatacattttgtgtgtgttttcatctcatctctctcgtttttcccgtgtacgctttttaaactattgaatgatatattttttttcaaaaaatttatatagcaaagttacttttaaaaaatcatattaatatatttttcaagttagttttagctaatacttaattaattatatgctaatgagttgatctctttttcatgctagagggggaaggtttccaatcaacacaaacgaaagcagcctaaagttactataagttcacaccatgctttgaatattcttcgctcccttcaccagagagatggaatatcatccacaaatgataaaaataacattatcatcgtttcacttatgtttatcatgccattcgcactgcatattagcttaaaaaaatacaaataaaacttcggaatcgctagaattgtgtcaacacaatttctcctccgtcacggtcagtgttcgatttcgttgtcccgtgccagtgtgatcctgttcgtgcatattgccgtggcaactgacgttgcggctgtgataacatgattaattaaatggaattgctaaacatcagtcgacaaaaaacatacctctaaatcttgcaaattttggttcactagatgtgcttcgcgattcgtgctctagctgcttcttctccaactccgacgaactcttccttttcttcttcgacgccggcgacaacccaaactctggcgaaggccgacgaattagggttctggggtggggaggggagggggaagaagggggagttcgccgagcttagagggatggtcgtgggaggcggcggcctggtggtgggcggcggaacgggcggccggcgaggcatcggtggcgccggagctgcggggatggaggaggccggtgggccggtgttggtggcgggggcatagcgagtttgtgtcttgtggtggccgacggtgccagatctggcggcgaggagtcaccggagacgaggaagatgacgaggcgaggggggagggggaggaggccggccagccggcgaggccgggcggcggtacgctggggcggcggcggaggcggcgcgcgctcgcgctagggagagcggcggcgtgaccgcgtgaggaggaaacgggagaggaggcggtgctttagggattggttggttgcacgaatcttaaagcaatcagatggtctaaaatttacaagatttctatgggggttttctgtcaaatgatctctagacagccccttaattaaaacttagcatcttcattgtttcaaacttatgatggttttacacgcatgcattctattctttatacaaatttacgctgtagttacaccctacttctatcccacttacacaccacttacacatgtaattttgagacttacatacacactacttacacatgtaattactatgtaattttgagacttacatacataattttgaatcttacattataaatacactaaatttacatatgtaatttaggtacttacaatgtaaatatatgctgactatttttttaaaaaaaatatgacgtcatgaatatgctactcccataaaactttatataaacgtcgttagctatttaaaatacatattgtaaaataaaatatgaaaaaatactataaaataaactttaaattttgagttttaaaatttaaaatttacagaatgttataagcacgagcatagctgaaacgataaggcactttacagcttagcggctggactgactgacagctatcccaaaccggcaaaaatccccacgtgggccgggctaactccctccctggaatcctctcgtcgtcgtcgtcgccgccgattccctcgcaccaatccacacaccgccgccgccgccgtctcctctcccttccatttcagccaccaaccccggctagctccacctcgtcgtgcgccaactgcgagcgagggagtggagtgactccggaagccaagcgcggcgagagggatggagggggcggcgccgcttctggcggcgcgtggggaggaggaggtggtggagggaaggcggcgcggggaaggggccgggcgacgtcggcgcaaacgctggggaacgtggtggtgtccatcgtggggaccggggtgctcggcctcccctacgcgttccgcaccgccggctgggtcgccggctcgctcggcgtcgccgccgccggatgcgccacgctctactgcatgctcctcctcgtgagttgcctcaccaccaccaccaccaccaccactactactacttcagtagacttcttcccctttttgcttgattctgtttgtctctgtttgttaatcgaatctctctctctgtttttttttgggtgggggagggaaatggtgttgtgctgtaatcaatcaaaaactctggaactgaaagtataataattgttggttgttgcaattatagtgctagctgtcgcagtcaatcagcgcgtactctggttttggattagcatgcatttttagatgaggttactatgcccaatttttgtttcatttgacatcgcaaatttggttccaataaacacagaagtatctcctattcatagtgattcagtagaaattggaggacctcaaaaccaaagtaaggggcgccagtatatgtatgtcttatcatcatgattcttctctctccatattctattatacttatgtattatttgattttcgtttagcatgttgatctagttcaactgggttttttaatgtgaaatcaaagtgtctataatgttcctttcagtcttgcttaacattgcctggtagaattttgattgtaacatcaataaattataaacaggatgcgtaagtctacaatgttctttctaccttgtgttgaatttggtttaacataagtgaattaaacaggatctgtaattgtaaacgctagtttcataactttattacctgcttcatcttcttacgaaaattacttgcttttctttttcaacatgaaggttgactgcagagataaattggaagagaaagaatctgaagaaacctaccatggtcactatacatatggtgatttgggtgaaaagtgttttggcactataggtcgatgcttgacagaaatcctcatccttgtttcccaagcaggtggatctgtagcttatctaatattcattggccaaaatcttcattctgtcttcagccagttgatgtcaccagctgccttcatctttgccattctcctgcctatgcaaatcgctctatcattcatccgttcactatcttctctctccccattcagcatatttgcagacgtctgcaatgttcttgctatggcaattgttatcaaagaggatcttcagctttttgatcacccatttgcgaatagaagtgctttcaatggactttgggcgataccattcacttttggagttgcggtcttctgcttcgaaggattcagtatgactttggcactagaatcatcaatggcagaacggagaaaattccgctgggtactttctcaagcagttgtcggtatcataattgtctatgcatgttttggagtttgtggttacttagcctatggggaggccactaaagacatcataacacttaatcttcccaatagttggtcttctgctgccgttaaggttagtgcactagtcataatttatttgatgttgtttcttttgaagtaaatgtcagcatgtactttgtgcggttgcaacttgagacttcattattttatatttggagatatgaatataagatcatgaactacctgacagattttgcctgagatctgctgtttggaaattaaaatatttgggtcactttcatcaaattggacttaaaaaatagcaattagcactgatttaggtatgtaatggatcctgacagtttgaaaatctgctgacaggttggtctttgcatagcactggtattcacatttccagtcatgatgcacccaatccacgagattgtcgaggaaagattccaatcaagtggatgtttcccgaagctctcgcacaaggttcgcggggctgaatgggtgggcctgcactcaagccgcatcgtcatggtaactatcctgtctgtggtggcatccttcatacctgcgttcgggtccttcatctcctttgtcgggagcacggtttgcgcgctgctctccttcgtgctgcctacgatcttccatctgagcattgtgggttcctcgatgagtccgtggcgacgctggggggactacggtttccttctcttcggccttggttttgcgggctacgggctcattagggctctcttctcacattgactgatgatccaaatggcaaagaaccacaatgcaggattcaactgcagaatatgtccaatctgggaagtgggaacgaaggcattgagatgagatgtatttactgcctttgttgttcagggtgtaatatatgtgatgccaagatctaggattatgtgataatgatcttttgttggtgtaagttatatgtatattaccagtgtcacgcagtgacgcaatggatcatgctatccaatcaattttcatatgttcttaactttttatgtttggaagaaaaataagcagcatgcagagtgcacatttttggtctctattatcatcaggctaatatgccgtgacaacactttgtgtttctcagaactgcttggttgctaagaaataacatctgtgtgatgggatgagagagatgagaacaaaagaaatcgtgacccgaacaagttttgaaaaattaagaatgcatgttttggaatttttcatgaaaagagatatccctgaagttgaaaaatattaaaattcacgaaactagtatatattttggtacttatatttattaagactcgttaagttcttatattgtggaatcctgtcttttaagagggacttctgtattatccagaaaaaaaaaagaagaaaggcctgattttttacaggcaagcccaaatcgctagctaggcccaaagcttccgaaaaaaaaaaagaaaggaagggcaaaaaagaaaaaaaaaaggtacgcgtacggcgtacgctacacgcggggtgccccatccgctgtgtataatacgtatcaagatacccgtatacgtacgcctctcctaatccccctctctccctcgaaaccctaatccccctcttgcgattttcgcgaaaccctaatccccctctcgcgattcgcgattccctctccctccgccatggccgccgccgccaccaccaccgtggaggtctcggacgacggcgaccaccccgtcctccgcgacgacgagcgggggatccctcgatccctctccctcctcgccgcgatcgtggaggccgacgccgcccgccacgccgccgccgccacacggcccgccgagtccgacctcgtccgcgccttccgcggcggcgcgacgcccaccgtcgcgatcggggagttcctggagcggatccacgccttcgtccggctggagagcgtccgccacgacatccggctccaggccacgtgctacgtcctcgccgggatctacctcacccggttcttggggagcgccgccgcggtggaggccgggatccgcgtcgacccgtccacggcgcaccgcctcgtcgccgcagcggtcttcgtgggcgccaagttcgggaacaccagcgacatgctcccgacgaggtggacctccgtgttcgagacgagctccgacgcggcgatccacgcgggggagatggccgggctcgagcggcgcttcctgcgcgccgtggactaccgcctgttcgtccgcagcgacaggttcgggtggttctgcggcgccatggagcaggcgctgcatcggagcgtgagccgcagcaggaagaggacggcggcggaagcagtggggggagaagaaggggaggacgagcgccgccgccgccgccgccacagcatcgtcggggctttcctgccgccgctcccagccgtcgccgccaattaggttcaccatttctgaattcagcttcaaatattttactacagattgtattttcttttgctgcttcttgtgtttagagttgtttgcaggtcatcggggtggagaagacgacggacggccggccggagttggagttggatcggctagagctcgccgccgttggccggagtagttttacagagttttagccataggatgtttataattatatatattgagcaactgttagctttgtcagagtttaactgtcagattatatcgatcaatcagtaatagatttccaatgtaatcctataaccaactatataaatataaataataaaaaaagtaactttctgctattctggtgtatggagttcgtatccatctggattgtggattctgtaatggaagcctctgttgctgtggcttttgtgaattgtgattgtttgattgatctgtgaacttgcccgttccgtgtcctgagagaagttgtcttcagcaaagagtgctgaaccatgtaaggcatgcagatatatatgtgatggtttgattataaatatgcacatatgttgtttgcaaacatctttaaaaagcgacagttgtttgattaatcttacccctaagttcatatgttaaatcaatggctcaggataggggttgtcacacatccaaggagcctactcctatctagcaatatttgtttgaggagtgcgaccttttcaggatgagggactcagggacaatgactgcattggcatcatcatggttctagctcatgaagtgttcagccaacattgggcagattttcagcaaaatagcatcgtacgtacgtaagaagggcacacataattctctactgaaagagttcacgttttgtaaagcatgttatatataaaagctttgttggtacgtaatgtgtaggcaatcttacctggtgagaaagatgagttgagtttaatttgcaggtcacatagccgaggaaacatttggctgcaaatgatagattgaattaacataagcagatgcaagtatatgtaacctactgtatgctgtatttgggtatttttctgaaatatttgggtattttttaagtaggtaggtatataactaaattaatttatacgtaaagtaagtgcgagaaataaaatgttctggttggaaatatttggatattttttaagtagttagttatataattaaattaatttctaattaaagtaagtgtgagaaataaaatgttatggttggatttaatgtttattcaattttctatattattaattacactcattgaaattttcgtagcttaattgctaattttgataatacaaacatcattttagcatttatttaaataaaaatctaaataaaaattcttttatctctatgggcctttttcagcccactttcttcttcagcccgcaagcgacaaaagtctaatttttatccctatactctttatctcgcttgctgatctgccggcccgcgtgcggcccaacgctcgatcgatatgagccgttcgttttgatgaacggctcagatcaattccaaatcgttaaaaaccctaaccctccccctccacccagccgagccacccccaacgctgcctctcctcctccccgtctccctccggcgccgcttcccctcccctcccctcccctcatgcgccccctcccccacagccgagccggccgcctcccccgcccccgacgccgcctttcccgctcccctccgatggtcccctccccccagccgaaccggccgcctcccccgcccccaacgccgcctctccccctccgcctctccccaccgatgccgcttcccctcccctcccctccggtggcgccgctccctcttcccctctccctcccgtctcaccggcacggcgtgggcgacggcggggtgcagcggcgacggcggacagctccctctcccctctccctcctgtctcatcagcacggtgcgagtgacggcggggagcgcggcgacatcgtcggggtccgcgctccctcggcgacggccgtccctacggcagcgtcgacggcgacaacggcgtctgtggcgtccgcgggtagagccgccgctgccggatccgcccgcgatcgccgccaccgctgggagccgccgcctctcttctccctccggcagcggtggtcggcggtggtgatgtcagcggccgtcgatatttttttttttgcaattttttctatccctattgctaaccaaatcggattgtgtacggacgaaaattagatgtgatgacccgaaaaatacgaatatttatattagttatagattagttaaaaaaatatcgagtttgatttttctaaaatggattaggtgacggtatgctaattccgtggacggagctcctctaacgtaccgtcagagggacctgacctgggtcgctgacgggtgatacccatcttcatatgcccacacgatagtaaggatgtccatctgactttacgtcagatgagcctcttccaatttttggcggtttgccaccgcaatacaacatcggtcggatcggagacgttcgcgacaggcgaatgctcgtgattcgattcgtgaacgactcaccgcccaaaactagtgggtcccacctgtcatccgttccgctttctaaaacccttcgaccccaatcccgagttcacgaggcacacgctttggtttcgccgcggcggcggcgcccttccccgaatctcctcgtcgtcgtcggcggcggcgccgccacatccccgcagcgttgcgccaaggaagtgatccctactcaacccgccatcggccagaccgataaaccctagccctagctaggtaggccgcctgggccgattcccgatggagaagaagaagacgacgagggcggaggatgcgggtgcggatgtggatgcacagttgccggcgcgtcgggtggcggcggcggcggagccgaagcgagcccccggcgccgacgcctacgccgccgccaggtacaggctgttcaggaacaacttcgtggcggccgccgtcgcggtggccctgtgcctcggcgcgctggtccacaccatcctctgccgcgacgacccgacggtcgtccctaggtacgtcttgcctctgctcgtcatgtgctgtgcaaccgcggaagtcgttcgcaactatgtccagatgtacgggtggtctgtccccatgggagttgccaggttcaggatgaagtgatgagttcattggccgcaaatcgtaatcgtagtggagatcctagttgggtgaacagctttttttagaattaggttatcgaggtgatgagggattgagtgctctaattgtgcaaatttaatcgcggtttacgtttatctgggatgtctgatgtaagtatgtgccgtcgctgttgacctactctatatgtaaggtactagtcggcaagcataatcagattcagaaatgctttgtggttaattagtttgttttgtgggatgtcaactatatatgaatcaagcctgttccatttactctttttctttctttcttatcgagttacttattgctgagctgagatatgcagtttatggttgtaattatatattaatactcagctgatataatgttactgtgtacagctattcttgctcccataggggttgcaatcaaattcttctctatcaatgaaataagcacattcttgtgctggttcattcagaaaaagaaatatatatatatactggatatagaggtagacgtgtgttgaactgtgaactctgaaactgagattcacatgttcagagttcaccagctatgttggagtgacagttttcataaattggtatgttggacaattggggacttgctgttaactttcatgtagcactagtacccaaatttggtagaccaataaattactgaaattgtgaagcaagagctgaaattctgtttagttgaatgctctgagtctggctcgtaacttgggaacgtgttcttcaaatgtagatatgacaatcatacagttgtcataggttgataatctttttttgccgggcaaccactgaccaatttcattaagatttggggggcataggttgataatccttacaatttacccagaagtgatttgatctagaaggctagaatctgaatctgcttcagtgaacaacttttaccatcaagttcttgaaacgtgattgtgctttcttatacaaattaactgtgtcttacatttactcactgaagtaagtatgccaacttgctgtttatatgctctatatattaggattatcaacctatgacaactgtatgattgtggttagttgatggagtatgaagcattattgttctgtcattgtttttgtcgagttattattattacttattgcatatctatgtgctttgtggttgtaaacttgtaactataggttaatccagttgatatactggtacagacatagtgcatctgttttcttatcataatagacaggttggtgtgcctggcctgaccatcaaattgtgaactgtgatgcttggattcgcatgttcaccatcgaagtagtcttgacagttttcataaatttatctgttggactattgttgtcttattgtgaattttgatgcaatcactagtacccatttccctgattccgtcaaccaataaattattactgaacttgatgaaactgtagttaaaatacttgagttgaatgctctgagtttctgactgatattttgggcatatgattgcccttgtactaaaaatgtagatcttacaatggaaaacgactgcccctatactaaaaatgtagatcttacaatggaaagggacttcccttattctaaaaatgaaaagaacatggtgtatctcatgcagtttgtcatatgcagatagatcttacaggtcgccaagaagtgacttgatcttagaaggctgaaatctgaatctggtccagtaaacaaccttaattatcaagttttggaggcgatgaatgtgctttctgatacacatttttattatcaagttttggaggcgatgaatgtgctatctgatacaaattaaatgcggttacatttacttaggatgtctgatgtaagtttgtctcattgctgttgatatgctcctctgtaaaggtagccaacaaatatagttatctccagaactgcgcgtgttcagtttgttttctggagtatgaagcaattttgttctattaatctttctgtcgagttatgattacttattgcatagctgagctatgtggtttggtttatgcttatatttgtatgttaactcagttgatataccagcacagtgcacattcatcttttttgtaatagatgagtgtgttgaactgtccaagtgtgaactgtaaaggtaggattcacatcttcaccatcaaagtaggagtgaccgtttacaaaaaaaaaaaatttctgttgaactattgaggttttagtgtgaactttcatgctttcatgtaatcactagttcccaaatttcagtaaccaataaattactgaactttatgaaaccatagctgaatttcagttgagttgaatgctccttagaggcgtgtgagttatgaaaccttctatgagagttccttgtgagttcttagaggcgtcacttgatagtgaccgcctcctttctgtttctttttctttctcctttgaggggttagctgcggctagcacctcgctcgactgtctaaagtcaatctttgtaaactcttgtttcgctctctttcttcttaatacaatttgggcgacctcctttggctgtcccggctaaaaaaaaaagttgagttgaatgctccgagtttctgactgataatttaagcatgtgttccttcaaatgtattcttacaatggagtaggattgcccttatactaaaacgaaaagaaaagtgtggatattatgccttttgtcataggcagataagcattgcagtttgccatgaagcgactctacgaattggaatttagttaggtcaatatgccaatagctacatattggtcctgtgttgtgtgagagtgcttcttttgattactggaacaagctagaacaacttaaaattgttcattgaattagaatagttttcttctgaaatggcaactagtgaggtcaatgatgtttacatttacatgctttataatactatctagcaagtagcaaataacttttgttagctgcacttactgaatgcaatttactactccctccatttcatattataagacttcctagcattgtccatattcatatagatgttaatgaatctaaacacatatatatgtctagattcattaacatatatatgaatgtgggcaatgctagaaaatcttttaatatgaaacagatgaagtagtatccactgaattgacatattgccatctcaatctacttgtgagagttctatgtatggcgagctacccaacaattttgagttgtagggatatcgttttatcctgacgaactcagcaaaatcatcagctcagcaaaaagcttaaatggagggataactgatggaaatggataagcatgtattgaaggatctggttctattctcacatggtaaaggtaagaattaattcctatttttagatgctccaaagtcatcctttttcagacttccgagtaggagctagagcattattttgttgggcacaattccacaaacattatttgctgcatcagtggtcaaaattccggaccgaaatttcatatcggaccccctccccccgatatgatattatttcggctgattttttttttcattttttatgaatttggcaatattttgttcaaatttgacgaaaaattgttcaaaatttcggaccgaaatttcagaaatttcgatatatcagcaccctccgatagaaacgttcaaaccaaaagattaaaccctggttatactgtcatagagagaagtttcactttggagttggaaatactgcctgtaataagcagaaaaatacttgtcataatcatgtttgttttcttgcaagttggctattgtaaaaaggtaagatgaaatattgccacccttttaataagcatcaagctaacttatcctgtcctatctacagtccaaaatattcctccaatgcatacctttcctaaaagagctacttttccaaaccgtgggacaagagctcacagtatatatagggtgtgtaccattagcaagcaagcttccctctactgaaagatgtactggttttgagagcactgaatctacacattatctgaaaaatactttgcaatcttggcaaactagagttatagttgttctcaacttgctttcttattggtaaaaaagttgacttttgccatcttttgtgttctaattcactttttgtatctgtatttaatttcttggacagcaatgatggagttcatagagctggagctcttcttcatccatggcttctgccgttgctcctgacatctggcactggaccagaagcctccccaaccccaagcactggaggggaaaatcctactatcttcaaatctgcaactctccatcaacaaaccagtctctgaacctcatcatcagctggcactctgaaacccaatccttcaatctgtcttactccatctgtgctgaacaccatgatccagtctcactctggagctcccattattccagattgaaatctgttaatggctcagattttgccatccatttcttccacgatatcatctgcggggtcctcaggtatggcccttactccaacaagatgtcacccttcaggctgccaaatgttcaggtatctgaagatacaggcaaaatcttcaacctggcagcactcactcttgcactcatggtctgcatctacgaagctccgtccaccctccgacgagacctcatcggcacggtcagtgcgcagctgatacgcggcgacatgtggggtgctgcgaagaagctgatgcttgccatggggtcagacatggaggagcagtggatgcggtcactgaacctcgccgtcaccaactggatcatagagactcgccggtcaggtggcacgccggtgtcgcctttcacggtcttctcctacgctgtctcggcgatcaggctgtggaaggtggagctgtactgcccagtggtcgccatgatcatggagcacccggctcatcagacgaaagatgagaagctgcagttctcgctgaactaccagcatctggaggccgtgatccagttcatctacagagtcaccttcagggagaactggatcgacgtcaccgtcaacgtcgacaacataaggttcatctctaatccatttcgccattgattcttggacaccaacagtgttcacccaagaactggtggttttgcaggtgcgacctgatccagctggtgtcggagacgctgatggcgaagcagggctacggctccgacgagaagcacttcccgtcgcggatatcactgcagctgacgccgctggtgcagacggacatcctctccctgacagtgagccggtcgacggacaaccccgcccaggaggtcgacacagagatgggcctcgacgcgacgctcagcgcagcaccggcgaccatcggcatcaccatgtcggcgcacgagacggtgacgaggacactccggccatggaagttcgagcactcggtgcacggcaacacggcggcgctgaactggttcctgcacggcggcgcggagggcagggaggtgttctccagcgagccgcacaagcgggagctgctccagccgcggtcatggttcaggaaccggtacaccaacccgggcaggccgttcaccaggggcggcggcgtgatcttcgccggcgatgagtacggcgagagcgtttgctggaggatgcccgccgcggcggcgggcaagacggtggagtgggagatgaaggggaggatatgggtgacgtactggccaaacaagaagaggacgctgcatgttgagaccaggagggtcgagttcagagagctactgcgtctcaccatcagagagtagaccaatttgtcatcatctggtttcatatttgaaaattgttttaattttttttaatgattacttaatcaagactctgagaatgtctgcttctgttatggaattcaaaattatgttgggcattacccgtaacccttgtgcaggcgcaaacatatggagagactgaagattggtcacttgtagttgtagtacctatttttttttttcgttctttttttttttgggtcgaaaaccaggagttgttttacctgttatgaagatttcagagttttagaattcaaaagttcctgacgtgtaagtatttgtcatgccatttgaaaatctctagtttgaagtttaactctttcccttggaaagcttctgtaacttttgaaccagagtttggagctgtatattgggagctcttgaggtatgaaccagacatttacatgatattccaatgttataaaaccttgcagataacaaattgtgctatacaggcctaaatgttcaaggtcaaatttgaaaatgtatgactgcaagcattggaagaggttgaatatgcgatccttttgtctccgatgttgagtcttgtggaaggaccaaggagatattgtgacagcattcatccgtcggccgtctcgtgcgagcgtgtggcgtgcgcgggctagcacaaactcagcgcgggattggcacaagcacggctcgacctggcaaggaggggagagagcggaaacagagggaaaggatggaagaatgatagaaaagatggaaaaagaaagaaataagaatgcgagagggaaaaattatacaaggagataaagaaaaagatggagaaaaataaaatggatggaattggaattggtgtaaaatttaagtggtgtgatattcgggatagaattaaattcggatcaaatgaattatttgaagggtgagctgcacttgtggtaaaattaaacgagaaaataaacgactaactctgccgtcattcgcactcaggaaccaaggataaaaatactggtctgctaaaaatatttagaaaaaaaaaagaattcagaaccccattttacattaaagctactgtgtaaccaaattatatcgcttgatggatagaccaaaggacaaatctacaacaatctccccaccttgcaactagtatcagcagcatgacagaacacaagcaaaacatccagactgctctgcaattaaatgatgagaaaaatcattattgatcgatgcaatatgaataactattgcaattaaactattaaggggagaaaaacctggaaataagagtgggagaaaaagttaccagaagccatggcactacgaggtgtcatctgagcccatcctatcctatcagtcttcatcatgacggaaacgtaatttcttgtgtgccagaaaaaagaatactattttagaaaaaatgtccctttttgtggaagtgaaatatagtattctcaaaacctaaaaatgttcctttttgtggaagtgaaatatagtattctcaaaaccacagcattaggttaaggacttaccctctcagatttatcatagaatctaacaggcagtgtgacatctatttccacaccactcttgagatcacaaactctaagctgataaaaaagaataagcgttagtatttttgtccttattttcaattactaataccaaactttgacttataagtattttagtgtttaaagacagtaatgaatcccaaaagcgttgtcctatactctaatccacacgacattttgggattgtcctatactctaatccacaatactctaatccacaatacctctaatccatccacaatactctaatccacaatacctctaatccataatacagtaatgaatcccaaaagggttgtactatacactaatccacctcctgagcataccttgatatctttaatgcaatttagtttgtcctccaaataaccccagccaagtaatagaagataatcttccagctgcacataaatttttaacatttagcgacggcatttgcatcaagattgactgatgtttctcttcacctcaggtaacgttagagcacccttcccatttatagaagtaattacattaccacgctttatcccaagatcctcggcgacaggattatacacctaaagacaaaaaaaaaaaattacaatagcatccacaatgcatacagatactgaacagccttaattaccctatctacaaggaaaccacccttgatgccaaagtcactgatatcctcctgaagctgcacatccaacagcgctattgttctgacaccaataccaaaaagggggcgagcaacctgactgagaaaagttgacaagttgatagtaaaaaaaattgaactgcaaacattttcatgccaggacaatggtagaaccacccttataataccattttattatcctaaatggcacattgactagatacattaggttatcctaaaattctagcagcattccaagagatggcgtaagaatacgatttagttctagtacataatcgttccacatgttagatttgattacaagaaacatcagccccaagagaacttaaatcttaagtacttaatcttacactgaactcgacgtttaccagaagttagcatttcataccaggtttatacatctaatactgaaacttatccacactagcatgcaagggatggcagcaaagccaccagccagtacacacattcaattctgagattcagtaagcataacaccatttatttcagtatatagagatcaattaagttctaatgtgaggatcatagattggatgactgaaaaaagccaacttgaactgcataaacatgccaatgcatagttagcatttcataccaggtttatacatctaatactgaaacttatccacactagcatgcaagcgatggcagcaatgccaccagccagtacacacattcaattctgggattcactaagcataattccatttatttcagtagatagagatcaattaagttctaatgtgaggatcatagattggatgactgaaaaagccaacttacttgaactgcataaacatgtcaatgcattttacaatagtagaaattgaagtaacagcaggataggggctacaatagattgccatccctctaactacaccatcattgtcaatcaccattccttcattcccaccctgcatcaaagaaatactacagaattaaataagcaattaagcaataataataaaatacaaagaaagaaaattattacctcagggatgtcacagctcagaaacatgtagtggtcacgccctaaaatatctgattcttctaaccattggatatctcctcgcctagccctcaaggatgcctctccatccctagccaacacaaaaacttcttgaccatactctgggccacgtccaaaagatgggagctccatggtaacttctagattgatatgtaatagggcaatgtcataatgatcattgaagtagataagctccgcatccaagacagtcttcttgttcggtaagcaaacagatagctgaaaattaagatggatgttgatcagatatagttaaatagcaaagccgcatgcaacgttcaagattaaataacagttggtcataaaagcaccacaaaaacaaggactccagaatggacaaaccctagctatggtcaagctgagctgatgatgttgtaatgtggcaaaggcaacaagacctgatactgttgaaatatcacaacaaggccatggaacaagtttaagagcactataggatgaaaactgaggtacaaatattcgcttaatgtaaaaggaaaaagagaatctgcaagcagttgcaggcagaatcaaaaggacagcacaacctctgtgaggatatggccctatcgtttcatttatgctcatgcttttaatccaaattttgaatttttagaacttaattttggagatgattttaaagttttttcatcatagtttattttacaacatatactttcaaatcgctaacgacatgtatgtaaaaaaattacctacaaattatttttgggttgctaataagccgtacaaataaggccctctttgtttaggcttataagccaacttataagccaaaaagtctaagcctaaacaaacaagcagctttttcgtttggcttttttgaagccataagccactattaagccaaaagctaggttggagaagcttttttggcttatatgagatatccgtatgactccaccactaaacttaggacattaaattcactagcttataaatcatataagccaataagctgacttaaaagtctaagccaataagcctaagcctaaacaaagagggcctaagcatagccataagcaaaacaatggggctaggaagaaaaattcagaaatgaacaggtagggcaagtgtaccgaaatactactaaaacatgaaggtaaaaagaaacatctagggctactaaaaacaatagtgaaacattaatataattggatgttaagccatcattgaaacacacacttgcacaatgaatatgcaccattcaaggaaaatttttcgcctaaaatgcagcatgctctaggtagctaaaccaagctaccccatacatgtggaggggctactcatcataagaagaacagaatgaaaagctacatagagcctgcaagcactatagtgaaaggaaagttttgtaccttgggtaagggatcacgttttctacccgcttcgcatacgatcctagaataggtcactatggtagcatgatgatgcccagtgtcatcagaccattgtttaataataatgccagtacattgtggtcgcctctgcccatctgcaaacataggtatgatgctgtaatcatctaaagaggaatagattggatgaatcttgctattattttgtcactaaatcataccatccatgatgtgcgaaatgctgacaatggcgcgtgccgcctgcaaaaccaccaccttgtctcttgagctctgtatggcctcggtggtgtatgggtccttgggctcagtcttgatagggatatctttatcacgttctgaaagaaaacaaatttatttagggcttctaaaatggggaaatttaactatttgccactcttgtgacatggcaattaacgatttgccacatcttgtcaatgacatgtgggccctcatgtgtctatgacatgtgggccctcatgtgtctatgacatgtgggcctagtggcaaatcgttaagcaacatccgtaagagtggcaaatagttaaaagcccctctaaaatgtgcattataagattttatttttaaatttctgttgcaacacgcgggtattcagctaatactcataaattggagtaacaaagttggatcaagtgacatatgaatatagacatgtgctcgatcctaccaaaccctaaatcccgaacccaaattggggatttgcaaaatcttagacgattgataaataaatagcgaaactggaaaaagaaaattcagaagcaaactaacaaacctttctcaattttcttgatgatcttactgacctcgtggcactcgtcgttccacttgcgcacatcctcaacattgccatcctctgggaatggcgggtattgaggacgacggggtgcaggagcaaaaggtgagacagttgttccgggcgaagtctgcccctctgccctcagcagcctctgcttcgcttcttccgtaagaagcgcgatagtcgggcgtgtcggtcctcgctgcttcctctttcttcttcttcttcccggtctctgttcttcagatttctcctcagcggcatctccttcgctcctcacggcactcgtttctgatctgctgctgctggggtctggaagagggaggggcacagagcttcttcgacttggagaagacattcgatcagcggggggcagcaccacgaccggccttgccaacttggcgcgcgggagagggcctgaaggaggatgcggcggcgccggcggcagatttgtcggcttgccgaagaggacgagcaggggacggaggacgagggagaagagacggaggcccaacaattcgctttatatagaaggaaaatgtatactttgactccctcaactatccctcgatttataacctccaaccataaaaccgggtatatcggctcctccaactattaaaaccggtgcaaacaagattttggaggtggttttagctgacgtggtattcacacggcggtgttgatcaagtctctattctacgtggcgcttatgtggcattagaattaaaaatatatgtgggacccatatgccattcacacacacaaaaaaaaaaaaagaagagtattgtgggactccttcccttcttcctccccctctctctcccttatctctctcccctcggcctttctcttggtcggagcagcgactgggacggcagtggggagcggtggcggcggtcgggacggcggcggtgagcgggcagatgctctccagcctcgccttgatccgattgatggcgtcgtagcctcgcatgctccggttgggcgtcgcgtccctctcccccttcccgctcctcgacctcagcatgatcgatacgtcacacccctgcaatcaacactcagatgatcgatcgccatggacgagcaggaagtagcttgagcctgggcaattaaaattgttaattacctggacgaagcagtcgtggtaatgcatccggtgcagagacggcgcgagcgtgggatcctcctcatctcgcccagcacgacgtcctccgcgacagggcacttggcatggtagaaccccacctgcagcccgggccacgccgctgccgtcgccgaacctgcgacgacctcaccgagtcaccgctcacccgtagggccagcaaaaacagcaggagctccagctcccgggacatgaggcagcaagctgtctcaacggcgccgcgctgctccccaccgccacggccgctgccactcccgaccgccttcaccgctccccaccgtcaccgccaccgcttccgaccgtcgctgctccccaccacctcgtccccaccgccaccatcggcgagctcctccccaggcgcgcggacggccggcgagttccacccccgcgcgcggacgccggcgatcttctcccccggcgcgcggacggcaggcgagtccacacccgcgcgtgaacgccggcgagctcctccccagcgcgcggacggcaggcggacggtcgacgagctcctcccccgcacgcggacgcccgcgagctcctccccttgcgcacggatggccggcgagctcgtgggacggccggctggctcctccccgcgcgtggacggccggtgagatcctcccccgtgcgccgtcgacatcgctgccgccccgcctctagtgttggaaggtgagaggagtggaaaagatgagagcgagaggggggagaggtgaggatgacatgtggggcccacatatccgtgggtcccactattttctttttgtgtgaatgatatgtcggtcccacaattttttttactctaatgccacataagcgacacgtcgacaacacgcgggacgaagaccgggtcaacaccgccacgtgggcaccacatcagccaaaaccgcttctaaaaccacccagggatatagtttgcatgagttttgatagttggatgagtcaatatatccggttttgtggttgaaggtcatgaatcatactcagaccatagttgagggagtccaagtatactttttcctacgtaaaaccccctagctcttctgcaattcgcttttacataaaacccaatgggctcctcatcgtagcgcggcccattttgcagttataagtggtttttctttctttttttggtttatttttaattttgtttcttttaaaaccactagcaaagtgctcgtgggttgcaacggggaaaattaattatttgaggttgtgttaataacaaaatttggtaagatatgctcaaagttaaagataacaccgaggcagatttggagcggatgtaatctttccagaaacaaagtgtgcatcggctagcaggttgtatcggttgagtttgaatcggatatagttggtctcgaatcatgatttcaacgcttttttcatacgtagttaaagtccattacaggcaattgtatctattaattagaaatatttatgtcttcagatgtttttggcaagagtccaccacgaggacttgttcatatgttttataacttaggaaagtttcagtcgtgtctagtatggacaagtttgtactacgggtataaatatattcctagaatcatgtagaacaaaaacgatcgttcaatacactctcagcgcatcgccacccttttttacttttctacttttgacgagttcttacttcgaattaggacatcggtttcaatctcccgatgggaggtaacacttgtcacaatggtttgcattatcgaggttattatgtcattttagatatgttaatgttcttaatataatcactgattatcagatatcgtagttaatataagttgatatttcgatttacttgtattggctggaacttttctatggttttgtcgtcgatatcggctaaattgttttgtcgactaaggtatctactaccctgaaaatcggtcaaagcttgattgtttagataccatgtttctcttcataatttatgatgcatcaattgagtttgacctattaagtcatgcttagaaccatgagctctagcatgtttcttgattgccaataagggtagaattggagtttcagccgatcttatctgatataatagttttaacatgttttgcttagcttagtcatgttttacatattatatttgccccttatacatatgtatcaccttatttaaatatatttagtttgcattatatatatttacttacattgatatctctatgtataaggttgtatcagagtattagctggtgcattatctttcactagatatctaggcatgccctggcgcgccgcttggagagagcttggttgctgagtatagaattgcaatcctatggcattactggttcaatcagtgcagtaaatattatgaaaaaaaagtgacatagaatagcattaggaaagttgacgaaggtaataaaaggattagaaacataatataacagagtagtttatatggagggtgatgaactgttcatcggtgtaagggtagtgaaaatgaccggtgtaagggtaaccttatgcacgacttaatataatagaatagcatagtgaaagttgacgaaggtaacaaacaaaaggattagaaacataatataacagagtagtttatatggagggtgatgacagttcatcggtgtaaggattagaaacataatatagcattaggaaaggttttttcctaagcattgcattacagtagtaggtagagatgaaaccttgagcgcaatatttacagtgaaacaaactgtgcataacaaggatataaaggttctaagtaatcagcatagcggtgctagtcttagagtaggtctcatgatggtagaaagatggatgtttatgcgcttcataacagtagaagtatgttgctggtgcagggcatgaacattgcattcacaggagatgtactgttgcctgcaactgattcatcttgtggaagtgaaaaatgcagattcttcccacttgtatcttgttggctgctgcaaaatctgaccatatcctgcctttaggttttagtgtccatctgttgacttttgaagaagcatggtggttgatgtgtttcttgtaatttgtacttgaatttgtgttgtcttacgctgtgctagtggctgaatatatttctttgaaaattattttgtgcgaaatctgaccatatcctgcctttaggttgtagcatccatctgttgacttttgaagaagcatggtggttgatgtgtttcttgtaatttgtacttgaatttgtgttgtcttgcgctgtgctagtggctgaatatatttctttggaaattattttgtgaagtactgtcataaaaattgcatgtcacatatttatttttcaagagagtagattgattgcaagtgaaagatcttaccaccctgtcttacttcatgaatgtttttcatagtaacaatgtagaatttgcttgagtagtctaggaattgtgcaatatctctaacgtagttctttacttcacttgatagcttcatccgtttgttatagcagcacatatctttgacaatgcgttttgtgttggctgcgggaaaaaaagtggataagcatttttctcactatagaagaaaaaaaaattgatgaatttcattgaaagaatttcattgaaagtaataagtaaagtatttggacctgtagaagttgatccagtatggtgcttgaacctgagttggatgtgttcgtttttgtgtgatttagttttgtggactctacctgaaaggcaaatcatagtaagaaagttagataaagctgaaaatacagtgagtaaaagtgaagttaataccttcaacgttggtaaaagatggatgacgaggcgcagttgatttggttgaaaagcttggtgcagaagatgattggttattgataagtgccttggccgctttatctggaattggacatctactatatccttctttgttaaatatgatcacattgagtcttgattttgataaggtcctgaaaacaacagatttagattctcccatctttaagccagcttcttgtatgaattccttccatcctattgtcatgtacagcttgtcacgtgcttctgctactttgacgcggatcttcaagccatgtgcagtcattaacttgagagttcgtccatgcttaagcctagatgcttttgtaactgcaactgggataggctgtataattgaaaatttgtattagcacttgtaaagtcagcatactgtacaagacataaaatatttcttgttaagctcaccagatagtcttgacttgctgtcttaattttgaccatggagaatgttggtgaatgcatgattgtaacttcaaattgtatggttttagtgaggtgtgtaatatatagagagtaataagaaagaattcatggcgtgcttggatgatacttttcagtttaattatgaagtgtttatcttttattttaaagaattggatgttggtttagttggcaaaagtagtcgataaaataagctgaaatacttagtattgtattaaatacaatgttgtaagttgagtgctgaattgaaaatattggatgcaacttaggagggatgtatatagtgagatacgaaaatgaaaaatcacaatatagttaaataagtaagaaatgttgcgtgagatgatcgatacaaacatatatccattaattagtttattagccacttttatgattatttacagtacatagttatgttcactctacgttgaatgtatagtgtttgagatgctgtggaaggattatgtcatgataaaaatgacacgtcaaatg

SEQ ID NO: 9451 - DNA, 1928 bp, Oryza sativa
aacagaccctttattccctctgtttatgtattaacgacggtcatgttagattaatgggctaggcccaattaaatcctaataaattccattgccccacattaagtgctatgggtaataataccaccttgaaaatctaagtgaagatgtctcaacttaaatacagagctagtggagagtctctgttgaccggttgagatggtgcgcggacaaccaggcggggtgaggcgaggcgaggcagacagctgctgcgctctctcgttttgtaatagacggtaataaacacggagaattgatttcgtatcaatgaacgcttcggttacggaattaaacgtcgtgaattgatttcgtcggttacggaattaaacaccgtgaattgattccatattaacgagcgcgtcggttacgagattaaacaccgtggttgatgactccgaacgttactctcgcgctcgcatatatatactccgcagcgaccagaaggattgacgaagttcatcccaactcttgcacttccttcaccggttctgttcacctgtgtacacagatatacgggacgagcaggtgcctccggaactccgtccgcttgagaacttgcatgggtagacgggtgatcaagtttttgggtagcgcttcaagcgcgactgctcctgttctttgttcttcgacgacaacgttgcatcttcctctacttctgcttcaccatggcttctactggagagaacagaggagacaacatcaacggaggcaatacgactacctcaaaatccagcggtgggacgttctcggggtatattttcattctcccgattctattagatgtttctttgttaatactcttcgcaatggcagcattgcgttactatgtaaatgttgatgcttatttcatattaagcatgctcaagttgtatacatctagcactgtcactagatttactcatattgcaaatgtcatgtttattgtcttaatattttggattaaaatatgccgaattataaccaaatttccaacaatccaaaaacttgataggtcttttttggtagttagctttgctgcatcactaaaaccacatgctttcgatggttcaaattataaaaaatggaaagcacgtgcacttttgtggttgacggtgatccaatgtttctttgtttcacggggcaaaccgagtgccccgcctctcttccctaaggaggaggctaagttcgaggctacggattgcttgttccgtggagcattgatcagtgtgctcgccgatagtattgtggatgtgtatatgcacatgccttcagggaaggacatgtgggatgctcttgaggccaagttcggggtttccgacgtcgacagcgagctgtatgtcatggagcagttctatgactacaagatggtcgatgactgttctgtagtgggacaggctcatgagaatcagatgttggcaaaggaacttgagaacaacaactgtgagttgccggacaagtttgtggcaggtggcattattgccaaattgccaccttcttggacggactttgctacttctctaaaacacaagaggcaagagttcagtgttactgatcttattggctctttgagtgttgaggagaaggcgagggcacaggacaaccggggcaaaaagatcgagggaggttctagcgccaatttggtgcagaagaagaaccctcacgcatcccacaacaacaacaagaaagtcaaacctgacgtcaaacccaaggctacaaccaattttaagaagaaaggcaagggaaaggcaaaaggagattgctttgtgtgtggcaagcctgggcattgggccaaggattgtcctgagcgcaaggacaagaagtctgcaaacatggttattagtgagggcggaggaacattggggtatggtaaatttttacctacagttctctctgtctgtcactcacttgattgg

SEQ ID NO: 9452 - DNA, 4945 bp, Oryza sativa
tgccccgcctgaatccgtgctcgccgctccgccgccgcactccgctccgccgccacgctccgccacctccgctccgacgctgcacggccgcgccgcgttgcctcgcccacggcgacgacgacggtggagagccgaagatgacggcggccacggcgcgcggctgctccgcccgcagcctgaaggagaagagaagagagagaaaagaaaagagaagaggagaggagaagaaaagagaagaaaaaaatatgtgtagctgacatgtgggctccacgtgtttttttaattatttttgctgactaagatgccacgtcagcaaaaccgggcaaaaatactgccaagggacctccggtgaacggtttgagtgagtgtaggggtacacatttcttgttttgtggttaagggatctaagaaaaatctcgctgttaagttgagggacctccggtgaacttattcctccgaagtaacatgaaccaaaaagctacggcccaacttcatccggcccaaacttgaaaatgaatcgaacaggaaattcagccccagaaaggccgaagcccacggcccattagggtttctcgtcccccacacataaatacctcctccgcctccgcctcctccctcgacggccgccaccccgcttaggtttaggtcttctccgcctccggtttctccctccgccgtcgaaatggtcgcctacagggtaagcttctcctcgccgccgccgccgcctcctccctcgcgttccgtcgatccatcgagcgtggctgatctcttcgtttccgtgtttgtgtgttgcgaatttttccggcggcgcagttccatcagtaccaggtggtgggtcgcgcgctcccgacccccggcgatgagcaccccaagatctaccgcatgaagctctgggccaccaacgaggtccgcgccaagtccaagttctggttggtgtcgcaagaactcttatctatgatgccttgatccttcgtgtaatttcgttgatgatttcgtgttgtttgtttgcgcgcaggtacttcctgaggaagctgaagaaggtgaagaagagcaatggacagatgctcgccatcaacgaggtaccgctcaatttgctcactttcaatttgactgccttgtccatgcgtatcaattgccatgacgtcgttacagatccgcaggctgccactttgatattagtttgtgctgtggtttatcttcctatctaattaggcagtgataagtatccaactcagtgacattgaccaaatttgatagatcaattttgtctccatggctggcagttattctctactggagatgctcggttacatataggacagatcgtggatacttatgttaggtctatctgtgcgccttatgactttgtgatacgaccgaaatgcttgattttgtgtgtctaaaaggtttgatcacaaggaagctgttaggcatttaataaacaattaaatacctttgctaaaacaattaaattctttatagagggaaatgtaatttaagcatgctgctaagttgctagtcttttttaattatttgtgtacagccacccatgttgatagtgattccactgtgtgccctcatcccaactcttttccgcattgtctttcgcagggtgtatgtagcatgtgccaagtcaatacatcatgcatttctgaaaaatcagttgtgttcattagtacttgaaactgtcaaattggtgtgattataatgttcgcacctgttgacaatgtgtcgatggtgttctaataaaccatcatctatggcaacaaattttgtaatgaattgattcagtaacattactaacatccgttataacaaattgtcaattgactgttgtgatgttgctaaagtattcttttttgttaattgtattttagtgtagttgcatcctaacaaaggtcatgcacgttgtagccatgaaatagtaataaattacctatattgcatcttgctggcagctgtatttttccttgaataatgtttacttatgtattcactgtaaatgaaaagattggcttgctaagagtctagtgtgatactacatatcttggagttgaatagttaaaacagtgcaacccttctaaacattctgattgtatctcagatctttgagcgtaaccctacaacgatcaagaactacggcatctggctgcgttaccagagcagaacaggttaccacaacatgtacaaggaataccgtgacactactctgaatggtgctgtggagcagatgtacaccgagatggcctctcgtcaccgtgtgaggttcccctgcattcagatcatcaagaccgcaacagttcacttcaagctctgcaagagggacaacactaagcagttccacaactcgaatatcaagttcccgctcgtgtaccgcaaggtcaggccgcccaccaggaagctgaagaccaccttcaaggcatctaggccgaacttgttcatgtgatctaccagtgtgtacccatgttctgcaatttagcccaagaatcaaaagattttgtctgtggaagttttggtgccctgctggttaggcatttccagtttcatatccaaatgatgcttaggcatttccagttacccttccaaatgatgctttgcaaacccttgaatttcctcgtattagtaatcagcagacttcttgttacttcaacctggctcacttggaagtgttgatccctgatgtgctattatttatctctgtaatttgtgatggcactgtctttctggtctggtcgaacgattacatattttacttcctgttcctgggtgttaagtcgctttgcattttattgattgcacccatcaatgctacattggcgtcaaatttggtcggagcactaagtatggcatgtacctaaccaaagggaatcagattcgcagctaattatgcgtccatggtttggtttcaggttgtttgaaaaagcatatgagtgaagagttggctttcgcagcctactctaaactattcccaggcaggacctattactcgattagccaattgatgcttttcgtgagctaacaattagagaacggtggttgttggaaaggagatcatgggcatgattacgcttcagatagctgcatttttcatgatatagtaactgacttttagcccaagatagtaataattccttaatgaagtagtatttgtgtagttagcatccgttagcacacttaagaagcagtgcagaaagaaggcacatttcagtcaggtgttaacaactcaatggtggttcaattcgaagaatcttcgcaagaatgcaaactaggaaagctcctcgcagctggtaaaatcatcagaactcacgaatttgtaccccaaaaggaggggacaggcgtggtgttcttgcagtgaaatgatccttcatcattttctcgaaggtttgaccatactgacttgtcaatttcactacaaactacgaagtaaaggatggtggtaacagcaaatgtactgatggtccatagagaaatagcatcaatttttcacctccactcaaaagagtggaagcagataatagtggcgtgaaccatttggtactgcaaggctgcagaaatttcacctttttctcatttgattcgtatggattcagtgtgagtgctttctggcccatttggccatgacctaatgagtgcaattgcagaaaccatagaacatatatgtcgtgtcttttctgaatttttcttcctgtctctgaactatttcttcttggcctttcatgcatgtgcatgtgagtgcagaattacagatatgtgcagcacgaatgcacaatctctcgtgtgcgtgtgtgtgtgtgtgagtgagtgagtgagagagagagagagagagagatgattgctcctatggagaaaaggctaaaaagaaggctgaattggtcggtcggtcatcataagagagtagcatttgcaaactgctgatccagtttcagagtctcagttatctctgaactctgaacccatcatttgcctctacacggatttgatctcctaatcaagaaacgcacgtacatttaccctgcacatcacggcatccaattaagccacagctacacaagtacaatcctaaaagaacaaaccaagaaaacctgtgtgctagcctacacgagtcgatagaaaacgagaagcaagaaagcgattagggaatggtgctgatcatgcttagctcgtcactttccgcttatacagcgaaatcccttgaccaaagcaggaccatctctgtccgtgcctgacaatgactgcttaacagttcatcccattaacaacaacttctacagaaataaagctctgaattctgttacgccatgcaaatctgaaatctttcagctctcctggtcagactttttcacatctttttttttatgctcacctctttttgttcgaggagaaatcacatgaaataaagcgatggatggatactcttgatcatacaatcaaaagagggtatctcgcaacatttccatgcacattgtagagtagagttggcatcaaacatgcagacatggagttggtaggagaccaagaggacgagattgctgggcctatggctcactagtcactactttctactactactactagctcctgtcaatggctgaggtgatgctgtttacattagcccgctgtttaagcattctgaactgctccactgagcagatccgaatcccagttcttttggtcaagacttcagataacatatcagagttgctaattgaaagcaaatactgcagatcgtctgagcttgaacgcactcaaaaacgactcatttgaaaatgaccaggtttagctagatgcaactgtactttaattgcaaggttaacgacatctagttgttggtgataaaatcatgcaataccattgacactgccatatgctaatctgtcggacaaatgaacagtaacaaggaaatgacacatggtggattactattttttttagtacaacacatggt

SEQ ID NO: 9453 - DNA, 2207 bp, Oryza sativa
cccccctcccccctccaatccaaccatttttccgcggactcatttgctgtatgtatggttgagtgcttgctaataggcagtttatttgtgaagaaatttggggattgagctgaatcagctgcatacagccatacagcaatcaacacagcagatggatttagaatcatgtatcagcatgcctgtgcctgtggtagctaggcacggggctaaattgctttcagcttatccatctgctgtatgactctcgtgctgtgttgattctcaaatcaattttacgctatgggctgccataacataaacatcttcagggtgtgttttgatttcagatcaacaggggaaattaagagtagatcctttttagcatatccactttagatacctttttacaaggcagtctgcttctttggttcataaattttctatgactgtattgaacagtactcttatatttcttttagtgttttataagtgagtacagctcttaattgctgaacagttgctatctcaaccattgtaattttgtaaatctgcttggcgagaacctcattgcatatttatagctcaaaacttgactctcaactcacaagttacatagttggttaaaaaaacacactaaaaactcagggttaaagattgatctcagggctcttgtttagatcctgtccgttgccttttctcttttccatgtaaacagacaatttaaaaaaatgaaagaaaagaagaaactaattcttcatggtgtaatgctttataaattgtgtcatctactcatgtgtggtaggtcaaaacatactaacattgagttataaccgattcagaatatgtttatgctccacttttgtttttccgagttagtatgatagatcatcgcacttttattattgttcaattcattgataactcatgtaatgtcttggaaaacttgtgtgcatctataccttatccaggttgatctactcttgtccagtcatttctgcagtttgcccccagtacctctttgaggaccaatattggtgcaaataacatgttgatagtgcaaacatattaatgataaattcaattttagaacatatgcaaacaactgttagaaagttatgtatgaccagcacatttggtttctacattatttgtccaaaaaggatgggtcaattgctgtacctaccctccattgataatgccaaaaatattgcatataagcattatagttattcttgatgcttagttactcaggcatgttcctcgtacttctacattattatttatttttttccatgattttatttcacatttcctcttccatcggtgtatgtcctagtttttatccaaatgattttggtagctttgggatatatcatgtcataaggatctgaattggtgcagcttgttgaaacatatacagtatgtcggggaagccatctgatgatacaacaggtcaagtgaggcccgaagtagatggttccgatgagaaagtagaaattgccaaccagaatgaaaaagaggtgatgccttcacctcaggaagaggtactgtgttttcttaacatttgtgattttagtccattagcaccttatttcatactatagtggttaactgggtatttgcaggaagcagcaataaagaaaaagtatggtggaatagttcccagaaagccagcgcttatagccaaggtaaccatcattgccttggaatctgattcaccctcttatacagataccattgtacaacatctataattctatatatgaaacagttagagaaattgatttaatattatctccatatccatgttatttacttatgctgaaaatgtaaaatgttttttcaggatcatgagcgagcttactttgattctgctgattgggctttggggaaggtattgtcatcttatttccaaagtgaaaactaactttcatgcgatgctctggacaagcaatgcggttctcaataaaatgtcattcacctgatctcggcttcctgcagcaaggaggacaccctcaaaaacctaaagggccgcttgaagcactccgaccaaaattgcaggtgctaaaactcgttgcctttttagaatgtacttacattgtaggattgatactttcttacgttggcgtgaagtcaaactggatgattaggatatctgggaaatctacctaatgtttatccatgctgttggttcttttcgcttagtaaccattgtacagcactgaatg

SEQ ID NO: 9454 - DNA, 4822 bp, Oryza sativa
aaaaacagattttttgcgtcaccatttgtcatcaaaagtcaagtgagacccatcaaggtaaataccaccctaagcattactaatagtatcctaagcatccgactcacagccctcgtggacttgcttgaaacaaacaaacatgtgaaacacagaaacctaagttatccttggttacatacatgtgaaagaaagatacagacaaaattatctaagttatcctgcaaaactcaccaccgacttctgcaacttcaactacgatgctacaggttgattgcccggtgcatgagcaccactggtttcttgcttaaatattactgttacctaggcttgcaagttgcttgaacaatatagcaagcaatgaagcgtgtgttgtgtgtggacacaaatcaaattaaatctgcagagagaggggaagaagccaagcaaaagaaattaaaggcagagagattagttttggcagcgtgtgacacatctcggttagttgggggatcggtctcgcggttcggcgccaacggaacgcgccacctactccaccgcgctgacgaagccatcgctgacaaaatacgtcctgtgctcgagtcaccctttagatttaacaaaaaaaatgatcaatttccatcagttttgtttcagaaaataatgctactgtcccatatgattcttttccccggatactactacagagaatcaagattattcttgttggaacctgctctatctgtctcaatataaattaatcttttgtgccagatctagatgtgactttgggtctaaattcaccgtacatcctcacatcccgtacaaaattgatttattttgggacgaagagagtatttcgttgtggtgacatgtatttgcagacattattgctaatatacgtccttttcataatcattctagatataaatcagtgtgattgaaatcttgatcattttggttctccgtaacttctagaatcctattcgaaccgatgcttcttgtcttcttgaccacaatactccctccgtgcaattcgtacacacaatttcacattatgttgcctatacaatattaggttggatcaacccaatatcgaaatgttagcatttgccatttagtttatcttaatagacacttcgatccatcttcacatacaaaaaaacacacaatcccatattaagatttctatacaacaaacgctattctagtcacaccaacaatatccgaatatcacacgagaaaatcccaaatttattcgtcacggaagacgcttggatccttcttcacacgcaaagccaccaaggcggcagcagcagcagcaaccattttcacatggataccgaaaatacccctacaaatacccctaggtccacctcgactcaactgtcatggaagggcaagaccgtccattcccccaaaaaggccacgtcacccaccgtggatggtagagctgcttggtttttaacacaccaccaccaccaccaccaccaccgcaccgctacactactcggctcggctgcttcttcttctccttctcctcatcctccacatcgctgcggattcgagcggcgaggcttggattttctcccggcgagatctccccggcggccgtctcgcgatgcctgaggcaaatgcgggtgggcgggcggcgccggcggcggagcagcggagcaaggtgggtggtggccgtgggagaacactaaagatttcgctgctgcttcgttttgtttctctgggttcttggggttcgtcgccgtgttcatctgaacttggataggctggacgaattggtgtttttttttgttttttttgggggattgtgggttctgatccgaagaagtttggtgtcctgctcctgcgcgtgagcgtaaacggcgtcaggaaattgctcccggatttggagcggattcttgccttgtaggaagatcctatcctatcatatcctatcctacctgagctttgcgagcgtttcctgaaatctttcctgtgcatctgcaagaagccatttatctctttccttaaaacgtagtctcctactacaaggctgattgacttgtataaacgctactattagcccgtaataacacggtaattcttgtttggttcaaaatcttggggtaatgggtaagtttatcctaatccaagcaagctgtattttctttccgggatatagcactgtagatatctttgcccacttaaaaaaaaggaggtatatttttacttataggtttgagccaaaggtgtatcttttccagactgatcattagacttgtcaagaattagggcgatcattagttcaccacagcgggagccgggagtagaggtcaggtcagtttttgtttggtcaggctgcagtgtatctgtatgtttctgtaatccggttctgtgaattacttgttgcagaccttcagtctgtggtttccagtcgtcgagcatagactaggcaaaggttactgtttcattggtttttgtttttgcctttttggttgtgatgtctttggtgcaaggagtattattaggagttcaattgcaagctgtatgtaattggttaactttttttttttggcaaagcttcttagtatcccgataatgcgaaacccttggttttgtgattagttgtgttgcagctgcttagctcttggggaagatgtaactcagtgaatttgtgctttgttccaattcacatgccattgcctaaattatgtaattgttcttggatgccattgtgttttgagacagagtgctgaattttcaatcttgaattttgtccagaacacaacagagatggatttcttcagtgaatatggtgactccagccgatacaaaattcaagaaatcgttggtaaaggaagttatggagttgtttgttcagctattgaccaacataccggtgacaaagtagcaatcaagaaaatacacaatatctttgagcatctatctgatgctgctaggatcctccgtgagatcaaacttctccggcttttacggcatcctgatattgtcgagatcaaacatataatgttacctccatctagaagggacttcaaagatatttatgttgtcttcgaactgatggatacagacctccaccaggttattaaggctaatgatgacttaacgaaggaacatcatcagttctttctgtatcaaatgcttcgagcattgaaatatatccatactggtaagcatattatgaaatcttacctaccctctgaaagttcttctatcatggtatcacattggagcttctctgagttaggattatgagcaattctaagtagtgcatttgcacaaaaagttacagttttctattaagcaatgcgatagtcttagtcttattgtcctgtgcattcttgaagtagcagtcgaaattttcctagtgccatttcttctgtcttgtctgtatggtgttaaccatgattctattgatttcccaagatagctgtgaggttcagattatatagagctcttctctttgtattgaaatttctttgacataagtgccaattgccaaaaatgtgctctcaattcaatagctatcaagtcgtgttcagttcagaaagtcttctgttgtatgaatcctgttcaaattctgtctttggatctgctagctgcagtaactaaatttattatatctcaattgagcattgagtatttatctatgttctgatgagaagtctttgtgggtgcagctaatgtttatcatcgtgatttaaagcccaaaaatatattagcaaatgctaactgtaagctcaagatatgtgattttggactagcaagagttgcatttaatgacactcctacaacagttttctggacggtatgttattttcaacactaagttctctatggaaaactagatgccatgtcgtgttccataccaaagaatttgtcatgcaacataagtctcactgtctgcttcaccatgcaacaggactacgttgcaactagatggtacagggctcctgagctgtgtgggtctttcttttctaaggtataatcaaatttcccaacctgtgggttgctttatcagagtattatttcgtgtgctcttcattttcatagggctctacagcataagaaattttagcaacatgttccaatttcttcttcttatctattgaaattgaccttgagatgccacacacatacacataaagagcaataaaattaaggactgagattctacatggttggtgcgtaggtcagtgtccttctttggttattatatgtcagttagttttagagtagtgtagcagcatattaatagcaggctgcttgttcaggaacatatttttgacaagccaaaatacactgcttaatgttgcaggtactcctgtaaaatctgctgtagttgttttttgttatccctaccttcatttttacctccattcctatgctaagttggtgatactaaattgattcttttctgcagtattcaccagctatagatacatggagtattggttgcatttttgcggagattttgactggaaaacctttgttccctggtaaaaatgtggttcatcaattggacttgatgactgatctcttgggtacaccatcaatggatgctatttcaagggtatgacttattattattatcagaaacattgacatgtttaattctccagcacaaattattccaggtctgatttttccatgttttgactgcttcagattcggaatgacaaggcaaggaggtatctgagcagcatgaggaggaagcagccagtacctttttcagaaaagttcccaaatgtagatcctttggcactcaagctcttacaaaggcttctagcatttgatccgaaggatcgacctactgcagaagaggcatgca

SEQ ID NO: 9455 - DNA, 15256 bp, Oryza sativa
cgtatgcacgatgactgaactggagtggtgaaccgaatccgaatccgaattgatcgagatcgattgaaccgtgtaccgatattgttgtgctgctctgtatgtccatcggctttattctttctcttattttttttggggttataaaatttcttgttgatttgtatttgtaatttatgtgatatacttactagagtgtactttttttttcccattggattctaccgcatgaatcatttcaaaattttcgatctggatctggggcatgtgtcacggctcacaataacgacatccactgatgcttagaaaaagtacgagtaggtgtgggtggccgctgccgctactgctgccagatccaaaacacgagagaggttggtagtggcagcagcctgagcagcacgtcgatcggtgcaatgcacagtagtagatgacacagtagatctcagcaattgttgcatgcattccagcgatgtttcgctgtccgtctcgtggcgaagaagatctactgggtgcaatgcaaacgcaagcgatcgttttcgctgccagaagcgacaccgcaccaaacgacgatcgatactgcctagtagtactacactgtgtttgcacaatcaccacccatctctttgtacttgcaaaaaccaaagagaaaaaagaaccaaaacactccaattccatagaaaataaacttaatatgaaatgtgacacattctatcatattgttacgaatttggatagaaatccgttcagtacattgaaaacatatactcagatttttggcatacccatatattggagatgaacatctgggaatggaatctgtcacagaagtaattgatcaagctgatttttcgtgtacgcagtggaggagctgagcagagcggcgtataaagtattttcaggtactatacagcggatgggaggaacagagcatctgatccggctttgcctcacatggaacctacctacctactactaccagctctggatccgggcttgagcttccggttcttgtttgtgccgtgccggtgataaagtaatcggtggtggctacctcggtcttgcccatacatgtgatcctagtaatgaaccaaattaattttctacggatctctctctgggcaggttaacgttgtgcgcttttgagagtagtttggttcggtatccgttggattttacgttcgtagaagaatttaagtgcatttgaaattgagcatgctctcgtgtagccattcctgtggataaattaagtggtggaggttatatgcttatcaatttatgcccccggaaaataataatacaattttcgttcagcttagtctatgtacgtacaagttaatacgttggacatcttaggacagaatttacatcctactctcaaactgcattttctttttgttccagctgaatgggcaccaaatgttagaatatactccctcctacactaaatatttgacaccattaatttttttaaacatgtttaaccgttcgtcttattcaaaaacttttataaaatatgtaaaactatatgtatatataaaagtatatttaacaataaatcaaatgatagaaaaagaattaataattacttaatttttttaataagacgaacggtcaatcatttttaaaaaagtcaacggtgtcaaacattttgggatggagggagtatgtctaatatactagttttatttggttatacttgcactcttagagactaggtactactccctccgtattttaatgtatgactccgttgactttttaaccaatgtttgaccatttgttttatttaaaaaatttatgttattatcatttattttactgtgacttgattaatcatcaaatgttctttaagcatgatataaatatttttatatttacacaaaaaatttgaataagacgaatggtcaaacgttgattaaaaagtcaacgacatcatacattaaaatacggagggagtactatattgattgggaatgagtgtctttaatcagagctccgaaaatgtaggtttcagctgaattttgttaagagcaagtttaatagtatagccaactactagctccaattcatctatagccaatctaatagctcattcatataatagttaaatactacactattaatatctggtcccacctgccatacacacactgtgtcttggagtccgtgttacagctggctacaaatctgtagcccgctgctcttctctctccttattcatcttcttaaaatatgtttgcagctggcttatagcttgctattgtacctgctctaacaatagcacgtgtttatgtatcgttatatggcgtctcttaggctattaatgactaacatcgtttcgccatatgactaaattttataacattaaattacacgcctgcatacacttaaaaagagagagggataaagttgagttttgggctacacttaaaaaagcgggccacacgcctctctaagctggcccatagaaaaggaaaggctcacattagctatctctcattgggcccctgccaaaccgagcccacttaacacttgctcctgaaggcccaaatatcggcccataataatatccccggtaatggatgggcctaaattctgaacagggttggctaagctgccgccgccggtcttgccctctcgcggagcgatgcatcgataggcatggaatggccgtgttcagcagagaagaagctttcttgtccaatcggttcggccggtgacgcaagagacttgacgtgtacgtgtgtttgtgtgtgcagtacacgaatccatgcgtgcgtggtcgagcgcgttgggacaacgtggctcacgaacaccaagggctatacatcccggtgaggtacggtggcagttgtcaggcatgcagcagctgacgccgcccggaagcctgatctgatctgccgacgacaaggcgaaggcgagatttgagtttagaactactagcatcatcatttcgtacaagttttatgcgtaaattattttttataagcataagtatatgttaaatgatgggctataatgctagagtgacgtatatatatctcatggctcgtttggatctaaggggctccctgaaaattcttatcatttaagagtatttaataaagtttatgtataaaactacttggagaacctcttagctaatttgcaagacgaatctgtcagggttacgggttagatataccctttgcccttcgatatacgttacatatcgatatggcatacccacgcgcatgcggatatttcctgtatattctaaggaaacctttcacggaatctatagatgaaaagaatcctactcggacagaactgggtcgttgacgtatcgtatagggtctgatacctccgagttctatgaggagacctccacatctgctatataaaagaggcccccgggggggtttagacatcgaatctcagagccaacacaacctccacagcctacgaagccggagcttacgaggagccaagtcatcgagagctagtcgaatcaactcgactacaatctcgccggatccgacaagttcccttgttctctttgtaacctttgttttctaccatataatcccatatcaactggattagggctattacctatcaaggggcctgaaccagtataattcttgtcttttgtttgcttgatgtcgtactacgtagatccttgtaccaacgtactccaataccctctatatccggtctacgggtatcacccgtcaacagtggcgcgccaggtaggggtccttggtactcaaggttctactactatgtcatccaacttcgtcgacaacaacgtcagcaccagcctcagccaagtactccctgcttcaacaatgctggtatggactcaagtcggcgaaatcgtcttcccggtttacaccacgacgccgatctcaaccagtcctccaatgaccgtagacgagaacgcagtggctacgaaccaaggcgattccatgtcgaaaaatcctcccgtcgagacggagaacagaatatcgacgacatccaagctcaagaaggattctgatacggccaaaccttgtccttccgacatgaaccacgagccgacaaagatgacttccgaagccacaaggtcttggtgtcctatccacaaaaccaagaaacacaccctgcaagattgctgggttttccttaacgtccgtgctgaaattcgcgcctgcaaagaacgtggaattcagcgtacttctccaactcgggatgtctattgtcctattcacaagacaaagaatcacgacctctcgagctgcaaagtctttctcggcgccatgaaagctcagtctcctaagtcatatatccccatcagggataacggcaaggaacaaggagcgactccaacttcagatcgattcgttggggtaatcgatatcgatcctcacgaaccatcggtcttacatctcctcgaggactatgggtcatcgacaacgagcgcgccgcgggaggtattggctatcgatgacgttggcacgtcagcgcacgccaacacagtagcggggaatcaatcgactactccagcccagcacatcagggccgttcaagcgatactgagggaaactccctacgatcccgttctgaacgttgacctcgagcgttggacagaacgactacgggaatcggtgactaacctcagcaacgcgtttgaagaagccgctaccgcagcacaccaggagcagccaccaactagcgaggccaatggtgaagatccggaatggagggaatcacctcaacaagctacccctccacctcgcggcactggcgatcttcgagatcaaatcaacggccgctgggaagcacgacgcacacgagacaacgtgaatcgctctcggcgtcatgtctcttcacggcgccatgataacagaaatcgaggaaatcgctcaaacgaggaccgggaccacggcaatcaccacgatcacaacgatcgagaacgacgggggccagataatactggtcatggccgccgccgtatcgacgacgacgatggagatcggcaccgagacaacagtgcaagacgacgacaggattcccgagatccaggccgtcatcctcgtaatcgtacgccggaaccaagtgtaggatcaaggaggccgactagagggggggtgaataggcggttttaaaacttaatggcacttaaacaaaactaatctaagttgctaggcaaggtgaggtgcaaggttaactaagcaactaagttaagttttgcaaacctaggtgatatgggctcaaatatgtctctatgaatgtaaattgcacaaatgtaaatgcaacaaataaatgagacaagagacaaggaatttttcaccgaggttcggaaactcgccggtttcctaatcctcgttgaggcgagcccaactccactgctcaaccacgaagccaccgcacgcccccttcatcaaggggtgggcaaggtgggagccggcccacggagaggactacccaagcctcgatcactagggtagttcttccttcactccgaaggtggtgaactctaaaccactcacaaacagcgccgggcctcctccacaatctcctcggagaggtcaccgggcaacacctccacaagccgtctaggaggcggcaacctccaagagtaacaagtctaggatgcttgccgaggatgatcaagtgccacactagctataacaatgaagcaatgcacttggattggcttaactcactctctaacacctcactagataaactaagtgcacaagggtgtgagagctcttgcaagggttcaagataatgcaatggagtgccaaaaccttacccttactactggggagtgggtatatatacccccaaccaccaaaactagccgttggagtcgaaatactcaactctgtgctccgccggtcagaccgccatagagtggccggtcagaccggactactatgtaacggctagttacagggcaatcattgagcccactcaacctggccggtctgaccgcagtgtagcggccggtcagaccgtccacggctcggtcagaccgtcatcggctcggtctgaccggttgcagctctggcggctctgtatcgccaccaaaaaacagaccagtgcaacagaccagtggggccggtcagaccggccttaccaggtcggtcagaccggctaacagctccggtcagaccgacctaaggcccacggtcagaccgcaggtcacttttcagcacaaccaaccgttagtaaaacgacgatatctcttgactcgagtctcggaatttgacgttcttggactctatggaaagcttattcaaagggctatccaacccatgaaaaatccatccaagaaacataacttaagtcaaggataaagggctcacactccaaaggatatccaccggacatagccacaagatgtcactcactcctattggacatgcccacttctctcttggtttaggacttgagaaaactcatcacacttggttagacaagccccaaaaatgcacctacatgcatatgaactaatatggcacaagatcatccacaagctcgcttcatagactcctcttgatagtacggcgtctatctagcaaatccggtctacaccaaacaccaagaccgggaaaagactaagaaaacattcttagctacattatacctttgccttgcgccatccatcttggggtcaagcttgagccgagatcaacacttgtgaccatccggttgaaccatgtttatgccgaggtcttgtccatactttgtcaagactttattctcatcacaagcttgacttcattcttgccaacatgacgatgcatttggcttggcgaccactaacccatggtgtcattcattagcctcatcgtagtgggacctattccttttcacacctcaaaggagaacattagtctcaacaaatcagttgtcatccttcacttgatgaccaaccggttgcatatgaaagatatggatatgtttgttgagtattcgttaacatcacaagtgtcacatactcgtatgcaagctcaggtgtaaagatccgatataaataataggtgaacaacatggatctagaacatgcacaataaatgtataggatttgctccccctaaatatatgcatacaaataaatatacaagagatgcaagtgtatgcataattagagaatgaccaatgggggtttatcctatacatatagagaaggcatatgtagtaatgatgtagaccaacataaaacatataccttcatgatctccatgttctcaatgtaaatgagactaaataagataagactcgagtaaacattagtctcacacttatatatcaataacatagaaatcatatatatgaacctatcaaaaagtaggagataagaagtagtacatatcgttttatcttcatgtatttcatccttgtcatgattaaggtccatcacaaaagaatgcatgtcttccacatctcattatcaggaaataacctagtagacaacttatgcaaaagagaggttaatcccataaacatcggtttatcatctatcaccaaagtaacaattacacaaattgtttaatccaagatctttcaatcttttctctctttggtgatggataataacccgatataaacaatatagagagatgagatgaaaaatgatttcaaatcaagataaaaatcttataataaacaaaatatagaataagctccccctcaagatgtgcatacatatggatatgaaggaacgcatatgcacataatcaataaagatcaaataggaagctcacactatattttggatccacaagagagaccaagttagaatatgtgaagtttaatacatacctctcatcatttttactttcatatccaaatgagactagtcaaagaaaggctcataaaaacgttagtctcatataattaaatttgtcattaatcaccgaaaccaaattaaggcatttaaacatacaccaagcgacccatcgtcatcgtcatcatccgcatcctcctcatcgtcagacagacatccacgaaggacacacgaccgccggcaacccaccgcccccaacgctgggtgtagagctttcggtcgttccctacgtgatgtccgatggcctgagagattccgacccggagcaatagaaaagtatgatgggagcaccgacccaaaggagttccttcaagtctactccacagtactctatgctgccggagcagacgacaacgcgttagcgaactatttaccaactgcgttgaagggttctgcacgttcatggctgatgcatcttcctccctactcaatctcttcgtgggcagacctgcggcaacaattcatcgccaatttccaaggaacatacaagcgccacgcgatcgaagacgacctacacgcgttgacacagaactcgggtgaatcattgagggaatatgttcgacgtttaaacgagtgcagaaacacaattcctgaaatcaccgacgcttctgtaattcgcgccttcaaatccggtgtcagagatcgctacactacccaggagttggcgacaagacgcatcacaaccactcggagattattcgagattgttgagcaatgcgcctacgctgatgatgcgctaagacgcaagaacgataggccgaagaccgggggagagaagaaaccagccacggatacatctgagtcaagcaagaagaaaaatcgcaaaaatgggaaaaggaaagctcaagcggaagtcctcgcagcagaatacgcgaaccctcccaaacgtctagacccacaaagcagcgacacaaagaaatcatggtgcctcatacacaagacggatagacattctctggaagattgccttgttttcaaaaagtcgctcgagaagcacatggcatttgaaaaaggcaagcgagtacgcgttgtcgagatgaacgaagagacggctcctcacgaaccggactcagcgtatccagactccgacctccacgtctcacacatcttcggcggttccacaacgtactcctcaaagcgagaatataagaaagtggaacgtgaagtctgctcgacatggcaaggggctgcacccaagatgaagtggtctgagcagaagatagagttctcggaagaagaccaccccaagaccgccgttatcccaggacaatatccgatcgtggtcgaacctactattcggaacttcaaggtagcgcgagttctcattgacggtggtagctcaatcaatcttcttttcgccagcactttggacacgatgggaattccgcaaagcgagttgacaccaactgatcaacccttccatggaattactccccaatcatcgtccagacctttgggcaagattatgttgcccatgactttcggccaagccaacaacttccgaacagaacagatcacctttgatgttgctgaattcgatacagcttacaacgccatcatcgggagaactgcacttgcgaaattcatggccgcatctcactacgcatatcaagtgcttaagatgccgggaccgaagggaacaatcactattcaggggaacacaaagctggcggtgcaatgcgacaagcggagcctcgacatggtcgagcaaacgcccagcccacccgccacgaccgagccacccaagaaagtgaccaagacaaacaagacgccgaaaccagacggcgccatcaagattgttccactctccagtgccaaccccgacaagactgtcaagatcggagtgacactaaacgagaaataggaactcgcgctcatcaccttcctctgcgacaacgccgacgtgttcgcttggcagccgtccgacatgccgggggtccccagggaggtgattgagcacaaactcatggtgcgacccgatgccaagccagtaaagcaaagactgcggagatttgcaccagaccggaaacaagccaaacgagaagagctcgacaaacttctcaaagctggcttcatcagagaagtatttcatccagagtggctagccaatccagtcatggtgcggaagtccaacggaaaatggagaatgtgcgtcgacttcaccgacctcaacaaggcgtgccccaaggatcactttccacttcctcgaatagaccaactggtggattcaacagccggttgcgagttattgagcttcctcgacgcttactctggctaccaccaaatcagcatggcaaaagaggacaaagagaagacagcattcatcacgccgttcgaggtattttgctatgttaagatgccgttcggattgataacagctgggaatactttccagcgcacggtccagggcgcacttagcaaccagcttggcaataatgtcgaggcttacgtcgacgacatcgttgtcaaaaccaagacaggcgactcattgattgacgatctgcgggaaacgttcgacaacctccgacgatatcgcctcatgctcaatcttgagaagtgcacgttcactttctgagatgacgccacctgatggtccgcgagcggtccgatgatatcagtcaaaggaagggcctacgctcaatcaagtcataaagtgatttcgaaaggagaatgcgggatgttcatcgaatatacttatgttgatggcttcatcatgttccgctgcccccttttcacaaaggggcacagggatgtcactcgccgtggtcgggccattggtcatcacttggccgacgcggcgctccacggtttcgccgctcagacctgttaattaagaaccaacctttgataagtcaagaggaatgcgaacacaagtatgtcaagataaatgcgagaaagataccccgaggagaaacccgggtcacgtcctctggctcagaatagttataagctggatgggcccgagcctgaagcagatggatccgcctaccaacgaagtctgcaacgacttcatatcccgacaaaccccgtactcggagatcgtcgatgatgtcgataaacgactgaagagagggggtcaaggggggctttgcggtccaagacggaatcttgtccggttgatcttcgggaaccacgaagacagggttcgagtccttgatctcaagataaaaccacctattcctccacttgctgcgagaagaagggcactggaagggaatgtaatgcgacttcaggccatcccgaagtcggaacccgacgcaaccagataccctattggattccatccaacgcagttcgtagtaaaagcgaaaaagatcaaggaaatgctctaccccaatgtaggcctcacaaagatgcacaaagatgctaaggaaggcgatggaattggggttcaaatggagaagagagaggccatagaaattcaaaaccaggagaagaaattcggaaggtggagggagaaaaccgcagagaacataatcttcgatcgcaaccatgcgacccaagatgggctgaggattagtacctcctgcttccctctccatggttccacggccaggaagagcgccatcctcctggagtttcttcaacgttgcattggtggaagctgatttgccgaggtccattgctgatcgaaggtcgccgaaaagcgagcttaggttgatgaactagggtttcttgcggcggcagagaaggcaaagagtgcttggaggtggtgtgtgtttaacaggtttggcggacttcaagatggactcccaaaattcctttaaataggcgcactaccgacggtgcgaattccagggaacagagagagatacccgccggaaatttctggtcccgttacgcgtggcggttttttggacttcagtttaaaattcgctcacgaccattgagcttcgaatggcgtgctcgactacggtctatctccgcggttctcgcaccgggaatgacagcagtctcgacacccgaagtcgcaaatggttgcacgagttcattttaagcagaagtcgggggctactgtcagggttacgggttaggcataccctttgcccttcgatatacgttacatatcgatatggcatacccacgcgcatgcggatatttcctgtatattctaaggaaacctttcacggaatctatagatgggaagaatcctactcgggcagaactgggtcgttggcatatagtatagggtctgatacctccgagttctatgaggagacctccacatctgcgatataaaaggggccccccgggggggttagacatcgaatctcagagccaacacaacctccacagcctacgaagccggagcttacgaggagccaagtcatcgagagctagtcgaatcaactcgactgcaatctcgccggatccgacaagttcccttgttctctttgtaacctgtgttttctaccatataatcccatatcaactggattagggctattacctatcaaggggcctgaaccagtataattcttgtcttttgtttgcttgatgccgtactacgtagatccttgtaccaacgtaccccaataccctctaacaagatatattaatctatgattagcggatgattactatagcatcactacaacagatcatggattaattaggctcgttagattcgtctcgcaaattagccttggggttatgaaatgagttttgtcggtaataaaacctaataatgccacgaacttacttaaaatatgacacaaatttagcaataatatatatttcatagcattacaaatccactaaaagcaacatttgagttcaaaagtgcaacttaaatagtttcaaagttgctttagcaaaaaccattccatacgaattttaaaggaattggtagaaaataatcatttatttcaaagtaacctatataattatttttcataggataaaattctctagaatttctctgcctttttccattgtttcaaaagagagcctaattacatggttgctggtctccgtcgacgtccatttggcggccgtagagcaagttgggggcggtcgatcggtcggactgtccaggccgggggcggggtcttctctgccgcgatcgacgtacgacgtgacgtgtgcggttgcgcgcgcgtcgtcgtgcatgcatgatattatgatatggtgggtgacgcagctacggatcatgccgcgatgtgcttccgtgtccgccttggaaattattaactggccccttgttagttaaccggccgccttttggttttgaagcaattaaccgcaatcaacacgagcaaatgattttgggggggtgggggggggggggaaggtgaatcacatcggagctggattaattagcgtcagactctacacaggtgcatgcatattgggatgcagttacgagtacctaactcattattctgcaggtaagtttaccatgacaaaaaatcgaccgtggtaattgtcaggaaacttatatagatacacttcatcatgcgcttcaataattaatgagttttgagaagcggacggcatggagtacgtacgtgtgacgactaaacaatctttaattgtcgcaagccaacgactgatgttcgatcgatgaagatgccagctcgatgccgctcgccctatctgaacagagggaggaatggttcagccagcagaagccaactgtttacgtcacccatgatctgtatcctttttagctcgccatggacacgcgaaaaacaagcacataccaacaccaatacgtcgtcagacacttactacacgtcgtgcgagcatgcacacacgtacacatatccattcttacatacgtgatcaacgaagcaatcaattaatccagaaaacaaatgaaaacccagcggccgatcgactgaatggatcaaattaaccatttacagatcgattaagcctctatctagatcccactactaatttgtgagacgaatcttttaaacctaattgctccatgatttgataatttggtgctataaacatttgctagtaacggattaactagacttaataaattcgtctcatggtttactgacggattctataattatatttttgttagtgtccgaacacctcgtacgacattctatataataaccgatgttacatgtcaaaatttaaacacctctaatagatcgaattggatgagatagtactgtagctgcaagaggagatgtccaagtccaatcaaatcacgtcatcgtctcgaacgagcgcatcgatctgccgacgccgtattgcaatcgaaaccttgggcggatcgatcgacgtccgcatccgatcccatacctgctgctgcggcgaacacccggtgctgatgatgatgcagagctgatcaattgatgattggattctttccccaacttggccatggcaaccgatgaagtgacatggtacaatgggcctgtttggttttcagggacttatttctaattcttgtcatatcggatgtttggacactaatttggagtattaaacatatactaattacaaaactcattccataagcttggactaattcgcgagacgaatcttttgagtctaattacgccatgattttgacaatgtgatgctacagtaaacttttgataattatggattaattaggcttaaaaaaatcgtctcgcggattagctctcatttatgaaattaattttttttattagtctatgtttaatactctaaattagcgtccaaacatccgatgtgacataggctaaaaagttttagtcccatctaaacaccccctatactagttgcacttgcacggcttggaagttggaacaggagctgtttgaacgtgtgaggatgatcaacagttgataattaattagtgtcataatccaatgttgccgtgcttactacaccaaattgacactgttggtatactttagcagcagaagcagatcatatcttttttttttaagacttaagcagattacttacttctatatcattgtcaggtcggctcagtgctaccacgacgttcaaatcaaatctaccacgacgtcctcgtggcgattaatcccggccgtccatgtgggcaccagggccccacacgagaccccatccgcacgtcaccctccacgtcatggattcggcgggcgcgcgcgcgcgcgtcgggtgggccccgcagccccctcccccaaaccgcggctgacgccccgccacgtcacgcccgacccgccgcggttgggcgcgaaccgggtcgccgtcctctccagcctttgcgcgtgggacccaccgaaaccgaccggccggctggcgtcacgaccccccgccgtgacgtcaccggcctatatatatcgcggtggctctcggtgcgctctgcccagcacaatttgcatttcgcacgcagagaagagaaaaaaaaagggaaaaagaaaatgtaccaggcgatcccgtacaacgcgaaccgggcttggccggcggcgagccggccggcgacggcgg

SEQ ID NO: 9456 - DNA, 10586 bp, Oryza sativa
cataggtttctgtgtttcacatgtttgtttgtttcaagcaagtccacgagggctgtgagtcggatgcttaggatactattagtaatgcttagggtggtatttaccttgatgggtctcacttgacttttgatgacaaatggtgacgcagaaaatctgtttttctttcgtcacccacattcgttgtcaatgtgtagatgaatgcactcgtcaagtaggattagtagtaatccctccagtttcataattcccgacgttttggataaagttaatatcaaacttttataactttgattataaatatcttttaaaatatttagtttaaaggcactaaaacaacatatatagatttgtcttacaaaatactataataaaagtaaaattgtttttatttattgtgtacattgtaattgaaaaacatagtcaaagatatccaaattcatctgcatttaataaaggctagattctgccgaagcgaagtggaggccctgccagaggctgggcaggatcgtaataccttttagggtttcacctcaatatatatatatatatatatatatatatatatatatatatatatatatatatatatatatatatatatatatatacacatatacacctcttgtaagccgccatgcggtgttgtaacctcatctcgatatagcgaatatattttgctggctcacgaccgtggtttttctctcctactttgggagggttttccacattaaatcccgtgtcttctgtgattgatctattgttttttatcgtttgtttgtctatcgtttcctaacattttggagaacgtattattattcaaaacgtcaagaattatggaacaaagggagtaaaagtatattgtactttatcaccatattttggaaatggaatatattaattgtgaccaagttgttaattaatattgattatatctttgtccactactacaatataccaatataccttgagcggttatctgctctataaatatataaggcaactctccctccttttcttttcttgagcagttgagtgccctagctagtatatataagtatatatatatatatatatatatatatatcactgttgaatacgccaaggtggatcagaagcgtcgtcggtggcaccaaattgctgtgccggcaattttgtcacacctgctacagctaaattgtaccatatcctttttaaattacttcctatatttgaacttggggcaaaatggaatgggtattttcatccattagacccgattctcgcgggaaggatatgggagagaaaaataagaatatccttctatccgaggatatagagagttgtatccgtccgtatctctcatattatcaaatatatatgaaatatattataaatgcatctataaacatgataaaagattcgttagcactattttacgagctcacaagtaatattgtatatttctccatgatttatgtttttaatactctaattatcttcctaatgtaatatttattaattagagatacatgtagatgtctgttctcaaattcaatacggaggaaaaaatataggaggggtgagtatcatgttatccggtactaaccgtatttggttctgaacttgaacaaaaatatgagttagaatctgactcgatggcaaccatattgtgaccattcatttttttttggtaaatataaaaaatataggccatgcttagaatacctctagtgataaaacacaacaaagtaaataattattactttattttttaataggataaatggctaattaaatgtataaaagtaaattggaccatctattaaaaaccaaaggaaatatttacatcgatgtcgtgccgttggatcgatagagaaatatacgtgcacaacatgtgaatttgcgatcgccctattagagaaacagtatagcatcatgcaatgcaatgtttgcaagctagctagtactaacgaatcaagcacgagccacacacggcaaaacatctagttttaatttccgagtaaacagttacccggatgtgatatcttggggcgccaatcaaacgcggtcaacaagtatatgtatgcgtcttgatcgtctaattaataggacgaggtacgtgtggatcggttgatggacggcctagtcacctttcctctattaatacgccgtctatggcctcgtctattacataatccaagtagtagacgaggccatataaagtgagaaaatatgtagtacaaaccacatatacagtggaaacttagaaactaccgttggatcaagaaatggacgtccgagatttatccacgtcaccatgagttaaaatttaactcgtagagtcactccgagttaaattttaactcatggtgatgtggacgaatatcggacatccatttctcgatctaatggtagtttccaagttttcactatatatatggtttgcactacatattttcccatataaagttgagatcgatgtgtagatcaattggatcaataattcaatatataatagtaatagattgttaattagtcgttgagagcagcagcagcagctgcaactacactactagtagtagtgatcagtgaagtgtgaaagagtaaagaattggcggcgtggaacacgcatgacgcgtacgttggctgtgtggtcgttgttgccaatcagtagtagtagtagcgccacattgtgaacgtgaaaaatgcactcctccaccgctctcgcctcacctgcaggaagaagaagagatattttctcgggagtacacacgtttcggtgatcaaatcggtgccaataatactgccatgcaccgacgtacgtagcgtatgccgaggaggaggctggtggcttagctacgtcgcccgaatcaaaatgacagcctgcctgtgccgtgtgcgcgtgtggcccgtgattccctcctccgtcaccgcccacatgtgatctgatgatggatatgatctgctcgacgatttctgctactctgttcgcgttcgcgtacgcgtacgcggcgctcatccacgctgccgcgcgcgcggtgcttccgtgcatttcaactcgtgatcggtatcacggttttcgatagattttgacggcttttcaacagatttcgattgagttttgatcgaaatttattatttaacgtttgaagtttccaaaagcatttgaaattttttttcaaccgaaaaattaattccaaagccatatcaaaacatcgaaaaaccgtgaaaaccaatcggtttggagcagacgcgagcgagtacgggatgatgcgaccaccaaccgcggcttgcggacgcgagagccgttttcgcgggtggatttcacgtgagctaaccctctctcggtctcggctaaaagaattggagattttgaggaggaacgtacgagacgggaacacgagaagaacgagacgacgcgcgcgggagcagctagcgtagctgcactacactagaacggcgtccctttcaggctatcgcactccatcaccagcggctagctagagtactcgtagcttatttatgctaaggcgtgattaatggtcggccattattattttggtcaacttttttcccttgcccactccttacctctatccaaaagaaatggctggctctcctctcttgccaccctacgtttcctcacttacacgacagtaatcgctttgcctacgctcaactgcgtatagtatgcatgattgcctgtacactacatcatactatcagacagcaccacgaaaccgaggacctcgtttttgcttatgcttgtacttatcagctaaaatttaaattttcgatcttaaatttagaggtgattttaaagttttttattaaagtttattttttagcctttgcttacatatcgagataagaacacgtacataacaattttatttataaattatcttccgtttacaaatataccattttacttatttcccgaataaacgaaatgatgggtccatgagagtacgcacaaacctgagccacccaaagtatctccccgtgatttttctccctccaaccgcagcccagccgctccatctgctggctgtccatgtcccggacgatcggtgcatgacacggcaacacgccggtggatggccacgtttttggagcccggacatggacaaggaaatgaggtcccatcccatgccatcccaattgcccatgctacggaatccgggctcgccgctgtccgtgcacgcccgtatcggcgaatccggctgaaaaccacgccgacgaacctgaaaaaaagttactatgggcctcatcggtaagtaacttgcttggattgatcggtcaaagttttcttttccaatttaaccaaagcaattttattggttactccatctgtttaacagtgaaagttattctagcattttccacattaatactgatattaatgaatctagacgtatatatctatctagatttattaacatcaatataaatgtgaaaaatgctagaatgacttacattgtaaaacggagaaagtagcttactttgcttaaatggcttgatgaaggatctactatctatatttggttgaaagtacttaacctaatcagtgagatgatgtgcttcggctgaaaagttttagtccaaatagttatccgatgagaacctactcctactactaggatttttcacgtttccttgttttgctcagggtccagggctccaggcaattttccatgatgaagaacagcagaagaggttgtttcgttggcgtcagcgtcgtggggtcgggtcacttggggggcactcgaatccaaattattcttgaatgcgacgtgaggtatctacgtatggacaggaaggaccacagagaggagagctcgatgagtgcagcaggcagtgtgtgaactctactgattactgaaccaacaacctccgttttaggctactagtgtagcttaccttggctctccacgagggaataatagcagccagttgctgctgcctttcctgcgatgcaacctcttagattccttgtctctctctctccatagatgtgtgcttcacggatataaatcctctgcagcagtgactgacaggtggatccggtctcatatgtcagcggctgctactgcagctgcaggactgcagacaatccacgctggtgcttcactgctactgaaatccaaggcatatggccatttccagcggtttctttctgtatcggtgcttagtgcgatagcacgctatttgttggtactttcccttgtaccatcatgcctggtctgagttgagtggaccagccatggttgcctcctggccaatctgttttgctaatgcttgggataatactgtagtaatagcgatttggccatccattcgagtgcacgtaggaaatgggcatttcagccacgcttgacacgctttggctccaaggatacatacatcatgccaatttacaagcaataagtacaataattgtaagagtagtcaaggctggccgtgacgagtggtagtacaatgccatcgtgacagtgatgcagcgagcgtgtgtatcggataaccctgacacgtaaattaacccaggaacaaacaggtggcttatcgatgatgatgcgtatgggattataaatatgatgggtttgaaacggcattggttgacagcgttatgcaggcagtagaataatgctgtgaaactgacgcgagtaaacgggttctgcactgcaaggttgttgatgggtgcgtacgatccgattctcaccagccgtggtgacaacgatcgagagagaagttgagcaaggcataaacaaacgcaaacaggatcggctagtagccagtaggtcatcttggttgggaaagggatggaatggatggactgcgtgatcctgcgtgttgaatgtgtcacagactcaacagtcacatctaataagcctagcaaagctagcaacacagggagaaatgcagcccaagaaaggatatgcaacgactgaaaacttgtccaaatggaaaggccagtttagggagagcttgcagaatcgcagcccacagatgacagatggttgcatatgttctggttgtcaataagtttattgaactgtgaaagcgtatatgactacagaactgaattcattcttcagactaatgcaaagagtaagaaacaaaaattaacataaccaacagtctcaactcttcaaggaaggtaaaatctgaagatgaaacaagcatacttaaaatctgtaacatttgcagccaagacactaatcaaaacacaaggcaaagactgatacgctctgttaagtctagcagcttgaaatgaaatacagataaacgacagcttcagtagcaatcaacttggattactcatgtgtgctatatatgcctgcggtgtatcaaaaagccatgtagcagtaaaatccaagcttcatttctcccagttgcaaatattgcaatcctaactttggggtacagttcgttcaaaaaacttcgggggtacaaagaacaggattaagggcatcatggctctcaccacacttgctacttgctcgcagcaccgcaccagcagaaacgtattaaagccatataaaataatcaaatgcaagcttattaacgactagggcttattcagttcatatgatttccaaatcaaaggaataggaaaagtgaaggattaggatgtcacatgcactacattccttgggaatttttccaagagatctcacctcatgctaacaatcctacggaattagcttgtaataccacgatcctttggaatttggtaggatccattcctatgaaacaaatgatgcatataggaaaaaatcctaaggattcaattcctacaataatcctatgaaaaacaaccgaatgagccctaaaagtaatttgaggaaacaatgaggcacatgtaatggtttaaacatagtaacatggtcaataaacagccagaagtgatatcaaactaggagtaccaacatagtcattgagcgggcaacttagcatctttaagatgaaaaacagaacagttttatcatcgaccaaacaagaccactgtatcgataacaggcagttcaactcttaaatgtaaaccataaaaacagataattaaaccaaaaaggatctagctggcaacctgaagaggagcccttcaagcggcagcagcttctgcgctcttctcgccctcaccacctgcagaagctgctgcattgttcgcctcagcctctgccgctgcatccatttcctccgcggtagcatcaacatcatctgatggcggccgaacctgttcctcctccggaagtggctcttccacatagtcattctcaaatgcatcagaaggcacctcatagatcctcacttgtggcttcgctggatcttttacaagcacatactttccctcctcaaacttcatgcagatgtccacgatcgacttgacaattccccacatgtttgatgtgttgaggttgatctgtgtagcaaaatcccttggcttgtatcccataacagtgagtatggcatggttgtagtgatcacgggggtgcacacgtgacacatatcccaacttcatcatgtcagcaccagcaagcaaagcctggcaagtccagcgagcaagtttgttggcattgttcttgagctctgtagcgagcacagccccacgctgtgtctcaagcttctgcctccagtcaacaccagtaatcttaggatcaaactcattgagcgcattgagagtaaggaactgacgaccaccacctggatcagcattcacagcatgcacttcacagcgagcaacaatgctgatctcatcatccagcttccagcggcggtagcggtagccaacagatgctgcctcctcgccctcagaagcaaacgggttaggctcatcaaaggtaaccttctcaccatcgcgaagaagcacctgctgcgagaagttctggttgatgtaggtagcctcgacagccagggagtgcgcggagttgatatcatccttgttttctgggagctgctcctgcgcggtctcgttgacagatagcagatcgagctgggaaccatcacgcttgtcaaagaagagcttgttgccgacgcgctgcacgacgatgtcccacgagtggatgctgcggggtgtgcacataagcgcggcgaggatggcgtcggtggcgaacaccgtggccttgtcctcctcagccaggcggcggatgacagggtcgtcggtggtggtgaccttgaagaagttgcgagacttgaagcgctcgaggcggcgtgcggccttggggttgacgcgatcgaaggcgcggtcgtagtactcgacggcgccgcacaagaggaggtcctcgggctggtcggcgacggagaaggagagcttggtaaagttggcgaaggggatctgctcacgcatggtccagtcgggctggatgtcgacggaggacttggccgacgaggactggttgccgcggaagccggggtggtggtgggagcggttgttctggaagtggcgctcgcggcgggcgcgctccttctcggcctcgcggcggcgcgcctccacctcctcgtcgcggcgctgcgggagctgcggacgctggttgaagcgccacttggggccgaaccgcgggtggcgcggcggcggcttggcgtcgacgaggcggaacgaggagtcctccgcggcggcggcgagggagtcgtcgacggaggtgaagtcgaagacggagtcgcgggaggcggcggcgagggcggcggggcccgccgggttgcgcgtccagtcggcgatccgtcccagcttgtccgagcgggagaagggcgcgaaggggatggaggccgcggcggcgccaccgccaagggatgccggcgccggcgcggtgtcgggagggccccagccctccgggttgaaggcgacgacgccgacgtcgaagcccatggtgctcggcggcggaggcggtctggatccgggcggaggctgggggtggcggcgcgagggtttgggtggggagggagaggggaggaagagtggggaatttagggtttggaaataggatttttttttcctaatatttaaggggcatcgacttagcgacttggagcccggcccacatatcttctgtgtggcccacacgtaagcctctgggtttttagcccatcaggactcaagagtctcggtatcacccattcattttcttcattccaaaataaacaaacatataatataatgagatgtgatatatcctaatcatatgatgttcagacttatagtactaactatatttatttgtggatggtggaagtacttgattagtacaaattttgcgatggattagttctgaaatgtttcttattcagccttaacttgtttgcgagcatcacttggccatgtttagaacacggtaatttccagcctataactccggtttgatacagggtggtttgttagaggtatagatatacatgataagagatagagtaaatttcacaaaattacatattttgtggtccaagttgtagaaaaccacacgcactttgacacttgtcacttgagtacatatattttggtcgtgtagtttcacaaaactacactatcgatgtatagattcacccacaagatgatgtggctgtttcacctaggacgaggacatggcatcctattaccagccatcgcacgaaattaatacgatgccacgtccttatactagatgaaacaaccacgtcgtcatatcacgagtgaatccattcatcgatagtgtggttttgtgaaactaaactaccaaaatatatgtaattaagtgccaagtatcaaaatatgtgtggttttctacaacttgaaccataaaatatgtagttttgtgaaatttactctaagagataaaagagtcgaacacaaaccatagggatataaggaaatgttagaggttctgaatacaaacatcagatataggattagttctgaagctcttgttcaccctggactttgatgcgtttcaaaagtacaaatcatttgaccttgtttggaacatggcaatttccagcctaaaatcctggtagatacagaatgcttcatagggagttagtgtcaaaatttctatgaatttgagttggcaagtcaaaacatcgatctgaatcaataacacattaacagcaaagttaaacctttcatctggatcaagagagtaattccccacagttcagataaatgaacagcagccggctcagtacagtacaacaactaacaatcaacgcaagtaggaaaacacatattagaatgtctctttaactttccagtctcatagtcataggctattctgcataactgcattataaagcacaaaaggttatcactctccaagtttccttttgtttactcagatattcagtgcaacacaacgcctgttgcaattccgtctcagattgttacatgcatcaaaacagggagcatcaatataaggatgataccatgtcccaaaattcaaaaatgatttccaaaattcagctaaacctcacagaggcacgagcattacaggcgacggagtacttattaccgaagtaacaaattggcatgagcatagcagctggcaaaatcccgaacaaaaaagacaacttgttatagtcattctcgtatctaaaccgcgtacagtggttttgtggtgaaacttggaatcggttaaaagcaa

SEQ ID NO: 9457 - DNA, 15031 bp, Oryza sativa
atcgcagccatgggaacccgcagcgtggccttggtgctcctcgcggccgtgctgctccaagccctcctccccgcttcggcggcggagggtttggtgcggatcgcgctgaagaagcgcccgatcgacgagaacagccgcgtcgccgcgcgactctccggcgaggaaggggcgcgccggctgggcctccgcggcgccaactcccttggcggcggcgggggtgagggcgacatcgtggcgctgaagaactacatgaacgcgcagtacttcggggagattggcgtcggcactccgccgcagaaattcaccgtcatcttcgacactggcagctccaacctctgggtgccgtcggccaagtgctacttctcggtgagtccctgttcgatgcactggtcaaggggaattctcccaagagtcttgttgcgattgcgacctgtgctaatggtggatttttttttccttgtggcgattgatgcagattgcgtgcttcttccactctcgctacaagtccggacagtcgagcacttatcagaagaatggtccgtgccttaaaactttccccaaccgtgctagtttatgttgtgactgtctgcctctctcagtttacttggatgcattgacaacatccttttttgctattactcgtatttgctctatagctggtggcatatctcatgttgaaatttgcccttttaatccaaaattggatgtaattgaaagaatcctacgtggtagttatttggattttggtgtgaaaaaaaatagccttgttagaagaagcaaaattggatttagttaaaaggatactagatggtgttatttggattttggtgcaaatcaaattaggaggttggttttattcaagttaaagtttgttttaaaaaaattctcctaaaaagatagatactagatttgcatatatgcattgaaaattacatcttcgcttggcggttatacttttagtccctctaaattgttcaatcatttatgatgaaaaggaaaatcattttatatcacaaagtatttatgatgaaaggggaaaaatattctgcatgggtttgaacaaaatacgtggattggtgtagccttaacatacttgaaaagggtatgatgttgatgtagtgcccacatggtgtcgcttgacattaaaacgatatgcagtcaggattgaggaacattgctgacaatttactatcgctgtctgtgttgaccacaataattcagatgtaccatcctatcttctaactagaaagatgcatggaagtttcttacattatttccagcacttgaaattttagtgaaatatcattaaaacataaccacttactttgctgtgatatgaaataaatgttttatttcttggaaagtggtatattcatatattcttacagtaaatttattgattttcttttcatttatttctaaattttaaccacccttttggtagcttaaggaaaattgtatgtttgacagtcctgttttctgttgtttcatccctccaggaaaaccagctgccattcagtatggcactggttcaattgctgggtttttcagcgaggatagtgttacagtaggtgatctggttgtgaaagatcaggtctgcactatatatctcggttaacttactgattattatctctgatcatattgccccaaatatttttaacattgttgcttcaccgctttaggaattcattgaagctaccaaggagccaggtcttactttcatggttgcaaaatttgatggcattcttgggcttggatttcaggaaatatccgttggagatgcagtacctgtgtggtaagacaacctgacttacgtgatctaagtttttgatttctcactgtggttcacagtagaagagaaggtgctcttttgcatatagtgattatatttgtatgaatcttccactatctctaaccacagttcatctatgcacgatacatttataatggtgaagaatcctagatattgacctgctgattaacacaataggctaccttcattctgttaaaaccacgtatctcaaaatatttggctggttgttttcttgcatatttctgttttatttttctcattatatatattttggcgcatttgtcatgataattagatttttcacgtatcatgcacataatatagcagatccatagtccctaatgatatgtataaatcacaggtataagatggtagagcaaggtcttgtcagtgagcctgttttctccttctggttcaaccgtcattctgatgaaggagaaggtggtgaaattgtgtttggaggaatggatcctagccactacaagggcaaccatacatatgttccagtctctcagaagggatattggcaggttggtcctgtttctgctaagttctgtagtgttttcgacatttgatgtaatgtttgcattgactttgtgcagtttgagatgggcgatgtcctgattggaggaaagaccacaggtactgactcttgtttttcatatccgatctgtctaaatgagaaataatcttacacatcgttacacctttgctgctatcaggattttgtgctagcggttgttcagctatagcagactctggaacatcattgcttgctggccccacagtacgtaataagcttttgtttatacttgttttttttttatcatgatggcctacatttttcacaacagtaataagctttggagatctctactaaatttcacatctcagttttatttacttcgaaggaattatcgtcttaataatgagcctttttgaacccaacacatacttgtaggttttttttttaggtccaaaatttgcatacggaacctgtacagggtgcttaacaaatataataatgcagtaccccaatctatgttcagaaatatatttcctttgtttttttgctctgattcttggatcacctttcggaagcttctagccatgtctcgtcctttgtcctatcatgtattgttttgcatatatgaagtgttgtaaatgtagctgtactgtagcacagtatttattatatctaattattatctagagatgagttgtgctgctcaatcaattgacccccaattcatcatattacgcaaatgcatacacacaaaaggaacacctgttgggtctaatgtgcaaaggctttccacactcatccctactctttattgtcttcatactgtcttgtttgttcttaccaagttccaatgagtggttcacgagttaacacaatcatcgcaggccataatcactgaaatcaatgagaagatcggtgctactggggtagtcagccaagaatgcaagacagttgtttctcaatatggacaacagatcctagatctgttgcttgctgaggtttgtaatttgcttcaattttctggaaacagcttttgtcaattatatctttgatgaattaaaacaactttctgggattatgttgcagacacagccatcaaaaatctgctctcaggttggtctgtgtacttttgatgggaagcatggtgttaggtaagaactgcaaatgtttttcaagtgtctgaatctgtaaagtaggatattttcgttttgactcgattagcgattttggtgtcaagtgctatatcaattatgacttatttgagatcggattcgtaggcaatctgtactcactctcatttcttctccatgtggtatgtaaacacagtgctggaattaagagcgtagtagatgatgaagctggggaatcgaatggtctccaaagtggtcccatgtgcaatgcctgtgagatggctgttgtatggatgcagaaccaacttgcacagaacaagactcaggatctcatcttgaactacattaatcaggtgagcttagttaactcctgctctagggccattgtactggtagggatagattttccgttgcttaactgttatcaattttacagctctgtgacaagctcccaagtccaatgggagaatcatctgtggactgtggcagccttgcatccatgcctgagatttcattcaccattggaggcaaaaagtttgcactgaagccagaagaggtgcgatgatttctttatggtttctcttcttttttttcttcccttgggtgcatctagattagctgaaaagttggacacgcttgccggcccatctagtttgtgtagatatttgacgcactggcttgagcacataatttactctcttcttttggttgtgcagtatattctgaaggttggtgaaggagctgctgcccagtgcatcagtggattcacagccatggacatccctcctccccgtggtcctctctggtaaactatgcatttccaaacccttgaattagcagtgaaataatttcacttcttgtcatttttgatctttgactgatgcaccctacaatttgcaggatcctgggtgacgttttcatgggtgcctaccataccgtgttcgactacggcaagatgagggttggcttcgcgaagtcggcctaaacgtgttgttgtcacgttcctaatgacgaggtggacgcatacgccgagagaagaagaccgtagcttttaactagcgtatttatccggcgatgtgtgtatatatgcatgctacataacatgtttatgttttccaaggcctgagatggcgcccgtctattttagcttggcaagaatatctcggaccagtctctgttcgaattctcgtactgatatgtgaacttctgataacatgtgcactgtgttttgtgactgaattgctagtcagtccgaaggttaattatcccatggttgatgtgaagagagccaccggattattgcagctgtgatcacgtggttaagccttaaaagtgtggtggtttcttcagctaaatctaatgtggtggtttcttcagctgaagtcttttcacctaagtaactcttactctctccgtcccacaataaaagagattttttttcttacaacattcgaccactcgtcttatttaattttttataattgtgtttaaagtactgtagataataaagtaattcacaaataaaataaataacaatttcaaatttttttttaataagacgagtggttaaacgttacaagaaaaactcaaaatcccttttattatgggacggagggagtactaaagcttgttaagttcctcaaaccagaattactctgaaattcagaccaactccctcatgagccgccggtacacctgcaaaatttgacttcaaaacccctcaattcccttatgtgccgccgaaacaccagcaaaatttgacttcaaaaccaccaatataagtgatccaactgatatcaaccttcaacattcaaatttgacttcaaaaccactgatataagtgatccaactgagatcaaccttcttccaacattctcaggcgactgacaaagctggtcaagtaaccaccgaaaatagacacaccctctttttttagaaagaatccgttgctggacgctagcaatggcagcaggactctccatccaatccaattcataaacaaaataaaaaaaaatctagtaaaagaagttgtcaacggcagtctctcctccatccccctctccgatctctctgcccagatcacgactcgctcgcgatgcaagtccgcaaacggttgccggatcaagcatggactctctctctctctccacgaaaccgtcagacccgatcgcctcctctgaccttagacttgcttagacgccgcgcgcatgcagccaagctgcgagctgcgatgctgcgagcttcatccattcccatccatggcgctcgcgtcgcttgtggtgtccacgcatcctcagcttaaccccccctctctctctggtcaatggtcaccaacactgcctagaatgatggactcagctccaatctcatcccgccacgtgtcccccgtctcgtcgttatatatatacacactacgccctcgccttggcctggtcgtctactctccctcccaccgctcgtctgtcaccgccgcgcgcgacgcgacggcgaggtgtgtgtgtgagaatggagtcctacgtgggtgtcaaggggaagaatgtcgtcgggggcggcgacgtcggcagggagatgccggtggcgccaccgtcgtcgtcgtcggcggcggtagggatggtggagttcccggcggcggcggcggggctggggtacgccgggatgacggcgaaggaggccgggggtggttaccaggagaggagggtggtggtcggcgagatggacttcttcaagacggcggagaagcgtggggagaggaaggagccgccgccggcgacggcgacggcggcggcgagtggacacgccggtgcctcgccggatgacctcagcctcaacaaggacgacctcaccatcaatgtaacggatcagttgatgcgtgatggtttgagagatttttttttcttggttgatgcgtggtttaatttcgtgatcttgttgcgtcgcagatgggattgctcgtcggccggaggaggaacagcggcagcgaggaatccatcgtcgacgatggcggcgtctcctccaacgacgaggagcaccgcgaggccaaagctgcggtgagcaaacagcagcaaaatcaataggatctctctgtgtttataaattcgcttttgaatttctgaatgcgaggaggagagatcggtctagtgaccgtttgccgttttcttcatcatcagaaattctagttagtgtaaaccggagaacaacaaaaattgttgttgccatgatctgatcataattttctctcggaatttatgatcagctggcagtaaccaaagctgagattgggcggctgagtgaggagaacaagaggctcaagaacatgctgagcaacgtgaccacgaaatacaactctctccagatgcagttcgtcacactgatgcagcagaggagatcagtcctagccgctccgatccaccagcaagaggtaattaagaaaaaagaacaaatcataattattaccatgcaagattcaagatcgctcatggcagcaatgctcaagatcgctcatgtggtgtaattcatcgacgatttgtatgatcggcagctgcttgatccggagaagaaggagcaagaggggagccagcagcagcagcagcagctgatcccgaggcagttcatcagcctcggctccgcgtcgctgcagcccgacgtcgaggcgccgcactccgtcgtcgtcgtcggcggcgatgtctgcgcgccgtcgtcgagcaaccccgacgcggcggtgccggcgatgatgccgttgccgcatttcgaccaccacaaccaccaccaccccatccatggtggaagggagagggggagcagcccggcggaggccgaccaccaccgccaccatcagcaagagcagccgccgccgccgccgcagcagcagcagcagttgccgccgagctggcttcccgccgacaaggtgcccaggttcctccccggcaaggggcccgagcccgtcccggaggccgccaccatgcgcaaggcccgcgtctccgttcgagctcgctccgatgcacccatggtgtgtgtgtgtgtgtgctcgatcatgttccatatgcagctagtgttcttcttcttcgcatggatgtttgatatggtgatgtgcagatcagcgatgggtgccaatggaggaagtacgggcagaagatggcgaagggaaacccttgcccgcgcgcgtactaccggtgcaccatggccgccggctgcccggtgcggaagcaggtgtgtgtgcaagatcgccggagcgtacgagcgtgtttgatttgctgtgtcgtcgtcgtcgtcaatggcgcgttcgctgatgtgcggccatggttttgcaggtccagaggtgcgcggaggacaggacggtgctgataacgacgtacgaggggaaccacaaccacccgctgccgccggcggcgatggcgatggcgtcgaccacggcggcggcggcgtccatgctgctgtcgggctccatgccgagcgcggacggcagcctcatggccgggtccaacttcctggcgcgcgccgtgctgccgtgctcgtccaccgtcgccaccatctcggcgtcggcgccgttcccgacggtcacgctcgacctcacgcagacggcgccgccgccgccgccggcgtcgtcgacgcagccgcagccgccgcgcccggagcccgcgcagctccaggcggcgctcaccgagaccgcgcggccggtggcgctgccccagctgttcgggcagaagctctacgaccagtccaagctctccgccgtgcaggccgtggccggcaccaagggctccgacggcggcgcgctcgccgacacggtgaacgccgcgacggccgcgatcgcgtcggacccaaacttcaccgccgtgctcgccgccgcgctgacgtcgtacataggcagtagaagcggcagcggcggcgccggcgccggcgggagcagcggcacggtgcagccgctgatgagcggcggcggcgatagctgtagtagagacgacaagataggagagcaaaacagctaaaaacttgattcgctagctgcaatttttttgcttgcttcaagtttcgtttgatttttgctcgtacgtaatttttctttttctttcaacaaaattagtttgaattacacaatttggagtagttttgatgttttttttttctccgtcagtctcctcgtggatggagacagaaattttggtccgtgtcacatacggagtacaaatttttgctgaattttatgtcagcaacttggagtaacaaattttgtgggagcctaattaaagggtgaccattttgtgtgaatttggactttgaattggttagttggtcgcacgcagcgcaaggcgtggagtcaatttcgtggctacgttgcctcacatagagctgagtcacgctctgacatttttatggtcgtctctgaatcgcgagaagaataatggctgatctcgtcacactgctgacttgttgggcttacaaattcgtgccatcacgaactgaccatcctgtggtaggagtattcaacaaaaacagggactaaaatttagccccactttaatccctccaaccaaacaccacctaagaatcagtactttaatgtgaacagtattagtcaaatgataaattttggatagtccatacagagctaagcagggcaaagcacaccagttttgatcgaaatattagttcaaaagaaatggaaaaaaatcatatccacaagcattgccatatgaggtaccgtatgtctgaattggccttttagaaggaaaaaggcaggagctctgcaatttatagattcaggtagtataaagccatcacattacaggtttagggtgatggccacttaagcaaaatgctttcaaaggagatgctagtctatgaaattgaaagccagatcacgctgatttatgtcttgtatcaccaaagccgccgtctacatgttgatgaacatattcaaaaactttacatttttctcaagccaaatgtcccatcaggctataagtgccccagtattttcttttctcttctccttgggttttatctcgcaaaaggattgcctccaatcagctactagtactgacttggctttcaaccatccaatgatacagaccagaactatgtttctttctattagaaacatcagtttcatgatacaacagatgtacatctatgcaataatagagtgggcacacaaaattttgtggagatacctcactaattaccgagctaattcgaccttcactcatcacctcaatcataaacaaagctaacagaaaaaaaaaggtaaattactcctagctgtgacagcctgcataacaatctgatggtcatagtgcttgaatctcccctccatagccataacgcttcaaaagaagttcatcctgccgccagttttccttcaccttgaccattatctgtccaatatatagtatatttgatattaggaaactgctcagaacaaatcctcaaggtagatcaaaatttcacagcctccaaacaaaggaagcagttactacctcaagatagaccttcttttgtaggaaatcctcgatatcaagtcttgatgctgttgctagcatcttgattgcttttccatcctgcagttgccaaacatgttacaaaaatatatcccactaaagcaatgcaaataagatgatttcatgaaactgcttcattctacccaaatatgcaccccaagttatggtattttccttagctatactcaatgttaacttgaaaaagattaaacttaactgatttcgtaaccataaaatcctgaaatattcaggcgcacaaaggtactgttttactattttttttaccttcccaagtataatgcttctttgtgattccttctcaacgagtatctcaacttgaataaaatccttggctgtaggtctgctcttgtaacttatgacattaacctgtcataaacaaagtcgcacatctgacacatgctggcagaaaaatgccgcacaaaattgataggtgcaagcaccagaagatatacctgacaagcatatggaatttcttgacgatactgaagaaaaatcttttctctcactatttcccccacaaaaaatctctcagggtgctcactagctatgtcctggaacgagaatcacatgaacaaatatatttgatatcttgtagtatcagtatttattggctgcagttaaacatcaaagcaagcactggatatcgtgagtagcactatctaaagaacaaacatgatgctatggaaaagacatattatagtcacactatggctatctggttttacatgagtacagaaaaatttgtgccaaagatgaagaaacacttgcagaaatagaataagaaaaaaaaattcatctaatacaccaatacctttggatagtaagcaggccccagagggagctttgataatatccactccttgatatcatccactccatgcccaaatttagcacttataggtatgacgtcatcagcattagtgaatttttgataccactgtgaaaatcgtagccagtaaatcaattacatcgaagtagagggaaaaacaaaaccatctccaaatttttgtaacgatattttacctcaagtttctttgcaatttctcctggctttatgagatctttcttgtttaataccaacagtactggaagctcagtatctttgttccccacaccttcttccagtatttcatcaatctaaaaggtacaaatgtcagaattttagattgtatattggcataataatttttttttcataattcagtcatctctttcctatgttgcaataccttttcaggcattttgcaagcatcaacaacaacaagcacacaatctgcactgccaacggcactcctaacattcttcatcatcattgtgtctagcttatgcatttcctttttgatgacacctggcgtgtcataaagtattatctgcaaactaaatgataactcagattagcagtgagaaattaacatttccccctttcatagtctataatcctaaagctttagaaactaaaaggtgatacctggtattctggttcagaacatataccaagaatgcgatgccgtgtggtttgcggtttgtctgtcacaattgaaagtttctgaccaacaatttggttaattagggtgctctttccaacatttggctttcctaatacagcaacataacctgtgcaaacacatggtatatcaatattacaacaacatgaaaaaatattcatctgcagaatagtttcatttggagatcataaactaaaaaggctgttatttcagaatcgaaatgaagaggtgaatttcacagaagctagaagcctcaccgctgcggtggttggcacaatgagaggtgcctagctcctccgactcgtactcgtcgagcagacacaggctccggtccggcttctcgatgagctccagacgcggcctcgtcgtcaccactgcagcctcctcctcttgccatccttccgcttcttcctccgcttcttcccactcttcctcttcctcctcctccattgccaaggaagccatactcccaccggatacaacaaccccaaccctgcgctccaacctcgaggagcggatgcggcttcttcgggccgcacacggagagaaacaaggcatcggcggcggctggagagctctacaggggagacgaggcggcggcgcgacgagccgcagcgcgaggcctagctccatggctgtcgcaagcgagagctcctcggcttgggagtgtggctcgccgcagcagaaggggataagagggattatgacatgtgggtcccgggcccacatgtcatagacacacgagtggcaaatagtgaaatgcgagatgataccgcctatttgccactcgtttttcttctcttgggccggcccaataaacgacgaaacgtttttcttctcttgggctggcccaaaacgagaaaggaccggcccaacaaagcccatggagacctcaccgccattactagcaaagcccgcgacaaaacgaccaaccgctcgagcaaagcctccaaaaccctagcgctctctctctctccccccccaccctcccttcgcctatagctgaggcggcggctcgtcggcggcggcggcggcggaggaggaggaggaggaggaggaggcagcaatggggaagacgaaggggaagcagcggcaggacaagttctaccacctcgccaaggagcaggggtaccggagccgcgcggccttcaagctgctccagctcgacgcgcggttccgcttcctgccgacggcgcgcgcggtgctcgacctctgcgcggcgcccgggggatgggtccaggtggccgtcaaccacgcgcccgtgggggccttcgtcgtcggcgtcgacctcgtccccatccgccccatccgcggcgcgcactccctcacggaggacatcaccaccaccaagtgccgcgccgccgtgcggaggctcatggactccaacggcgtcgccgcgttcgacgtcgtgctccacgacgggtcccccaacgtcggtggcgcgtgggcgcaggaggccaccgcgcaatcgtcgctcgtcatcgacgccgtgcgcctcgccaccatgttcctcgcccccaagggtgccttcatcactaaggtaattatttatccacaaatccgctccttttaggcgtagttgttgcattgttgaatggtcttagctactgcttacattagcagttgggagtgatgcatttttcttaccgaggttaaaaactcaaaaactttatatgctctgtatatgcgattaaaaaattgttctacagattgtgatgaataatttttagtttcgtaggaaagtgttatgtagtccctctcgtattgtaacaggctagtgcaattattagttcatagaggttgagaacgatgctattagttccctcagacaaaatttctctaatgggtgttcctgtattttctgtagccctccttaaccagctgttccttgtcttctacaggttttcaggtctcaggattacaacgctattatgtactgtcttaaacaggtgcatattactctaaggtttgattacatttttctttttctaaatgtagtttcttgatgtatcaaatatatctgcatgcagttatttgagaaggttgaagtcactaaacctactgcaagtcgttctacgtctgcagaaatttatattatctgtctgagatataaagctcctgcaaagattcagccagaacttttggatataaagcatttgttcagtgtggatccagatcctaaaaaggcatgttgaaacatttatcctacttatattcttggtttctcatcttttctgtgctagcatccatttgatgttttgaattttacggcttctacaggttagggatcctctcaagccggacagacagaagaggaaccgtgatgggtaggctatccctattacatcatctctggatcttgcctactaattttggttaattctattttttcgtcttagcatacacttcaatacaatgctggcctgattcccaactttcaattgtgtaatcatttactcttgaccctaactaccaaaatagtatttttccaggatttatagctttaaatttccacttgtatagatgtcagttttgtggcaatatagcattttgaatttctacattgcacaatttatgcagatccgaagaaggaaatacaacattgcgaaaagttggtctggcttcagattttatatggtctgagggccaaacgcccctagagtttcttggttcttttaatgcaatttcatttgatgacccagcatctcttcctatcaagaaccatgagcttactacagatgaggtagtggactaatgcctttcctccgtatgctggctgatatattgtcttctatattgaatagtcatattgatggctgcatattgtttgctgtgtgacagataaaagctctttgtgaggatttgtatgtactggacaaaaacagcttcaagcatatcttgaagtaagtagtttaccacatgagggtgattactgatgtattttattgcacagattaattctgttgagtttaagtggttatggttatctatgtgtataagttgggatattcagagcttagtcttgtcaatatcatgaatgaaactaattttgtatgatgctgttagatggcggatacgcatacggaaagcactatcatcttctgaagtcactaaaaaaactgatgatactgcggtggaagtcaatgtcaaggatgatgaccaacttctacaggaaatggaagaattgacgagtgtcattgatagaaagaagaagagagaaaagaagcgtcaatcaaagcgccgtgcaaaggtatatcagtcatgagatatagatgctgccattgccaaatgggtggttaatttgagttatgtgctaatacactggtcttttcgttccaggataaagcacgcaaagcaacaggaatgcaaatagatgctacaggagataattacggcgatcctgatttgttttctataagtgctatcaaggttcatgctgtttctgtagtcatatcctgtgtggttcttaagtatttagtactaatatttgtttaaaatcataggacaggtgttcatttgcatgggtataattttcc

SEQ ID NO: 9458 - DNA, 47153 bp, Oryza sativa
aggtgattagattgtgaataagacatgaatcaggttctaatttgataagatgttctgctggtgaaatcacatattcgttgcaaaatataccatgtctgaacaagtttgaactccacggaaggcaaaaatttgacgactgcgaaagcaagtcctgcagaaaatgttccacttttccaatttcaacgcaacacgaaatacacaaatccttagcatacatcaggttaataattttgccaaaaaaaatggtgaaaaatgcaagaacagatcaacagaggaagaggccagcaagcaggacagagagtagggttcttgtgtggcttcagaaggttagcacctgctcatcattgtcagagtcatcgaggtcaaagacagcagagcagcagattattcgcacggtctagtgtaattaactagatagggacgcaaattaccttatcctatgcatgtctgaggcaacaatgcacatgaactgggatgctgcagagcattgctcacatctgacagcgccacacctggatctggatctgaccgatctggtcggcagcagcaaggcaaattcagtatactaatctctgtttacctgcaccgattagaaaacaatcatcaaatcaaacctagtggaagcttagtacatcagagagatatttttctctgagatattcctgactccaagcaacaccatgcatgcatttgcacagcatgaaacaactattaatcctcccctgtttttccgatgagccgttgtaaaaaagaaaaaaaaaagaactcttattctctccgctgaattcgggctcttcttcccgttgcgatcttgaatggcggaggcgtcgtctccgcttccggctgagcaacacctacacggatcgtcgaagctgaagctttcggtggtgttgggttcttccattctctgacggcacggcagcaacgacgtccatggatcaggaaactgcagttacaatgatctcccgctccaagtaagtacaccaatctactcttcctcgatcatctctatctctttctgttccactcgatttaaggcgtttgattggaaatgtgatcaaaccatcaaattcagtgaatgtggcgacaatgtattacatgcatgagctgccatctgggcgtctgcagctaatggtgctgaaagcctgaatctacgatctcactcactgaatttcgaacaagatatatgcttctttaagcctgtgattttcttacctttccggccgctacgatccgaaaagcatgacatgatcacttgcagtgtatgggcagaaatgcaggaattgctaggtgctactagctagctttttgcccatgtacctcgacatgtgtgaattgtgatcaacggacagacagatatacagtatagccccttcctaacttgattgccatgtactgctcgtagattttatctgctactacatattagcttttgtaacgattggtagctagcactctcatattttgatcagcaatagtaattacaactctgaaaaacctctgaaacaggtaggacatcgtataggcctaatatgttctttttaattaaggtgtggagtgaccataagcctagctaacttctcacaacgaaaatatttttggtcaatgcactagttgattaattatcgatcgattcccccttagcttggccatatatgctactacaacacactcaaagatattttttcatgtgaataaactatctcaatatttccattttccatataatctttgatcagtttttgcttacatacgcattattttctgagcttatatacacaagattttccggtcaaaatattctaggaattgataaatgcaatgtgcacgccgagcagagatcagaagttcagaaccatcagattcggtccactcccgacatgttccacacatgcacagatgcactgatgccccctctcggatgcagcacgcgtacacagatcttcctcctccagccatttttccagacaaccatgcatcttgttttatcattgatccaataatgacatgcagaaaaaagtcattgcttgcacagttgcatttgtccttgtccagcatctgatcaacgtacttgtcccaaagccccctgcaatctctgaatctgatgatcaactcactcaggcccccccatactcacacagtcacaaacaactctctttctctcactctgaatgaactctcacgtcagtactaatgcatggatgcatgtgaagtagtattgctgggtcctggaacaacaaggggaatcagacagcggatcgagagatgttggcagctacagttcccagctgtactagagcctgtgaatactgacgtgttggcacagtggctagatcaaaacgcacagccactttgctcagaaatggcgccctgcactgcacggccttcaactcacgggtacccaacccctgtcccctcccttcccaaaaggcgtagccgcgaccaaaagcgccccaaccttgcagttttcgagcactgtagctaccatgtcctctctccaagtaaaagagatcagtgtgacaatggcaatggcaatggcatggcctctctctctctctctctctctcaccttctgaattcaaagttactgcttctgctgctgctgcgtctctggctgagagggttaaattcagcttcggctttgcttcagtggagaggaggagatggccaaaactgagaaacatctcttctcctctcgtggcagtggcatgcatttataaccgttgctgtttccggctttgcgatgcgactgtgctgctagctagctgctcgtttgctgacagtaacaacgctttacctgcctcccggtctgacggatgcagcgcatgcgttactactgcgacgtcgtaactactcagctcgcacccgaaccctacctacaaaacgctagcagcaaagctcgccgtgtcacgtcgcgatcatttcctgcatcctctcgagatcgccggcgagttcagtgtgtgtgccactacagctactagctcactcgctcgctcactgacgcgaatcgcgcattgttcaactatgagcagggccatgcagctgcagcggccacggcggtggcgcgacggcgacggcgacggggaggaggggcccacgacggcgggcggcggcggcggtgtggggtgcaggtgccggtcgtgcgcggcggtgatgctcgcggactgcatcgcgctgggttgctgcccgtgcgcgctggtcagcatgctgagcctagcgctcgtcaaggccccgctcgccgtcggccgccgctgcgtcggccgcctcaggagccggaggcggacgctgctgcacaacaagcgcgtccgcgacgtcgccgccacgtcggcggccgccgccggcgagaagaaggcgatcgcgaagccagaagaagagctagaagccgccgacatcgtcgccaacgacgacgacaccgcgtccgccgccgctgccaccgccggcgcgggtgccccgaccgacgaggacctggcgtggctggaggagatgtaccagatgggtcactggggctttggccgcgtgtccatctcggggaaaaccccgtgagaagcgcgcgcgccacgcctcgccgcgccggcgccggatcggatcaagtccacgcgacgcgcgccccggcggcgcaaggcgcgggaacgggtcaacgtagtacgtgcaaaggttgcaccactattcggtttgatgttttctccagctgttttcgtgtacgattgaatttgtcggggtgcacacgcgcgcccgtgtggccgtgtgcgctgtgcgtgcgtgtgtgcgcgcctcgcgcgcgcgtgtggctctggaaagcgtgtgctgcagcctttcgcgcgcacgaatctcaatgtaaaaaaggttcccaacggaagcagtttccgaagtactcatgggccctctcgtatctggcacttactgtagcccgtgcaactgatgggcccgttctactaggccgacgactggatccatcaaacttttgtcgcgtaggcgaacgttaaaaaaaaggagaaagtctaatattaatccctcaatgtaggtctgatcatgttcgtatctcttaatagcaaaaggaatacatactagcatatcgactattaaaacaagtgtaaaatgactccctcaaaagttttgaaggcgaattccattgacgtggttcgttgacctaatcaaaccaacgtcaaacatctgatggtatgccacatggtttgctgatgagagatacgaattaaattagacctatatttcagtgagtcaaattaaatttattttatctacaaaagtagatatgaataagagtcagctcaagcaccagagagaacatcttggcccattaaacccctaaaaaataaagagtttgtgcttgtttggttctctaccgtaccaatttattggtagtgccaaagtctaggcaaactttggcactaccaaaatattggtagggtaaaattatttggctaccatttggattgctaccgatataaagtcaaattcttatagtatagtgaagaaatttctagaaaatgaccaaatagtataagggtactaccaaatatttggcttcaatccaaaataacacgcatactattcaatttgccaataaattggtagggtatgtttttggtatcaaatcaaaacggccctttatttcctccgaggaaaaaatgccttttattttacggaaagaaaaccctgcagagccgttcgactcttttgtgaattcacgggctcacagtatgttggttgagtagcgtatgtactgcacagtacatttacatgtgctgcctttgattttttgctgttaccatggcgtgcatcttgagtgaaacatactttacttagaacggagcagattacccgggcgccatgccgtcaatcacacgccatacagatcaaacatcacaagcatcgatcctaggacaagctaaacggaaccccagagctgctaatttttttctttccttttgtgttgtttccctttcagtttcatcttttgcttctagatctaacccaacaacgtcttctgatctcggtggtaggtgatccatttggagctcaaggaagcaacaagtagaatagatagacaacaataatttttttttaaaaaaaggcttgtaagagacactagaaaacgatgagaaaagcacatggatccaatccattccgttccattccactaggattctttgctgtccagcttgcattctatttcccttccattgcatgccagccttttcttttcttttcctctcccaaatggcaactcaactcaagcatcgtccgccacgtgtcgcgtggcccaccgtggccctcatgggcccacgcaccaaccgaccaaccagctcccccctctcatcactggcgggagattggtggggcccacctgtcggttagattatgggccgtaccggccgtcacttgttgctcgcgacgcgcaaccgcccgtggcccacctcacgcgcgcatctcccgcctccctttagttccgccgccccgttggccacagcgcagcgcagctcgcgccacagaaaaactccaccaccaccagccacgccatggcggaggcggacggcgaccgtggcgtcgctgccgccgccgccgccgccgccgtcgtccacgacgacgtcctagagtctgacgaggaggacttcaccttcgcggcggcggcggctgtcacgtgtgtggttggaggcggccgcatcggcgctgtcgtgtacccggtcttcggccgcccgcggtcgccgccgccggtgcaggaggtggaggagcctgacacggccaccgtgcgggtgccgctggggcagcttctgctggaggagagggcgtcggcgccgccgtcgggggagcaggccgacgaggatggcgttcttgacggcgtgccggcggagacgtactgcctgtggtcgcccggatcacccgcgccggcggtttctaactctccggcgaggtgccagaagagcggctcgaccgggtcggtcctccggtggcggcagcggctcatcgggcggagccacagcgacgggaaggagaagttcgtgttcttgagctcgggctccgacgtccgtagtaaggggaggacgaccacgacgtcgcgcggcgatgccggtggccgtggcggcggctggagatattacgcgagtggaggcggcaatggcggtggccggaggccgtcgttcctcccgtacaagcaggatctcgtcggcttgttcgccaacgccggcgcgttccgccggagctaccacccgttctaacgtattgtagcgttctttctcgctgatcgtttgcttaattaattccttaattatatatatttttgtcaagtcatggtgtgacttcggattgccttgtggtagaactgaagtgtgacagatttgtagtagcagaaaatctttatgcagattttttttgtatgtgggtaatactaatacttatgtatatatcgtggattttgtattggtttgatcactttgatgattcctactacctttttaataagcattggaattcagaaacgtgtagtacgtttctctctctttccaacgtaaaaacgtgtagcagtacgtgaaacgcgattccgccagccgaagttcgaattaattcgaattcggtttagaacataggaattccaagcaaatagtttattttagaaaatggattaaaaatccagcctttataccttaaaggatgtacgcggtcacagtttgaacaactattggtacttaggccttgtttatttcagtctaagctgcgagttgtttgtttctccaatatatgctcttatattggaggtatataagggcagtgggtcttatagattattagattatactaatctggcttatagattataataatctatcttaataatctacttatttattttagcttactcctaataatacagattataataatcatagactgaatcaaacagggccttcgacgtaatccctccttcctattttaaatacaatcatgagtttacatgtccaactttaattgtccatcttatttaaaaaaaataaaaaatgtaagtcgcgcataaaataatattaatattttatcatctaataaaaataaaaaaactaatcataaaaaaataaaataaaaatcaaataagacggaagatcaaagttggaaacgaaaactcatggttgcgttaaaaatggaacaggggagtacaccttaaacaagtctttccaaacaaatagtttacaataacatttgaaaaatgcaacgcatcatcacaccaaacaatgcagattacccaattagctttagctctctcagaatcaaggacgcaacttgtggttgcggcaatggggagtaggattacctgcttatgttaacacatcttatcgatctggaagcctgaagagtacatcggatcagacgtcgcaaatacatacggacgcaacacaacacaacacaggacacaaaaatcgctgtcaaatcttcagtatctttctcaccactcgattaccaacccttctccatctccttttcaattaagccctgcgctttgggttagtggacacaattaacccggtcgttgcgtctacgtagcactgtaccctgtttcgtaggtgaaaggtacaagtggttctttacttcttttttttttttgcctcttttattattaacccgttacctatagagtcgtcatttgttggcaccttgtcgttgagctattggactcatgcttaattatgctgtatttgtacagcagctagcactcgacgcagcaacgtccttcattctcgtacagtctcactgtacccaaaagggcacttgtatcgagatggggcgttaatcttgaccgctgatcacagcattagagagctcacgtggccttgacacgagatgtgggtttgcggagttgcagcccaagcccacgtgagcgctctgtacgaatcgccgtacaacttaggtgggcccgtcttgtcattgagtgactgaaaaagttcatttgggccccttaatttgacaccgaatccgatttacgtccctggaaaaaaaacagatacaacgggtctccaacttataaaaccagtgcaaacgagatccctcggtagtattgtccctttttttggttgtcgtggtacctactaggctaatttgaccatgtcttttgttccacgtggtattgacgcttacgtggtagtttacttcggaaaacaaataaaaggagcaaaattgaaaactaaataattaaaacaaaataggggcctacaaacaagataaaaaatggtgggacccacatgttaatgggtcctacttcctccacccatggcgaagggacagcgtggcgagccgatgcccatggcgaggatgttgttgaggtcggagcacgatagagtacagaggatggcgagcaggttggagggcgttgggaagggcgggcactgtgtggcgagcagtgtccgtgagagggagttgagatcggtgaaggagaggaaggaggtggagaagacgaagtggcggaggaggtggcggagatcgtgctgggagaggtgcggcggttggaagggggaggggaggacgaacagcgtggtgtggcgagcaacagtggtgcgaagacggatgagacaggggagaggaagaggaggtatgcgtcctcctcctcaaacccattaccgttgttgtcgtcgtcttcggtggcgggaaagcaggttgggaagcgggagctcacccgccactgcccatggcgaggatgccatcaaggttggaggatggcggagacagtggcgggcgccacggtggtgaggcatgagtcctcctcctcctgtccattaagatgaggttaccacgcattacgaggaaatgtaggccctctagagcccgtctggagaaaatcacgactcgttcggcccattacgaaggaatggcggtcgactgcggtccatttagaggaaatgtcggatgggcccattgacggttaattcggcccattaaatagcttctgcggcactctgcggccttattgggcctagggaggcctaacctggcgaaaaaagagacctacctaggcccaataaaaaattcgggcctaccaaaattgcccagcgattcgtaaggctccgctcaggtgggcttgggccgcaactagccacatctctgcatgccacgttgacagcgagtgcaacctaacccaactagtagtacgattcaactgcaacgcgcaatcacatccgttgcgagctgtcaaatatcgtgatcagcggtcgagattagtgcccccatctcgaggcaattcgaaacgctttcgtgcagtacagttgagaatgaaggcttctactactccgtagcttggtgtatataaggagagccatggcgccaagacaccgaggaggaagccgcacacgccatgggaggcgacacgcacggcagaagcagctgaacgcgatggagctcaacgcgatcatcgccggcggcaacatgatggccgacgacgacggcggcggcttcaccttcgccgaggtcccgccgctagccggcggccgctgcgtgggcccgccgctgtacccggtcttcggccggccgaggtcgccgccgccgacgccgccgccgcatcggcaggcgccggagaaggcctcgcgtctgccgctatggcggtttctgatggtggaccacggcccgccgccgccgccaccaccgacgacgcagccggcggcggacgacgacctcgacctcgacctcgacggggagccggcggagtcgacgttcctgtactgcccgctgtgtcccgcgttgccggtggcggcggcggcctccccggcgcggtgccggaagagcggctccactgggtcgtctctcctccggtggcgccagcgctccatcggccggagccacagcgacggcaaggagaagttcgtgttcttgaacgcgagctcctcctcctccggctccgagcacaagggcggcagaggcggcgaggtgggccatgacggtgccctgagctactacgccaacggcggcagcaggggcggcggcggcggcggcggtcgccggaggtcgttccttccctaccggcaggacatcgtcggacttttcgccaacgccaccgcgttccgccggagctatcacccgttctgacgtcgcgaacgtcttcgataccaatgttgctcgatcgattttattctcttctctctgcaggttaagtatgtacttaattacttgccacgataaattcgtgagcaggtttaattaaatttgtttgatgcgtgtggctgataagtttggctgcacgctttaatttgtttgtctgcggtaaatggtaattgtaacaatttattccaaaaaaatgttgagtgtaacagagcttgcataataagtatatattgtatacagagtttttatatgttcatgcagggctactatataagttcaaatatagtcataaaaatgtttttaaaatttttcctcgagtcgcaatattttccacaagcttatttgctcttgttcgcagaatttctagtaagtacaacttcgcacagaatcttcaattcccttattaagaaaataaactagaaattagatgctgggaaagttaccttttataaattctcagaagcaacgtaccaatcaattatttcttataatcttaaacccctttaaacatagcctttgttttttttatcatagagaagtaccgaagtagtcatatgtttttctctttattgttactaaatactccatccgtctctggaaaaccaaattttctaagaataaatttagacaatatatattcagattcatccctaaaagttgatggccaatgctgtatgttggtaaaacagtctacgtgcggctcctgtcatatttctagctctgcatggtgtggtgagtatgtggtagtgcagagattgacttgtgttgctaattaaccaacatggcacagttgtagtcgacttgtaacacttgtttcggcatattcacataattagctacatcattaatgtactagctagctcaacacgtacgtacaggacagatgcaaccttcaaaacaaaactaattaaagtacagatcgatgcaacattcaaacgaaactaattaaagtacaggtgcaaacttctttgtttcaacagggcctttaatctctccaaccttctcttcccctgaccggccactacgtactgatgataatctgatactgaactactctatgaaccatgctgcatgcaccatagatttcaaccatatgctacaaatgaacggtcattttccagatatctccttcgatcaccaactctcctttaccaagctttactcttaattcgtcctgaaaaatatatattagtgcccttaatatcataatctgtacttgtgcaatcatgcaaatccggtcatgcgcgagaatatgctaccaagtcctccctaattaaactcatgaaagttaactatttctccggtcaaaaatatattattagctatatttagtgagagaaagcccatctatgcatgcaataatgtagtactgatttggcttgttgtctcatctaatttattactagtccatcaagatgaaagctaaacaccaagggtactctgaatgatacaagcataactacctaaccaaagttccagaagagcaaagaggtgaagtacaaatactacacacttcggttaatccatatctttcgtataaatgacagctattaaaaaccaaacgagttttagcctactctgtccgtgcttatctccacgatcttctctgataggcatatctctttggaccacgtttgattagcaaggaaggctctgattaggaaattactatgcatacgacctatctgttatttacgtacgactcaatttaatcactaattttaaacgaatgcaatgcatataaatatactctattttaattaatctatagttgtatgtctctaattatacatgagttatgtaactggatcacacgtatagcagtaatcctctaattaatcaatttgtgggtggtaatctcgctgagcggctgagccgagcagacttcaatgtgaagtagactctgcacgcgacagccggggccaacggcggcttgaccgatcgtcctgctctgctcgctcgtcagcgccccggttgagcgattatcgacttatcgtagcggattatcaatttggttacaaggataaactactccctctgtttctaaatatttaataccgttgactttttagcacatgtttaaccgttcgtcttattaaaaaattttgtgaaatatgtaaaactatatgtatacgtataagtatatttaacaatgaatcaaatgatagaaaaagaattaataattacttaaattttttaaataagatgaacggtcaatatttaaaaaagtcaacggcatcaaatatttagaaacggagggagtaaatactttattacaaaataaacttaacaaatgtcttacaataagtgggtaaataatgtagtagaattttttttaagaaaaggtattttctaatcaatggaacaaacaattcataagaatccaatgaataagcatgtgtttagttcacatcaaaattaaaagtttggttgaaattgaaacgatatgacgaaaaagttgagaaaagttggaagtttgtgtgtagaaaagttttgatgtgataaaaaaattgaaagtttgaagaattattttggaactaaacatggcctaagttcaaaagaatagggcaaagtgtgttatagtatcatcttgcggctgatttatagccggtttcagatagcaacacggtacggccgtgcagggcttgatgagaagttgcatggaatcaatcagcatggctagtttcttgattacatcctacctctgctatacttaagagacaattaagttttttttaatgtattctttgatgaagtcagatatgatccatctatcagaacttaaagtggactgtgacggtttaccttgcaaacagtgcccagaccgatggacctgacgtctgtctacttgtccagagcagcaaggatactgtagtagtatcacttgaaaatcctcgtactggtaattgtttatttatttattctctgatataaattaatcatgcaatgaacatgattagcttttcgttgcttgttgctgcggtgcttcctttctaaaacattgcatccttttcacttgttgctcacagatcttttcacgcctttgatgcaaaatcctcgcagaggtgtgaccatgaagctaaagtatcttcagagacttctttgatggttaccctgccgcgtttacagaaacatcagccctgcctctcgacaaccgtatggatccccaaaatccacgacagggtcgtgtgtggttgacactgctgtattagacatcacgacataaccatcacattaatctccatgccatcgcagactacccaacgcattgcattggccatgaaaacaacttctctagcaaaacctgcatggattctactgtcagaaaggatttttaggtgatatgtgagatcagtacgaccatcaacctgttagttcatagatggcccagtgatgaatgcagtgtaaatacggtaggccatgttaagtagacttacggagcagtgtggggtctactatatagtctctgctgtacatggtcctcaccaaaatacaggaaaacagagacatcacgtatgacacgtctctactgaggcggttacaccagaagcatgaatgacaaggaaataagccaaattggattttctctttttgccagaaaatttacaagcatgaattatgtacagcgaattccgtggtaggggaaaatgctaatttcttgtatatattccatttctgcatctatgtggacatacaaacagtagagtggatcctatggaggtggcttactattatgattcatctggctttggttcaagaatcacgggtatcttctccttttgatctccacgcaatacttccacagtcacctataacacaatatgcataagtacctgagctattatcaatcacagcaatttcttccttacaaaaacgtgtgaaagcttaccttctctccaactttacactgatccagaatcctatacaagtcgcttccatttgttacctttgttccattcacagaagtaattatgtcccctaggataagccgaccataggaatcccgcttggtcgattgcagaccctagcatacaacaagatgtataagttttagttgcaccagtcattttcaaagcaagcagctagtcttctattacacgaacatgttcaaagaaaatacagtgtctgcaataaaaaggatttgttctatcaatcacataaggttagcctttatgctaaatgaattatcactgttatgtctgttcagctgtccttagtcctagtgacgattgaaaacacacgagaggacatcaatcaacatagcatatgatgttatggagtaataactcaggtgttctcccagtaaactcaaattgacacgtaattggaacatgcctagtgcaagaaaaccaatgcttttaagactgactgcaatttacaggaaaccaataaataagatctatggacaataccgctttgcctgctggtccatttggaggagcatccaagacaagcactccacttaatccaagctgctctacagattgatctggagcaaattttatccctagaataggtcttgttactttaccaaactttataagctgatccacaataccaccaacctggatgtgttcaaaagagatgttaatagaatagaaaataaaaaattctgaaactctgagttttgtatttatgtcaagttgcatactgtatcaactggaatggaaaagccaacaccggatgatgctcctgaaggtgagtatatagcagtgtttacacctatcaagtttcctgagctatcaagaagtggcccaccactgttaccaggattgatagcagcatcagtttgtatcacatcctgtatagggcgtcctgttgcagctgaactgatttctctacgcaatccactgcagggaagggggtcaacagaaaaacaaaacagaggtgtctcagtgtattgcattatgaatcagcaaaagacagaatctgtttactcaaacaacattacacctgatgactcctgtagtaagagtgtggtcaagaccaaactgcataaacatagacataacatgttacagactgttagtgatcagtaagttaatgcaagcatgatagaaaataactcagaataatcaagtgttgtaagcatatttttctatccaggaatcaatacgtgctaaaagcctaaagatatcaccaaaacacgcgatacatagtcttagtggcataagatcattttgatatattggttgtttgcatagtgattaattgtattttttttgtgtacaatattctctagcatatattgtattttcattacaatgtcagacatattcatgaacagctagggggatttctaaggttgtttcagctctgaacagaaaagtacattgaaactatggaaataaattattcaggggtgcacatcacaagtaaagaactggatagtgtttttttgagactatgttagaatacattttattaagcttatgagccagttgtcatgaatgggtaatacaccgaacagttggtgtaagaaacactcaccgggttccctatggcaaatactttctgaccgaccagtaagtctgccgacacaccaactggtacaggtcttaatttatctgttggtgctttaatacgcaaaacagcaacatccttatcctggtcaaatccaacaacttgcgcttcatacactgtctgatcagcaagtgtgaccctgcataaaactagcgtggtaacttcacttcgccatgataccgttggaggttattatgtcataagaattcatcaaaacagtatcttagatggatggatgttttagctctatatgcaataatgcattgtcaataagttggcaccatgtagcattagcagaacagtgtacacagcatactagtatatgcggcttagaagaaaccaaaacgcaagttattgttgggctcgggaatgaattattgtgcaccaaatactcaagtgtagcatttaagtacataatgaaaatgatatgcaaaatataatcgttttaaagcttcaaacacacaatcctgtcagcaactatgactaatctatatcatagcacctttgaacatattaaactaagaaaaaggaagccattgaataatgagtcactagtaggaagtgtttacagttcactgaaccgttgtcagttgtcactgtaaccacattactgcagctaaccaacatctatttgcattactccatccatttcaagttctagaagtctagagcaatttacactcctatacaaatcttcatgcacccaaaaaaatctatcagaattgtgaagtatgattcgaattcagctctaagtgggcgacagcagcatgtcattttaacaaacctgagatctgacgcgccacggatgacatggaaattggtgactatgtggccgctcttgtcccagacgaaccccgacccggacccctgcggcacctcgagcacgtccagcgtgaaggcatcctgcctatagcaacccgaattcgcatcagtacgcgtgaaaaaaaaaaaggcaagccgaggaggacgaacgcggcggatttctacctcacggcgaggttggtaatgtagacgacggagggcgtgttctcctggaagaggcgcacggtggcgagctcgtcggcctgcagcttccgcggcgtggcgacgacgaacgcggaggcggagccggcgtcgccgaggatcagcgcggccgaggcgagggcgacgatgagggagcccgtggcggacgacaggatccggccggtctcgtcggggagcaggtcgcggagccgccgcggccacggccacggagaagccgaagccgaaggcgaagggagggcgagggagcgggaggaggagggccccggcgacggcgacctggaggcggcgcacgcgaggtgtttgatggaatggtggcgcgggcggggaggaggggacggggagaggaagcaggcggcggcagaggaggaggcggcggccattggaggaagggcggaatcagtggagggggaggagcagcagccgcggcctcccgtagaactggatgagtggacgaggatttgctgctacttggctcgccacgtcgtcgtcttcttctttttccttttttttttcttcttgtttattgttgttgccctcgtcggggtcttcgccttggttcgggttgcttcttcttttggtccacggatggatcaacggatggttctcgattgttcgagtttgcattttggatggaattcagcggatgatctgaatttgatggcagtttgcaaggctgcttgttattatcaaattttgcgataactgacaacactcacgtactaccaacaagatccgaagaggtttatacggctggcagctccagaacctgaagctgcatctgatacttcaatttgattctgtctcgacaaatgatcatgtaatagctggtgaattctggcactgggaggtggatctggattccaatcgattagtttttttttcctcttttcaaccttgcatcggagcttggcagtatggtctgttacggttttgtttgccataactgataatttgtagtataacctttgggcaactaatcattgtcatcgtcgtcaactaaaagtacaaactaggcttttggtcagcaacagagcttgccatcgtccccagattagttcatatttctgtcatcgatgatcctttcctcagtatttttcgtcgttatctagctcgggctccctagaaatgcaaaattcaatttttgaaaaaagaaaagcaaagtcatccaaaagatcagtttcaccagcacctccatttttattggatgaaaaaaattaatacatggtggagagtgtacctgcaaggagagattaaattctgtagttgaaccagtgtatcgcataataagttactcctgctggtatttatgttctagcaatttagtattcagcaaagtgcccattccattgactaaagaagagagtttgaacaacccctagaagcaaggaaacctatgtacgacaatacattttatacttgcagtatgtaaggctacattttgtaccaacagttttacatatacagacatactctatctgatcttttaagatcaaaatcactaacaaggcctaggcccagctcttatagaaagcactacaaggcacattacagcaggtcacacagctcaaaagcgaccacagctagtaaactctatctttgaacatctataagcaacaccaagggcaattttcagccaataatgctttcttttttgtgtgaacagtttcaaccccaaatcacattacaagaggagctcacagttgtgtcactgcatcatcacggcttctaatcagcagaaaactacacctaccaagtcaagctacaagaaaagagcaccaggtttactatttttctacaagcaaactggggaaacaacagcaaccgagaactaattcatcatcagagatcttgtacggcttgacaggtctactgatcgctcgattcaaattctgctcttgaggttgttcccagctccacaaatccaaccccgttagttatttatcagtagcctctcgcactgcagtagcaaagcgataattagaaatattacacttacaatttatctctagtctttcaagggaacacaaagcaaagatcacaagaattaaaatgaggataaagaacatccacgactatttagttaatgcaagctccaagatacatatatcaaggtgtttccaaaccagtatttcctgaaactattcacgacccttgctaacagccaccccattgaggttttcaaaatttacactgcaccagcaaccaaggttcaggaatctctctagagcacaagtagtacgtactcaaatcctttggtacattgcaattgcgcatttgccctggatctgcggtggtaatgcagggcctagtggacacagacgggcattgaactgaaaggtgaagcaggtgtgcagttagaaactgaaaaagttcaataaaaactgaaagagaattactactgaacagattgtaaaggaaacaatgcattatacaggattggttttgcttaaaacttaccccagcggcttctacatgtgtccaatttgttggctctaataggcaatagagacaagccttgtttctttctggcattacgcacgtaagcccatagtccttggggaaaaaaatagtgagaggcgattcagttcactgctacgatctaaatacttttccacatcactaaggaaatctgggaatatacctgatttaagattctcaactcaggcaggaggcctgaaacttcatagaagtttagaacctgtggtaatttgcacactttcatacgcttgtatcctacagcgatcttgcactcatgacagtccaggtaacactcctcttcaaactcggagacagaacggccatccatataaatagatttgctacattccatgcgggtgaaatgtacagcacagttgtagcatccccactacaaaattatgataatgtaatattcgcacaatacaagcccaacttatgttagagataagggaagtactacctttgtggaggactcaaaaagaagaagatcatttgtttgttgtgtgaagctgacttgcatcaaaaccatattcattgaattctcataatccttctctaagcaccaatagtcaatctcagatagaagctcatccataagagcttgtacattcaccgtcactgtttttggctcccctataatattgataaactaccagtaagaacactgcagatcaggaatttagagtgttcaactatagattgagttaataacacttacagtttctgaaaataaacagggagtttgtgatgcgttgtatttccaaatagtccatcagaatatatttattcaattccttcatattacatctcaagcacagatttcctacgtggaaaagataataaatatgagtggttcacttcaatggttgaggttttgggaacaaaataacatagggatcagattagtacctccaacatgtccaacatcataactatgatgaggaatgtcatctacgagagctctgagaccagggattgctttcaggagagcataagcgcatacctgaaagcatattcaaagggatgatttcctagaattgaacttgattcttttcaagagtaccatgcaacattgtaatctttcatactactactgctccatttgagattagctagatacatagaccctacaaaacatttattataactgcattgtatcataaaccacatcatatctgtggcatgaaattttcataagcctgaaactaagacactcatgtaggctcgcatatcttgtctgctgtaaaacactacttgtgcaaccagatttatataatctcttcggaactttcaaattttatttgccatattctgttaaagtatacgacctcggtttatcacttgcctagagcaagaccttatggtgtacagttttttttttctctaaggtagtaaagcaaggaatagggattattttcacaaaacatgcacgcaagtctgactgcacattcgaaaattggctttaggaaactatagcctgaaactggacttaatacgaccagaggcttacctaaattaacagaatacataaggtaaatagaggtcaaaagcttaaatacaaccagaaaatactgaattcgcctatattttctagaaccgataaagattctgcacttaatttgctagaaacgaaataaagactgaggacaaatatcatgttgaataacttaaatttggtccaaatatatcaagtttaaggatcctataacgcaaatcataaagaacatcaagcagaatctgaaagcctgacatggaaactaggaaattgaaaggatttttttttaattcacccagaggataacttcttcatctgaatcattccattggtaataagagttgccgcacagatgaaaagtactactacattacgactttgcaacttgatcatatgattggataactagtaaaacgatcaaagcggaagtaactgctaattggtgttgttctccagtgtggccagccaaagttggccttggatcgcagcatgtgagattgtgtttctggataattttgaccactctctccttggctggaacagttgttatgaacagaaatgcaaaggacaaaaaattctcaggtctaaggtcatgtggagttgttgttggggactcttaattatagtgtactcgcccacatgaatgatgcatccaggcaaacaggtgatcaactgctgggcctctgtgtccaatgacactgaattttcaggttgtgcacattaacattcctatatattttcagtgcactgtgtgtcaggattcaggatgattcaggaacagatatttcttccatttttttcataatttgcaatgcatgaagaaatgtaattaagtgaaatgcaagtcaatttatgtctggttttttttttcatctgaatttgcagggaatagctaggtttctgtccacttccagatttgtaaatataactttggagcttctttgcttgacaaaaaaaaagtaagagcctactcaagaatttgaccaaatccttcagatatatgttcacgaagagggactaaagaagagaaatttctaggaagaaactgaacaaggattgagttgtatgaataagcttacggcaaacagggtgcgtcggccatggacaaagtcctccatatcgacatcaaatatcgtacccaaatccagaggcccggccaccagctccaaatctgctccagacaaagagaaatgtggtaggtcaaagaagcaagaactctcgtagcatggaagaacagagagagagagagagagagagagagagagagagagagagagagagcgagagagaaatccgaagaacagaaagaaagaaagaaaacaagaaaagaggaaaaacactataattcaagcaagaagaggggataagaacaagaagaagaaatcgtgaaacaaaagaaagaaaagaaagaaaaatcgcaagaacagaaagaaagagagaaaatcgtaaaatcaagaaagcaagaaaaagaaagagagggagaagaaccaacctggagaggtaacagaatcgctcccctccatatcggtgaactgggacacctggtcggagaatgcagggagcggaggggcaggccacacgcgcgggaggcggggagaggaaggatttggatctccgcgaacggggaggaggcagcaacaatggtggacgcctggtcggagaagatgcagggaagcggaggagcaggccacgcgcgcgggaggcggggagaggaaggatttgggaggaagccgagcacgggaagaagaagagaaaaaacatttgggctggccagatactcatacccgcccacggctaggtacctcaaatgggccgggctaagccaagccacaaagtaggcccagtctgatatacaaccagacggcccatttggctgccgatgctaccaccgaggcaccgactagggctgcggcggcggcgaccgggtgggcggtgaggcggcggcggcggcggcataagagatttgagtctctctgtgcagtctgcagccaagggatttcatggatctgccaagttgacgatggctgaagcagatggcggccgatcgatcgaacgattcgagcaatcgatcccatcgcttcaaacttggagcggagcaggacgacgaggaggatatattatagcaaggaggtaagaggtcgcaagtaagcggcctcaatgcctaagagaggacaagattaaagaatcggagaaggatgagcaaatcgacaagagaatggacgatttttttggagatctacagagcacagacctggggaagaagaagaaagcaaaccgtatgtggggattctcgctctagcgcctttgggggttgtttaccatctgataccagcccgacccatctaatagctgagcgactgaaggaataagtccactttgactcccttacctagtgcctgaatctaattcgtatccctcaaccataatagaggatctctcaaccccaactattaaaaccggtgcaatttaactcccacgacggttttgcagagcggttttgctgacgtggtgtccatgtggcatctcaatcatcaaataaaataaagtgggacccatatatcatcttcttcatctctcccatccccctctctctcctcctttcttcttcttgacgccctagcgcaatacgacggccgacaccacgagcatcaccgctactgccaccgcctagctccggcggccactactcacgtaattgccaccgccaccgaggccgtttctcagcgtcatcagtggacggcgcagcagcactccaacatccagcgccacgcactaccactcctcctccgctcccaccatcgcctccgtggaggcgggccctcttggacgccttccagaagcttctggagcccacgccactgatctgatcggagcagcgctgctgtcgcgtgccattgccgatgaggcgaaagcgaagggtaatgtggccttctctgcaaaatggagcatagactgcagcaaagcaaggccaagtagtgccacgaccacgacgggcagtgaggatggagctacaacaggcaagccgcggactcacatggctgcgatgggcggcgatgccgtggcgaagtagacgagtttgggacggagtagattggcgcgatggctagtagttgatggctgattgggggccccgccaaccttctctagtggcggaggatggcgcgcggcgacgggcggcagaggatggtgcgtagcgacaggcggtgaggatgacaagtgccgcgacgaatggtggttgacgtgggatagatgcacgtggaggcgaacgcttcctgctagttgctatgaactgctgctgcttcatacttcctccgattaacaatataagactttataggattgctcatatttatatagatattaatgaatctagacatatatatgcatctagattcagtaacatctagtatatgaatatgagcaatgctagaaagtcttacattatgaaacgaagtcttacattatgaaacgaagggagtagatctatgaagagatgatgagccgtgaatagaaatgatcaaatgagagtaaaccctagctttcttcggtgggggcaaaataaggaaggggaggtgactagctccctcccccttgcacgtgcgggtgctatgtgctattgcatgggcgcagtaccactgtatccatggagccaggttgagttgcgaagttcaattcctgcgtttccgctcggcatggctcaaaggcaatttttgcattgcctcatcctgtctcgagagccaatacaggcagccaaacatatcaaatctgcatgcatggtctgacgaatttgctatatatctctcgtgtgatttttttcttcgtatttgacgttttttcaaccgtcggatctgcaccgcgattaggcgcgacgaatcagacacgcacaaagtggtccagcgccacacgtctcacgggcgacatggtggaggaaacgatcgataagctgatagtaacacagtagacagtagccagtagccggagtatctcagcttccagtcaacagaaaatggatcatgcatggcgccgcatggggcccatgttcaccacggtctccgtgcgatattttgatttgcgcgcccatgcttctctctatttcttttttttctttttctagttaccaaaatttacagtatatttgtactaaaattatagcgcacttacataccataactactatttttacaaatgtaattttagttataaagcactataattttagttataaatgcaatatttaacactttagatacctggacggtttctcaagcagtgcatttatactaaaacgataaatattctagttaccaaattttacattacatttgtactaaaattacagtgcacttacatgccatatctactatttttacaactgtaattttagttataaatcactgtaattttagcatattgcaacccatattgtatctgttttattagtctgtattggcccgatcttatttagacctgtttttgtctgtgtactattttttctaccgttggatacaaatatgaggggataaaaaatctgggtaattttttttcaaaaatcacacgagagatacctagacagtcccatggtctgatgcgagctaggcctagtacaggcaaccaaacataccctaaatagaccctaagtgtccagctacggtcgatcgacatgatataggtgagatttttcgtacaatataaatgtgtataatttacagtgtaatctgactatttttaatgaaaaatagctagtcaaatttgccttactaactgctccgcgtaattatttttgtaaagttaaggccccgccacccaaaatagctcgcgtatagaacagatatattaatttcaggcgtttggtggagtagcagcagcctcgcaatgcgaacagagatagctggactttaagatcgctggacagaacagctgaagtgctgaacgcaaatcgcaaccccgcgcgtcgtggcgagcgacctccgagagtccgagtcctagaggaagaagaaagcgctgtccggtacgtacgctcggtgcctgaacccaatttcgaatcgtatccggacaacgcctgcctattagtttacagaacagctgaagtgttgaacgcattggacgatctcatcatcatcctcgtttagggtgttaagccaattaaggagctgggcatcagggccagggggtttcggttccggtttcgatagatctactggcgaggacaccaactatggagacgatccctgtcgagctatggcaagaaatcttgctcagggcatcaaccaaagacgtcgcccggtcatgttgcgtctcgacgcagtggcgcgacatcgttagggacccctccttccggaagctccaccatgacaggcacgccacggcgcacgatgtccccgacgctctgctcgtcgccacatacaacatcgactcgcaaagagtcgccagcgtcttcccggtcgaaccggccgccgtctctccgacgtcgtccacgcgcacggccacggcgcccatctgccgggtcaaccacatggaaggctacaggatcgccaacatctgcaacggcttcctctgcttcgcctcccatagcacagccaaggccatcgtacacaaccccgtcaccggcgagaggctggaggtccccagggctcctcgcctccctcccgaccaagacaacgctcgctcgccggtcacgttcgcgttggggttcagcccgaacaactgtgtttacaagctgttccgcttcaccaaccgcacgatggatgtgtacacgctgggccgcggcgccgaatccaccgggtggcgccgacacgcgcttcctctgcacccgcgcaacctggtagaaagcaagccggccgttgtcatcggcggcaagatttgtatggcgaccatcggccctgcgccgtacaggcacccagccgacaatggcacgcccggcccggtgctggtggtcgacgtcgcgcacgaggagccctgcacgtacagcccaccggactacgggctcccgtgggcggacgcggcggtgagcgtcttcgagctgcacgggaggttgtgcctggccatcaggacagagaggatgatccagttttggacaatgccagttgaagaagacgacgacgaccaaccatggcagcttctctacaagttcaaggtcgtggatgatatccgattcaaccaatttcaaaggctagtgcccatgagtgcttggctcgacggccacaccaacacgctttgctaccgagagggcaacaacgtgtaccgtaagtacgtcggcactaccacggcaacagtacgacgtttttcttcgacaaaggtcgttattatgtcgtgggacagcaaaatctgcctcccggtggcttcatcgtcgttgtcgtcgttccagtgggacatctacgcgggctaccgtccgaccctgctatcgcctctcacctttgcatccgggcaacatgaggaagatgataacaagtgtgatctgttcatccgcagcttactacgcacactgcgatcccaaaaatcacagaaatgccgcccgtctccgacgtcagccggttgcaccaatgccaagagaatttgctgcataaatccacgcggattctaacataacataaatcccgttcccttttgtataagttcgacctgcacagacgcacagacgcagttgagttcgtgagtgcggtgtacggacacggaccttgtcttcactgtaacgaaaaaaatgaaatacaaatttgttgacaagttttctcggaaaaggagtaagatgacatcacctcgttttttttcatgtcatctaaatatttataaaaaaaatcataacatggattaatataaaatatcacttcataaacatgttagcataaattcaacttctacaaattacaataaaaagaacaaattaaactgaaaatagttaacatattcacaattatatttgttatttttattataacttgtaaaagctgaatttgaatagccatgctatcgaagttacatatttcatattaatatatcttgttatcttttttaaaaaaaaatagtgtgactatttaggtacaatgtgacatgcaagaaaataggaaaagggggttgaaaacactttcccagctttctcttccataggcccaactataacgggcacaacccaagtaaaattacggcccaatattatacaggcaaaatgggagaagagaaacgaggcgaaggggaaaaagggtaaggaaaccagcgagcgatccagggaggccgtagcccgtagcgaccatgtcgattgctccgtcgagctcgctccgtgccctggtcgtccccatcctcccctccgtctcctcctcgccctctgctcgcccagggctccgcggagtggcggcaccggtgcagcacgcgcgggcgcggcggcggaggggggcggcggtcgtggcgcgggcggcggcgctgccgtcggacgccgagtggctggagcggctgccggagaagaagaagccgctgtacacgcacagcctgccgtgcatcgaggcgtggctgcgcagcatcgggttctcccagacccgcgaggaccgcgccgtctgggtcgccgagatgcccctctggcacgcccgcctcagcctcgacgtcactgacctccacatcaggtagattttgcagtaacttgtccgtagattttgctgcccacacgtcgtaggctgtagtagtctctgaaaacttggtgatgcactgcacaatgcgtgctcgtttgggctttaattcttgctcgccaaattgctcctgaaccgtggttttgccaaattaaatctctaaattatgtggtgtgggtgcatcaaatggatggatatgtctactgaatattcactgtggatgtttcattgctgccctttgtagcaatcggcatattgttcagctaatgctgcaatctcttcatagcaatcagcatattgccagttcagcagatatataccaactttatttagtaccctgacagcctgacttccccgactgaaccctcgaatcacactatggaatgtttcggtataaggacgatgattctgtttctcacttatcaaaattcagttactaactccgtgtcatattgtgaatcaggtacttgaagagcggccctgggaatcttgacaaggacgtagagaggagattcagctatgcccttagcagagaagacatcgagaacgcaatacttggaggaccttaatctcatcaggccatcagaggctcaagattagaagttcttgcaggatcttagcttatgggcagcgcagtaggtgcatgctctttcatgagtgactaagaaaagctctgccctgctgctgattggtcgttcgacgtccatcaggaaggagctttgcttaagttcccttcagtcatttgtacaagagaaaattaattatgtatctcaatttcatttgtaataattcaatgtgcttaaggatgagacgtccagctgataatttggcaatttatttaagctgcaactactgttgagtagtactccagcagttttagctatagtctggaagaattttttttgagtagcctcttgacctctgtgcttgggttcttctctggaacagccgatggtagtgcgatgcactatcgtattcgtatctcagagcctttaaatcggtggttctagttttatttttgggtttgttaaaactgttgcgttctctttgcctcgttgcacctaacgagcaggggaactgcatccagctcagatagccagcagtagcctacaaggcacaagatagtgattggcaacatggcatcatccatcaggcattcaggctagtacttatctgaacgccgaatagcgactctacataaaatggaatcaggaagactcgccttgcctgtaattgcataaagttggtgtcccgaatgtagtactacaagacaacgtttgctacttgctactgtcctgtgtttcatttccagatcacgcaatatcgccaccgagagaatggtgcctagctcagctgacaggcagttgctaggagtagagcactggcctgagctcaaatcctctcaaacgcaagtttcttatcattttcttatttagcaattacactatgctaagtttctcattgattccaacacattttagagaacgatgcctagctcaactggcaagctcctgctagcagtaatacgctggcctgagctcaaatcctcttgggcgcaggtttcctcactaatttctcctctatcaatatcaataatgggtactatgtttctctccagtactttcaaaggaaaaacatatcgatgatttgcatctttgtgtatctgctggggcaaaccaggactgatcaatggtcattatagacaaaatcgaccattaacaacgggagaaaaaaacggagtacatgatcaattgatcaggtttccggcgcaaccaacctatactagacgggtgcagatcctctggagttggcttccaattctaaccggtgaatttgaaccaatctgaccccttactttgtttctatgggctagatgtagccatgttacctctttctaattacacatttacaacagaaataatcctatctacttttatttttttgtgttgtccgtccattcagatcaatagtctcggaagagcattatacatcatggagtaaaaaataattatctttaaacttttttaactgagttgttatgaaatttacggtattgagacctgtatcgaactcattcatcctaataatcgacagaacaaaaggcttctatcggtgcaatgtttttgttttgttcttctctaattgttgccagaaagtttgaaggtaacatgttctctacaatactagataacatttttttatagactctacattgtagtatttcttttgaaagaaaatgggccagtagtaaccaggggaaaatggattggatttaatctaatccatcaaattaaagggacggcttggattaagtaaatccaccatgtggatttggaggcaactccaggggatccacacccacactagaccaaggaggagcccccaggatatgcaaggaaacaagaaaaatcattcagcaaaccgagacacggacgaggtatcagtgaagccacacacacgaggcacactagttccaaactttctgtttaaacttctaatttttccatcacatcaaaactttcctacacataaatttttatttttttatcgcatcgttacaattttaatcaaatttttaattttagcgttaactagacacaccaactgaacttctattccaacacgcatgctgcaacgaggcaattggataggtctggtccaacccaatcaccgggcgccccaatccaacccaagccaggtcagggcgggatcaaaaagataagctagctaggccccgtgagctggcacctagtcactgaccgcctcgtctccacgctcgcgtgggcccacccccacactgttcccggcgacgtggctcaatcgcctcctgactgctgcgtaggcgcacatgggcgacgacgtggcaaaattgacgcacatgtcccctttctttttccttttattccctcctctcgcacttactccaatcgccaggctataagcggtggccccacacccccacacgctcgggcccacaaagcccacgccccacggcacgccaacggcgtgggagaagcttccgcttttttgctcggcaagtttttaatagtatagctaattgtggactctaaattatttatagtcaatttaattaccgattcatataataattatttaatagatggtcacacatgtcatatacatatgcatcttgaagttcgacacatgcatcttaaagtctgtgctacaactggctacaaatctatagtccgttgtccttttctctcctgttttatctttatgaaatgtgttatagcttgtttagggcccctttgaatcgtagggttgaaaatttggagaaataggaaaaacacatgattctgatatgaattgaagtgtaaaacagaggattataaaacacaaaaaaaacacaggaatgatcgtttgattgaagcgcaggaaaaacgcaggaatcggatgagagagatgaattttccaagaggttagagctcttgctatatttcctctaaaatccacatataatgtgtcattccatagaaatttcataggatttggaaaacttcaatcctttgaatcaaaaggccaggtaggaaaattttctataggatttgaattctatgaaattcctagataaatcatttgattcaaaggggtcttatatttgctattgtacttgctctagcacgaaaaagtttattttattctgtggggggtgtgggtcccacctggggatgcgggcaccacgtcacccacatgactcggatgcaaagctggacctggagggggcgacgcgtagagcggcgagatggtcgacacgtgagcggacggatggaggtgacgaggaataaacaagtggcccccacaccacgcagcccgtggcccagtgcaccctccacttgccgcctcgcccatcacccgaccccaaattccagacgcacccccccagagaatgtacacaccagtacaccaccaccaccatttggtccatggggcgcacaatgacacaaaccactttgcttacctaacgagcagtcgagcacgcacgtttatcacgaaattagtactactagttcttatcctggagattctatctggtacagaagcttgttggcaactcaattatttgcttggtgcgtgcaatcttagtcgtccagttaatcacaacattattgttcttagcgtggtaggtctccttataattggaggattagcatagaaactttagaggattctaatattatattagcaattcttgtgaaacctttgaaacaaatgattaaatcctgttatatctttgaattcatatggaataaacaatcctataatgatttttgaggaaaatagccaagagatccagtatcatgtttttagttctttctcttttgcaatcatatgttttctcttggtttgtaatcaaacatctcttttgaagtttttatgttagaattgaggattttttgtgtaactcctattcctatgttgtgagtttttcatgattagggtctatttatatacaccaatgctagacaatcttaagctaggggtgtaacaaaaggtacacgtagcacttggggatgaggttcactggctggctgaaggctaaggagatggggggaacaaacaaggtacatcggcggctgacggtgttaacatagtggacgacggcactgatggcaggaagtagtaactcgagcgaaattcaacagaggagtagaaggatactgagggaaattcagccgctcgcttaatttgaatttgaatccaaaacgacctacaatctgtaaaattacttatatacgctaatgtgaatcaatctcaagttggggtgcaataaagggtacgcgtagcaattggcggtgcagggcaacccccggtggcctagtccttatcatagacacgtgtctcgtgacgtggctccagcctttgccgcctcccctttctctcgcctccctccctccctcctctctccgcgcccttctctctctcccctctctcgctgctcattggagatcaatctgctttcacgtctcctctctctctccgcgtgcttcctccgagggtctcctcctccaccgccgtctcgcttcccggcacgcgcgcgcgggcggcggcgagctccctctccttcgccactcctccaacccctgtgcggctactccggtgcggagccggcgagcgagcatgttctaagtggctctcttccttaaatctctctacaagaggcaattgaattgaaggtatttgttctcttcctagccgctgctttcatgagcgataggagatccatgctagcaagttggattgatttgttcactccgtccaaattattagtccgtgtcctcctctttgttccggatttcgatgatgcgttggtggtggagttctaattgcagtttgtatcgattgggtgtgtgactgaatatctagttactgaagcagtttcatgttgatgtatgcgtttgccctgtcctgttcctggaaccaggattaataataaacatatgaaaagttatttgacctcgaaaaaaaaattgtgctctccaatgtaggagaccgacgaaacttttgtttttaatagctgcttttagttctaaaaatcataattcgacttgtatgataggaatttgcatcttatgaaaagattgagaattgtttttacacaagttgatagctttatatcgatactgttgggcagtgtgccaaaacgtccttttggtgaaatcaaacatttctcacatttcaggctcacgcaaatttttatttatttttagttgcttaactgcacaccattataacctgaatttctacttgataagcagacagcaggctttcataaaaggcatggctcatgatgaagctgttgctacacaaaagattgggaaaacaacctcccctcctaaggtaagaatacctgttttagttgtagttgtactgactactgagatattccttgtgatctgttatgttatatcttctttgctgtgaattgaaattagttgtactgttgtcgaaaacagtggcatgaccaaaagccccagatcatgatcaatgtatatataacccgtctctttttccttcactcttttttgctttcctttatgtacctctatctctgtctctcttctctctaaccttaaacttgtaacctgtaaacctcatttctattaatgaaatgactataaggtagagcatgctctaccttcttgcgtcaaaaaaaaaaaactagtctcttaccgcctcttttctaaaagggagagttcttctttctccaaaagtaggggacagagtacgtaaatgaattagcaacctttgaattacatccagtattcccaatctgttaacatgatgtctacactttgaggtcttatttccactacatggcttactctgaggtcttgtgtggaatgacaacatattgtattttctcacctgactcatcaatttcaagggtaggagagtagagctacatccataaacatcttatcaattgccttcatttgcaggatcaaccaactccatgtccatttcctgattggtccgctgttcaggttaagtgttttgctagtaaattatcctataatctccacttccaaaagatagaatatatataatgtaagcatcaatacaaaatttttcaggcatattatggccctggtgtcttaccaccgacatattttgccccagcaatagcttcaggccatgctcctccaccatatatgtggggtcctcaggtaatttattttcgatctatctatgcaatgaagttccaggtgttgcatgaaatctgaatttctctctgcatatctgcagcctataatgccacccccttttgggaccccgtatgctgcaatgtacccacacggtggagcttatccacaccctcttatgcccatggtaaacattaatcttgatgtgcttccatacacttttttgttcaattaaacttgttagttgaagcattaaatataagatttctgcctaaccattttagatagatgttttgttatcaataatggacttgcacaagatattgtagttttgtggaaaatcggacaaccaagtcccatcatatacagtatcaaattaacttctaacatggcagatatttcggaaaagtctatcacggttgaccagacaacacagtatattaaagggaaaaaatgtatgctaatctgacttctgtaatgttgtttacggtgcaccataatcagcactgatttcataccaagcatatcaaacttttaaatgatgtgccgaatactagcttacaggaagaacatacgtgtaggcacagtaacagaatcacattcctaatgatccatcacgcttgttccccttggaccatacagtccgattgttttcattatttcagttacagcgtcagaacctctcatattgattcttattgaaaaattttagccttaatcctatgttgacttgtgattcaatatatttattctgctgactcctattaatttgttttatgtcaattctttcaagatggcaaatccattgagcatggaaccagccaagtctgcaagcagtaaggaaaaaggctccaacaagaaacttaaggaagttgatggggctgcagtatccactgggagtggtgacagtaaaaaaacaatgacgtctagtggggattacagtgcagaaggctctagtgatgtaaatgatctaaaggtaccagttagtttcaaatgcatgctacattgtgttatcttgttgttttctaatgaacatgtctgaatatgcttaaatatactaaaattgtacattctttaggtgggcaagactggcaggaaacggagattggatgatggagctggtatttcactttgtaacaacttttttaatatcataggcataatgctaatttcattttccctcatctttgtaagacttgttatagatgtatgcagtaccaaacttgattaatcatttgcttcagcggttatcttgtcctctatcatgccttgtttggtataacttgcaacaatttttttattctcaacattatccctttgtattatttggctcttcttaatagaaaatagtgtaaagcttctgcaccttcctgagaaaagggaaaaatatttatcaaatgacacataagacacatctttatctttcagtttcttaatggaatggtgactaatcaaatcctgtttcaaatttgactttgtaaaaaaatagtggctaacaacttaaatctctgccaggtgctgaaacatcagcagctgcaaagatggaaaatgctttacctcccagccatatattgggaagtactgcgattttgccaaatcacagctttccagctcaagtaattaggcccagtgctactaatgttgctaattcgagggcattgggcacaccaatatctccaccgcctggtgtgattgttccaagtcatacaggagtatcaacagaattactgatcaaggtatcttcaatctgacatcatttagaaaactgtgaaatcagaaattatgaaaaacaataattttatgtaaataagttaactttcatgtcattgttattccttgaaaaaaattacactagtatatatacatttctcagggattaactttgtggaattcttatatgccaggatgaaagggaattaaagcgtgaaaagaggaaacaatcaaatagggaatccgccagacgatcaaggctgagaaagcaggtatattatagtagcaattaccctgtgatcaatatgagcaaaacccagttttctgaagaagaaaaagaggcatcatcctggaaacatggactgaaactgaaaaccaatttggacattctgttttgggaaagggattttattgcaaatcccagtgaagtcacaggataatttaatcacatacatgtcatgtcacatacaaaatttcaagttagtacagaacatatttccataatgctttcacttatgatgtcagtgttttcgtttaggctgaaacggaggatctggctacacaagtagaatcacttacagcagagaacacgtcacttagatctgaaatcagtaggctatcagaaagctccgagaagctcaggctggagaattcggctctaatggtactgaacctcttttatgcttccacataacccttaacatgtattatatacatttctctgatagaaatgtgccttattattcctaggggaagcttaaggatcctgcagcatcgacccaggcagaaacatctctgcagaaaaccaccacagcctcctctcctcgcgtcgtggagaactttttgtcaatgatcgacaacacgaacaagacgagtgtcagacacacagagcatgctgaacccaagcttcgacaactcctcggctccggcccggccactgatgttgttgctgcaagctaatctgccattttccctgtcacagaggagagactacgcgcatgcggcctggggattttgcaagctcacgctactactcacataacattcggcagtacagtgttaggtgtcaatttggtcagtatattcaggtgaccatctactactcaaaataccgtttccaattgctgttccctgctcaggcatggaagcttgctaggtgagaccaatgtaccacgttttagcagtgttgtaacataggggtgttgtgctgcatgccaacctcaaaccttgtgagatcgctaaacactttttagaattgaaatttgtggagaccaaactaaatgaaatgtaacctaccctttttacttgggtatatgggcccatattctttacatggcttggaactgtaactttgtaagatgtttttagtcaaacttctttaaaatttatatttataacactaaattagtttcattaaatatattatgatattatgtttgttttggtttgaaagtgttactagatttttctaaaagcttaattaaatttaaataaatttaactataaaaggataaactctattataatatagagtaaagtgtacgggcagtacttaaacttatagtggtatgttatctaggtctctaaacttttaaaatacatatccaagtcccaaaacttatcacagtgtgttatctaggtcctaaatcaccgcaacgccttcagcatcctgcgtggagttgatgtagcatgccacatggacatgacatgacattatacaaatggaacccatataattttttcctttttctttttttttctctttttcccgtttcttctcctttctctgtgacccgagcagaaaaaaaaggaaaaaagaagaatgagaagaaaacgaaaaagaaaaaaaatagtaaaaaaaaagaaaagacatgtcacgtccatgtggtattgccacatcagcaccacgtaggatcctagaggggatgtgtcaatttaaacttagatgatacactttaaccagttttgggacctggatatgtattttgagagtttagggagttatataacacaattctgcaagtttaagaactgctaatgtattttactctataatatattacgaaaaggaggaagtagttcatatccaaaaggttaagccatactagtacgtgaatccatacactttctacagtacaccctgtgatctgaacttctgatctgatcaactctagttaatgactctgtcggcctgtccttgtacaggaggaccactctgccccaacagctttgacagtttgacgtttgaccctttgcaatcggatcaaacgacaaaccacaaacgattgacaccgaaacactatccagatccactttgaccgctggatgccaaacttcttcttcttcttcttcttcttcttcttcttatttttttccaaagccaaactcaaggatggtagaagtcctcctgtcttaagcacatgtactacattacaacacgtgtatgatctttcagtttctcatcaatttatcctgcttaaagttcaacatcacaccaaccgcaagttcttgaatctttgatgcataatcgtgccatgtcttgggagtttgatcaagcaattccctcttttgtgctgtgcgcattagcaagttagcattaagcaatggcgcactctcgccatgacatgccaccacatgtaatgtccatgtactgatgcagagttaacactctagtggcttagctagtgcttcacttgctcgcagttaagtgggagattaggtcctctttcagcttaagactttgctcgaaatgaaaggaaaagatacagaaagaaaaaatggaatgccgtactaagcacttgacctctcctgatctctgacggcgatgggtgaaagaaaatctctatctcttcaactcagcttagcatggtgcttagctagcagccgtagctttacacggaggatgccgttaatttcgccatggacctgccgcccatgcacatgcgggagactcaacgagacgacaactgaagacgacctgtgcagggcaaatctccaagcttctgacttgtggattacactcgctgcacttctccctttccgaaagattcgcttaaacagttttcggatcaccatttttgtccgaatcattgagttcttttttaagttaaaaaaagttaaatcactgggttgatgtaagtaaatgagaggcccctgttctaagcaggtttcagagagcacggcactcgtacatttggcgaccatggataagttccaggtcctgaagcaacgcaagtgttcctttcgctgcactgtctgtgaacaaagcatacctggcctatgtgtgcatgcaaacaaagttatttagagatcgtgtcacgcataagaatcgtttgtttctggaaatttgtcctctccgaaaacaaaagaacacattacttcgatgtttgaacagacgccatgtttagaacaaggcttgttgattatagtagctactactaatctgccgttctgctttaaagaagagaataaagattataataaaggagtaaagaaagagagatggcgaagcggaaggcttaagaaacgccaaaaaagcctttgaaaaacttggaggagaaaacttgaccgttgcagcgtgggctcctccgcgaaattaaaaagaaccggctaaaattaaaatgcaggcattacattacgcagactcaaggcaggacacgagaaaagctgcaagagtttatccgattattatccacaaggcagaagccaaaacaatctgttaattctcctcctcgttcttccttcaaaatttctttctcctactcagcattgcgtcgtcgatgaaacccttttttcctttctcagtttctttcctgagacttttctatacctgcaaagtgcaacaaagtggtcgaacccccacggtttgtcttagttttttctcaacgaaaaagcggcgactgcacgtgtcctccatggccgcggcgctgggttggttttaccgggttccgggctctgccgggtgcacgaagccatcggtatcagcatcaacctctcctctcctagcctcggatcctctcatcctcctcgcgcactagagaagctagagcttcacccactcgtgcttctctcctcgcctcgcctccctcatctcgatcttccaatggcgacgtgacgaggtggttgccctgcgctgcgcttctgaccaccacgtgcatttccatttcccgctgcatccgatccgtttgttgttgttgccgtggcgtgccttgtgaatttgctgctccgagcgagagcgagccggtggtttggttggttgcagaagctttggcttccgctgaggctgcgctggtgtggccggtggctcacgggtttcaggccgcgcgcgcgctcgcgcggtgttttttttttttttttttttttttttttttgcgctcacaaggaaagtgcagacgcgcagtgtaaaacgtcgtggcaaccccaaccgtcccaatggcgacgccgcccactgcttcccgcgcgtcgccataaaatctcgtacgcgtacgtgcgcgcgctcgtgtgcgtctctccttctcctctactctctcttcacgcgggctggctggctggctgttgatgagcatggggcactacaccaacctgacggatccgaggacggagctggaggtggtcagggactggaacggcgtcgaccaggtcgtgctccgctcgccgcggggcgcctacgcgcgggtgagcaggtttttgcgaatggattttgatcggcttggcattgagtcctttggtttggtttggtgcgattctgatggctttgttttcttcgtcgtggtgtgtgttttgcaggtgagcctgcacggcgggcaggtcctctcctggaggaacgaccgcggcgaggagcttctcttcaccagcagcaaggtgacgttttttttttttcaattcatttttcgattcttcagtgctctgcaaccgggttcacattactgcgattagcctagggaagtgtatttcgcaagttcaattgattgcagtagaattcaaactgtacgctcgcgggatatgttcttggattgattctgtttgagaagtgtgtactctgaacattaaactgtacttgtggaaggacagttcagacgggctctgaagacacaaaaacctgaactgtttcactgtttccatctgggaaactgaagaaatcttcagtattctcttccatggctctttcactggcttcaacacgcagtttcttgacgtgcaggcaatcttcaagccaccaaaggcgatgcgtggtggaatcccgatatgttttccacaggtatcatagtcttccattgcactgaagatttgtattatatactgttacaaataggatgccaattgataaggaagctagcttcccttctttttggtcttttctgatatccacaagactcactgcagtttggaaattctggaacattggagcaacatggatttgcaagaaacaggatatgggccctagatgaggagcatccaccattaaatcaaaatgataacaacagcaaagcttctgttgaccttatactaaagccatctgaagatgacctgaagtgctggccacatgggtatgcatttgtttttgtccaatatgtatttccttttctcttatagcacgcctttttgttagtaagggccatatgtcaaagttttgttatgtactgcatcatgggggtaattagttgaacagcctaatcctggcacttttgatgataatagtcaggagaatattttatttcagggaggttgttgaacatttgcacctcatctcgttgttaatgctgactgaatttgattttatgtatgatcctgcaatatttgatttcagttttgagttccgcctgagagtttctcttacaaaggatgggaacctgtcactagtatcacgcatcagaaatgttaatggcaagccattcagtttctcatttggttatcacacatatctgtctgtttctgacatcaggtcaggcatttcacccaacattctttttgtacttcaaccactttttgttggtgccatataatattttgaagatgacagattatatatcttgttaattccagtgaggtgaggatagaaggccttgagacacttgattatctcgataatcttagccagagagaacgttttacagaacaaggagatgccataacatttgaatcggaggtgaaaaatgtttgaataatcatatgcgctatatactttgatctactgattccgcaaatcttgttttgacattttgttgtaaaaatttacttgccacatcataaagtccaagatttacggtgttagcacctggtctatgtgcaaacatatgcaggttgaccgagtctatgttagctcaccaaatgtaatagctgttctggaccatgagaagaaacgcacatttgtcataagaaaggaaggactgcctgacgttggtaagacacaatattctctttgccacctaaccatggtaactttgcttgaaaaatttccatcatattcgctttattcctcccagttgtgtggaatccgtgggaaaagaaatcgaaaaacatcgtggacttcggcgatgaggagtacaaacagatgctgtgcgttgatgcggctgcagcggagagacaaatcactctgaaaccgggagaggagtggacagggaagcttgagctttctgaagttccatcgactaactgcagtggccatcttgatcaacccggtatcatcatttagaatatggcttgatagtttagaattttaccattttccttttttacatgagatcgatatgctcctcctctgccatcttggtaaaaattcttcttgtacgtgtacaaagattttaccatcttggtcagcggttcgttttaagcttatgccagagtcatcttgtttgttttggtttctgtgataccaatacatgtgggcgcaagatatactgaacttttctgatcagaattcagagctaacagctacgcagacagaattcagacttcagggtgacacttaaaaaaaagaggacttttacggtacattatactgcaagtatatactagcagtatatttatgggtataataggaatttgtcaaaaacctaaaaagtgcttattagtcatttgaagttgagatttataataccgtccatcgacagtaccctggaggcctggatctcgcatgagcggtcggggcatgttctgacgacgacgcgcttgtaggctcctcgtttgacgactgcgcgattcctccccgcgtggctttctcctccgcatccgtcctcacagctccagcctttcccaaaccgctacgagctggctgcctccccccgcttcccacctccagtctcactgctcctgtactccccaacccgtggcggtgaagtgtttgtacactactctcgtggcggctggaacccagcatcagcctccgtgccctctcgcggcgaggcggcgcgctgctatagccggctgcctccccatcttctgccctccatgcccggccgtcgccgattctgtaggcttccttggactgctggtgttgcagaaaatgttacttccatgcggtctgcctcctgagggagagacaaagactgaggtcgagcgttcaatgttacatgctactactgaaagtatcagattcttatccaaaacaggatcaaaatatttttttgcgtagccatcttgaacatctgaagccctctatatgtacccttttcgaacctgttcatcattaatgttcagtccttgtgtgtagccttgccggtgcaaactgccgcagctgcgccccttggcctgggcccccagcagccggcacccatatgcagctccgcctgaatgccgtctccgcacacccgagccgtcaatagaggagttaaggaaggttttggatgagtgggaatgatagaagaggatgaaaagaggacgtaaatagaatcgattcccgggggcggcggcgcggggcgcggcgtgcttccggtggttgtcggcggcggcggtcaaacatgcgacaaaggaaagggaacggctctaactctccaactggaattcgctcgagcgggatctgacgaagaagtaaagaaatgcgaaaatacaaaaatattcctccacgcaaaagatgaaaaaaactaatataccctattcaatttatactgcaggctcattgggcggaagattagatgaatctacaccgttaaatcatatatactgctagtatatacttgcagtacaatgtaccctaaaaatcctcttaaaaaaaggccaatattagagaaggatctaatatcaaataattagaatgggtgaggtttcaaacccagatcgtctagcccaccaccttatggagttagtcggaggaaaatgggctgaattctgacaatcctattgggccgcgggccgaaaatggacacctcaatttcatcgctcttaggcccatatgcttcgtgccgatagttcgagtcgtgggcgctcgtggcagccggcggcagcgaagcatctgtcgcgggagacacgtgcctcctccagaactacacgtgtgcaactgcatgggcgagtcagcgcaccataagaacagctcgctcgcactcgagtctctctctcgttcatccatccagcggcacacacaccaagctagcttctagtagttgagcaatggcggcgtcgtgccacgaggtggaggtgccggggaagccgacggagacggggacggcgctgctggaggcggcgacggggagcatccaggggttcggccccgtgaaccagatccaccagcacctgtgcgcgttccacttctacgccgacgacatgacgcggcaggtggaggcgcaccacttctgcgcccacctcaacgaggacatgcgccagtgcctcatcttcgacgggcccgacgccggcgcgcgcctcatcggcgtcgagtacatcgtcgccgagccgctgttcctcacgctccccgacgacgagaagccgctgtggcacacccacgagttcgaggtcaagggcggcgtcctcttcatgcccggcgtccccggcgtcgtcgagcgccgcgacctcgagagggtgtgcaagacctacggcaagaccatccacttctggcaggtcgaccgcggcgacgcgctcccgctcggcctgccccagatcatgatggctctcacccgcgacggccagctccgccaagaactcgccaaatgtacgtgcaaaatcattcatgttcaattgtgtttttttctccaatctatcgtcagtcgtcacagcttaactacttgtgttggtgattggtgcgtgcattgcaggtgtggaggagaagttcagcgtgtcgttcgacaaggagagggagaaccgagcgtacatgagcggcccggatcacggcatccacccgctggcgaatgccgccggcaagggcttgaagaccgatctccgggaggttgatctgccggcgatgactacggcgcacgccgggagggttttcacctgatgacgacacactgatgagcgattgagcgacgactcgacggccttgctgcttctgcctgacgacggttaagtagtatgctagcatatcacgggatgctccgattagcttgtgtaccttcactcgtgttatgtatcgatctgttgtccctgagcgtttgttctgaaagaagcacactagagtatccgactgtagtacctgtagcctcttttctagcagcttgatgaacacaagaacaacagaacaggttgtgtatagctagttcaaaacgtgacatctgtacctgtctcgactcgtctcacgtctccccatctgtactgtgttgactcgtctcacgtctccccgagtctacacgtcaccacgcacgtacgtacgacgacacagaactctcacacgaaggggcaaatattttccaaatatttttcttttttagagggttgtggttacctgtcttgatgccttttggatctcaagggccacaccgctgtacggtgcacgtcgcgtaacggcgcgtggagcgggttccacagcgccaggacgccgtagtggtcaccgatcccccggagacggccaggtatcagcgctgcgagttgaaagcgacgggaatttttttcatttttaattttttttcttttaatatttacagaaataatccatcagcgcaaaaaattacaaaaatagaccctactgccctccattagggcggcaagctgacgtggcaaacgggtgagggacgggcggtaacggcagatgggcggcaagctgacgttgcaaataggggagggacgggcggtgacggcagacgggcggtgacgggagaggtaagctgacgtggcaaacgggggagggacaggcggtaatggcagacgggcggcaagctgacgttgcaaataggggaggggcaagctgacgttgcaaataggggagggacgggcggtgacgttgcaaataggggagggacgggcggtgacgggagagggagggttttttttttcgacgaaaaccggcaaggggctcccatgcaaaaaaagccaacccgggcctaatactttttggctggtactttttgcatctgggccttttgccgcccttggtactttttgcatctgggcggcaaggggcccagatgcaaaagt

SEQ ID NO: 9459 - DNA, 26988 bp, Oryza sativa
catgctgatacatgattctaaatccatctgctgtgttgattgctgtatggctgtatgcagctgattcagctcaatccccaaatttcttcacaaataaactgcctattagcaagcactcaaccatacatacagcaaatgagtccgcggagaaatggttggattggaggggggaggggggaggggggagatgtggatcagattgagcacggaaaatcaaagagcagaacaaatcgctcgaaacaacaatccaagcaaaggaaggggggatttctggatgatacctgggttcgagacgaggtggggaggagcgcgtggaggtggaggggaggaggaggagagggaatggatcgaagaggcaaaatgatggggagccaatcgccgcaaagggcgcagggcgcatgtgtcacgtggagaagacgaccgtcacgtggaggagggggagaggacctggggaacctgtggggcctctgttcatctgacctcagccaacggcgtgcatctaccgtaagagcacccgtaatggtaaagtaaggtactctctataaaatatgtatatctcagcaataaactagattaatagtaaaccaccttaatagtatgtctatatgggtatctatagctctctaatccattgccttatttttctctatagactatctccaggttagtagatagctttgctcttctcttccaagtaagaaaatatgctgacatggatctcttgtagagagcctatagataatcattaagggtgccctaagggtgtgtttagttgaggaaaaggaaatttttggtgtcacatcgaacgtttgaccggatgtcggaagaggttttcggacacgaataaaaaaactaatttcagaactcgcctggaaaccgcgagacgaatcttttgagactaattaagccgtcattagcatatgtgggttactgtagcacttaaggctaatcacggactaattaggcttaaaagattcgtctcgcgatttcctccataactgtgcgattagttttttttatctatatttaatgtttcatgcatgtgtctaaatattcgatgtgatgtttttggaaaaaaaaattagggaactaaacgggccctaaattgaagggccaatacaggagtacgtgcttttttttatagagtaaattgcatcggcggaacatgaacttgtcaggtgtgtacaatctagtgtatgaacttgtaaaatgctcttttttacataaacttgtcttccgcgtgcgagctaaggtcaaaaggatattacatgactaattttgttgatttaggtgctgattaggatactacgtaaacacatatatatatgagaagattgctacttagacatacacctgttcaataaaaatatagaatgagacatggtgattgtagagaaagatataaaaaactgagcaattataaagggttagaaacatatgaaattcaagataaactagagaacaaaattataaatatagcttgttttatgtatactaactatatgtatgtacgccatatcctaatcaatatcagttaggtaaaattaaccttgccatgctattttggacctacttcgcacggattagataagttcgtgtaaaaaacaagcattttgcaagttcatatactaaattacacccacctaataagtttatgtaccatcaatacaatttactcttttttatactatcaaaacctcttcgaaaatcaattgagaacatgcatgattaggaaaagatatacagtttatatgattttaattgaaatggaaacatgaaataaagaattacaacaggacgtaggaaaattaaaaaataatgattatttaaatagacaaaatggaaaattacacggattagagaagagataaatacttgaataaaggattgcatgagattaaaactcaggctacttattactttaaaattctgtagtggtgaagatgactccaacctgataaacacgcgacttattaaccgtgggattggcagatcggatggtgctgaggatcccatcgcacgcgctcctcccctccgtgaatcacttctctcccccacaggccagatcgcgctcactatccaaccgtcgacgccgctcccctcatccttcgccgcgcccccaccacgccttcgccaaccgccactcctgctcgcctgaatccacgccgccgccgtcgcggatcgacatcgccgctcctcctatcgcgctcctcccccgccggcaccgcctccatccatccgccgcgtctcgccgccagtcgcaccaccgatccattcctcctctgccgcctgctctcccggtccctcccgccccatcgccccaacacttcccccgtcagcaccgcctccatccatccgccgcgtctcgctgccggccgcacccccgcctccatccatccaccgcagatcgccatcgcacgcctccgcctctcaaggtcgcacgctcatcgccgcccgacaccccgccgattggggaccgaacgctgaccctgcatcgacgccacaacagtcgacagaggggagatgttgaagacctcactccaacgacggctgcgcgcggcgacactaccaggcactgagggagagaatgcggtgcgaggtgcggcggggttgttcgtccttgcccagatcaatgccgccgccgatccctcactcgcccctcgcccaagtcggcgccaagggcgaggttcgccaatctgcttcccagccgcctcgcccgctccatgggagaggtgacacctgtgcccgcctccagcgctccatgcccccggataccatcggagcacgatccctccttagcttctgccggagaagggacgcatgcgccgaccttcagcactctacgcgccctgtggataattggttcgttctctttacgttgcaatccattcatttatcaagaatcatcattgtgagtgccgagggttattacagattgcaggatcactaatgctcttttttgcccataagatgttcaacgaaatgctgcttagccaatgtattaccagaaattgatttctctgtaagtgagaatgtcatattgtcatgtcccctatgttgttatttatactaatgattgcaggattctctctgttgttatttatgctatgaagtgctgggaagttgagagtgttgctaccaagcaaaaagattcaattgatctgttggagcaaactaatttggatctcgcagtctcaaaactaatctggttcttgattgtttcagagtggatgaaaataaaaaatggaatgatgcagtgaagattatgtaagcaatgttcgtgatatatcgatcctgaaattctcatagatggccattgcacaaatacaaaaatttgcaggttattaattagtgaacttcatctctgtaaatctgcataacatatgttaaagctagcccaagaattaatatgttgtaaatctgctctacagttgacactgcttacattttctactattaataaccctcagctgtgatagatctgatacctgcttaaaaatttgagctgagttttcatacctagcagtaggactaacattttatgttgtattgttcagctcaagatgaacaaccacaccaaccccaagatcaccaactaagcctatcctgcttcatgattgttgctgcaaactccaacatgcttgctgctggtgcaatctgagccggctggtggcagatgggagcctgccctatgttgttagcagctttcttcactccaagtcattcttgctgcctgtggtcttggtagtttcttttttgtgttgtcaatttaattattatgatttcccatgtgctcggctattggtgttcttgtttttatctgttttgtttcagggtgtcattactatggagtagatcatttttttcttatttttttcaatgccttgtaaaataaccaactagcagggatgttcataaatttctcccttttgtttggtttttttcagacatatatatataatgaaggcatatatacacaaaaggaggagctgtttgagggtctaaaggacaatagctcaattgactgggaagctgttgtcatatgctgagagcaatctgctaaatgttaaagaggtgcatctaacttttgtacccagtgaactgcaaatctgcaccttcatttttgattaatagtttctttggattcagatcaaaatagctcaacatgggaatttttctagcagaggatgggcaattcttggaaaatactatatatttcttgtcgttgaatgtgatcatgtcccattattttggcacttgctgccttgattctgttgcctgtgccagcccttcagctagctctctatcacacatgaatgcgtgatccttgatggttgtatgcagttgggatattttggtgagttcatcccccttccccaccccacctctctctctctctctcaaaaccatcatttatcttcactattgacttacaatttcacttctagctgatgatgatcaatcaaagctagctcatatgtattagtgagtttatgaaaaaaaggatcagatattcaataacagagtcagctccttccgaacgatggcaaaatggtacctttataattttacttctcaacacgcacacattttttttatgacgagtttgaacttttgttctccttgtcagattttatctgaagcaagtatcatatacttctgtattagaatatggacgcaatcatatatctcctaaggtttagtgcatactctcatatttggaagtgaataccaaacgtgtatgaaatagtgcattcgatttaatctattctctcttgggcatttattcgcaaatgcaaagatttctgtaatttgatcgtagcttagattatggcaaccttggctttgtggtttgccatgtcatgtactgatatatgaatgtgatgctttaattaacgttgaaaagccatgaattatgtattcgaacgaattgattggatgtgtcctgaaatcggttcagactttcgttctttgggtactggcgtgagacggggaaaaagacgctgaagacatcaagcataacatggagttgataaaacatcgtcgactgaatcatgatttgtagtttttttggattgccagatttttttcagtgttcaacaaattttcactcaataattatttaatatattttcacttaatataatttgaaattgatatatagcatttcccgttgcaacgcacgggcaccttactagttccatatgaatttcgtagggtcctcgtacgtatagtcctgatcctttgtttcaaagttttctgtaaaattcaaattcttcgtatttcctatgctactaaaaattaaaatgggcctcagaggatacgttagtcagcacgaggaaattgcaccaagaatcgtcgcagtttagttaatggaagattaacctccgggcccctatatcatcgtcgattagttgtgttaaaacagctgaaaaattaagaggattctatgaacaagttatattcatgattatgtaattacagacttaaaaagacagcaccactacatcaggggatgataaatccagaagcagaaattggccatcggcatgcccattttcttttcttttttaaggttcggcatgcctttataagtttgtataattgtatataggccatacaagcatcaattgtttgcaagattgcgaaagagattaagaaatgagaaaatgagcaaatccctgaagacatcagcatcagtaaacatttctgtagccatctcataaattattacttttatcaaggccacaaagtctgacagggtgttgcattacaaagctattatttttctgtactccctactagctcctgcaatgcccacaatgaacaacggcttgccagcttaatctgactcagaacaacatcatcaaggggataactgtgatgcagatgatggccaaggttgcaattattgatccctgatcaaatgctttccctaaacccccaaccctggtgaagtgctgaaaagcgaggtacccagccaatgccaaagacagtgctgcaccaccttgagttcccctgtgcacaggaaatgggaattggagcatgagcacaagaacttttgaaaaaagtaagatcttacggagtagttccctgtcaacagtgataaaaatgatacatatgttcatactgatattcatatactgtaatatgattgctataaattattacttttgtccgcgctacaggcaaagactaaaatttcttatgttaaatgtcattttgaaccttttgaaattgtttgtataggctgcagatattatttccagaacagggagagtgttccacacctcagattcatcaactggtaaggagcaacactcacgagcagcatagttgacaatggaagctccagctcacctatgacaaagcataaacatctgaattcaggctgaatgagggcacttcaactgaagttgttttcagcaggaaaatgttaatgatgaatagccttacaatattgaactttttattgttactctacctggaatggagaagaacaaacgcaccaaaagagcaagaaaagcagtccactgaccatagtcactcctacatttgttgatcaaagaattaagtaggactcaagagagtaccttgttttaaaccgaacaagcatttactagatgttgttaatgaaggaacataataggtattaaacaattatttgcacggaatagcgatgccttacttgatccatgagattacactgcaaggtgctagcagagcaaacagtggcacaaggaaagatttgtgtatggctgtgcctttagcaagcaatagcactctggaaaagacaaaaagggggtaaatgatcaaataataatcagagcgtactgggaatttacagtgcagttatcacgcaatcccaagtattaaatgataaaattaaacagtagacaattataatgagattgtatttgtgctaacttgattttaaaatggttatcaatcctcaagttgcatacatatatacataatttgggaggctatattcttttagcttattttttacatgggagattatacgtgttaatttgatagtccatttcaagattatgtctctgtttgtgccctgtccttcctcaaggttcaacaatcaacatcgtcacggtcagacaacaaaatcaagataggtttgcgcatgtccctatcgagtgacagctagaagcacatgaactaacacttgcacaatcattcacagttctcacgggcaaaagatcgaacagatgccaaaccccaaaatcgccatgctgtacagcggatgaatcgcatcgcattatccactattccactaccattagacgaaagtatgagaaacagaggcactcacgcggtggccccggcggagacccattgcatcgtccgcgcgctcaggtgcgccgacgagtggcacacggcggcgccaccccggcgaccgctcgccgcctgtcccgcccccagcagcggctgcggcttcagcggcagcgaggcgcatcccctgcacatcatccatcaccacaacaccgtcagtacgaacaaatccaccgcattaacccggacagatagccgcctcacctgagcgcgcccgtccgcagagcggcggcggcgggggagcccgccgcccgcaccgcagactgccgcagcggcggcagcacgggcggcgccgccgtcgggaccgcgaggcgcagcgagatggacatcctcttctcgaatccgaaagaagaagaagaagcagaagcagctgagctttcgcgaattgtgaaggtgtttttgtctccgcgtgtgagtgacgaactggacggcgaggtgagctgctgctgttattgaagccgtgggcacggcccaccgtgaccgtccacgtgtccgggcgggtgggcggcgacggcccacgagaggcctcactttcccgtcgcgggggccgaggcggatgggcaagcgtgcgcgccgggttcgagggtggtgggggtctcgtttttggatctgggcttgcttttctcgcggctgatgactcggcgagatgagatgatcgcgtaacggcgacggcgacgtggcggacaggccagcaggaggaggaggaggcgaggcgagcgccagcggcaacttctcgtgatttctctcggattttccctctttttctcgaagaaatctgcggggtttttgggctgaaccgtaacgcaacgacgctgcattcggcccatgatgcggtgggcgcgatgggctggaatagggttgccacgaacgggttgtattgggccggaccgtatgcttcccgctgggccgagatccggcgcgcgggcctccgctgctgccttcgaagcaagagggagggagatgtggggcggaggcctgtcgccggtaggcttgggccggaggtaccgatcgtcatcccttttagtgttccaccatatatatatctcttgtaagccgccgtgcggcgttgtaacctcacccttgatatagtgaatatattttgctggctggcgcccgtggttttttctctcatgttttgggagggttttcacgttaaatctagtgtcttatacgattaatctattgttttttatcgtttgtttgtctatcactttctaacatttttatcatacctcgttaatatgtgggctccatctacagaaactgctttcaaaaccaccaagaagataatttgtacccgtttttcaaagatgggaactgtgttatatccgattttacggttggatcaagataatgaatgagggatgcaaagtagacttaatccaaaccgtaccaagggccgtgcgattcgtgtcttttccggctgggcctagatgagagggagagactgctggctcgtgtagatcatcgagacgggtcatcacgtgtacccgtgttttttttatgcacgcattaattacaacgtgattgatgattgtaatctgctcattaatatacagacagggattttcccggtcttgaaacggcatgccaatttgtagggttctctaaattttgcagcgagtaattaatgagattgcacatacaattaattctttatgttttgtataaagttggggtcaaacaattcaaacttcacgagtaaatttcaccaaactatggatattttgacaaacctatcgtagaacaacatatttagcactaaattatcacgaagctacatatttaaggtcaatttatcataaaaacccccataaaaaaatatcatacaactatatatatttaaggccaaaagttataaaaaaaatacatgtggttttggttgaagtatatgtagttttatgaaatttacttaaactttgaatactataaactttaaaatagtcgtcttggaaacaccggcagaatgatgtacatattagactttaaaatacgttaataaaatccaataattactttttaaatgttaataataaaatatatagttgatatatattttgaaaaccttgtagttatcgaaaacaacaacaattatagaattgagggagtatgtaaggattcaacaatctttaacttgttactggtatattatacactacatgagaaaacattttctcgctaacacgatatcatggagtagcaccttgtttaagttttaaagacatgtagtcaacatggagaattttgaaagcttttagcaagcccaactaaaatcattgcattataaggggtttttttttcatgggtggccttagtcgaaccatatccatgaaccataggatgcaacactagctagccctagatatgcccattcgaaacaaacactactatctcattgcacgatatggaagtatagtaccatatattcctcttacacactataatcgcaagatgcctctttctcataaaccaataatggagatgaaaacgacgtcctcttctctttctcatgaatagtgacatcaataatatctcagtgttcacgtatatgctagaactaaaagccacagaatgagtcaaagaccatatagaaaacatgcctccttggtggcggcagcaagaggatgttgcttctttgcacataaggataacacatatcatcgatctcatcagtccagtttagtatcatcaataagtcggtgctaatgtatctcaacaacaagtttacttcattgtcttcgcgaactcatgttatatctcctcctttttataaagccaatgcatctctaggtttgaaaaagaactaaaatttcacctcacatttaattaaaaaaaatcaagtaataaagttaaaacatcatattcgatatgaagttgagatctagcaaatcattttatataaatcgttatgcaggatttctttttaatcatacgagaaataggatcttgcatagcctgatcaatttaggggtagcactgattaatatttttccggattttaatacttcctggtttgatttagtttttttatccacaaggctacaaatgttggtatgttcggcaatcggtcatgtggctacggctgttgcagcctctagctgtcttgtgcacatggcactattctgggtggctgcaggctacaacgtaaccgtaacccaggcgtttgaacaggtacgctacctagttactcaccgcacttggtttctataataaacaatatggtggacatagatgccatttatactcatgaaaatcaacaaatttatttcttaatacattatagtttgctttttttagttaaactatgaaaaaacacttgtgcattgcaacggatgaagactattttgatattagtaaaagtatatgtttttttttaattttgatagtacttatgtctaatttggaactcttattaagatgatggccatatgctgtatgcttgctttcttatgccctgtcaagaattataaagcaattaggagtctgtctctcatcccgagttagcatgcgagtattttttaaatgatttcttatacaactccttatgtatttcaaaaaatggatgaacttagaaaccgactcaaatacgtacagacgacgtaccaaaatatcggtgaaaacatcttcaatttttacaacaactaatttttttaaaatcttattattgttatacggtttagttaggataaaattcactgtaggaattcgcttggatttttttttttagaaaatcatgagctgcaattaggagttcgactttcatctcaagttagcatgcgagttcttttaaagagatttcttatacgacttttttttatttctagaagcaaacaaacttaaaattcgactcaaatatgaatatgtatttccaaaagcgaacgaacttaaaaaccaactcaaatacgaatgacgtatcaaaatagaatcttgcatagctcgatcaatttaggggtagcactgattaagtttttttttctcttcagattttaacacttattgtcttgatttagttttttttattcacgaggctacaaatgttgggtctgtccggcaatcggtcatgcggctacagctgttgcagcctctagctatcttgtacacatggcactattctgggtggctgcgggctacaacgcagccgtaacccaggtgtctgaacaggaccgcaacctacttccttaccacacttggtttctataacaaacaatatgatgggcatagataccatttatacccataaaaaatcaacaagcttatttcttaatacgttattatagtttacattttttttataaatatataattcaaaaaatagaagttatccgaaaatacatattaatacagagtccatgagtaaatttgcagatttggaggtgaccttatcaaggcaaatttcagtttttgtgtaagttactgctaaacacggaaggaaaaagtaaagcccccactatttattcctcctccacaatccatccatccatccatccaaccccagctatataaagctcggcgcagcggagggaggggaggaagggttttggaattagaagccgccgttgcgtgggagagcaaagtggaagcagccgaaaccgaaactagccgccgccgccgccttcgcctccgccgcgccgcgccgcaccactcgcccccaaggtccctaggggtttcccgcgcgcggagtgtggggaggaggaggaggaggaggaggaggaggaggcgggggggatctctccggcggcgaggatgaccggcggcggcgcggggggaggaggaggaggagggaaggggggcgcggcggcgggccccgtcccggcggcgtcgaggaagctggtgcagagcctgaaggagatcgtgaaccgcccggaggcggagatctacgcggcgctgcgcgattgcggcatggaccccgacgaggcggtcagccgcctcctctcccaaggtctccgccccctctctctctcgcgcgccctctcccaccccgcgatttcgcgcttgtttcgatgccccctcgcggattcttccctgatgcgcccgcgcctcgagttctcgtcgccgttagggttctagaagattcttacaaccgcgtgcccctctttccgattggggctattcgttacttgccgcgctctgagcgtgcgcaccacggatgggatgagtgggaaggatgcgcctattattttttcttcatgagagtcctgccgatttgtcatgatttatccgtttatgattgtagcatttgatagatttggccctttggggttcgttgaatccgttgtacatttgtagggtttctgtttagggttcctgctaaatgttaacagtggctagcgttttcctattctggagcaggggttaggtcgatcctgcttgttatttataggaatcgatctccttttgtttcttgtctttcggttgtaggaaggagttgagatttttgggaggaaagtcaaacagatgaatactgaacttttttctgaactttgaaagaaacagctatatctttggtaggattatgtaggatagaaggagtggaacgagttcattacttgagatttgctgtttggatcaatttactgacctgtctaggtaaatacaccatgctaaagttagttgttggattggaaaagagatggttgtggtaattttagttaccaggcttgaaaagagtggaatctttagattgggaaaggagatggaccctctggcttctcatattggctatgtttgaaaagtgggaacacattactgttgcttccaaaatggctatttgcattacaatacttgtgaaattaggacttgctgtttctgcagggtggtggttgagttttgtgttcattctcggggacagttcgataggtgttttagtgccttcgtttttgctcttgtcgctctttcctgtgtcatatcttttcataatttataaagaagaatgtgtgcatctctgattgttctatagaaacattccatcatcagtttttaggatgtgttgacaataataacatatggacatggggggaagtgtaactatcatatgtatatgatgaaaggggctattagatgatatttactgaatttcattggtcatatagtggtagtaagcaagaaactcaggtccacctttagcttatttatatcgtagtgtgccatttgaactcgtggctttatttctgtaggataagtttctgagcttgcagtgatttgtggcattagtcttgggctcttctctttgcaaggaggctttttattaattgaaactccatgcattttctttgatctgggaagttgaagaaagattaactgtcagacatagttggtagcctatctattccatctatgatttttccatggcatttttcttggtttgacttttacaacatgttacaagaggcattgtgtatttgtgttataactttcctgaacattgttagtctcctactccccttgactccttggtaatctattgctgctaagtttatgagggatgatggatgagccaggagtgggaattgccaccttaatatacctcatctgtgtagcatgtgaaagtcataatacagcttcctgaaatggcatagaggtgtcatttgggttttatgactactttcttgttcagagtttatatgctgtactgttaccacatattgaatatcttattttctgcacacatacttaatgaatgttcgaggaggcaagtgttaggttgttttgtcaaccttttctaaatttcttctcatattgtcatgccaattttatttttgttcaacattattttttgtatgcctttgttgatcatatcatccagttatttttagtcagtttaaactgtgatctgacaatgcaccccaagataaatcagttatatttatttcagttgctcttgcagttatgttaaaattgatatcttatgtaccgcttttttcagatacttttcaagaggtaaagagcaagcgcgataagaaaaaagaggtgtgccccacatcttgcattgctcgccttattttttgaccagcactcagctttgattcggttgccctatatttattttcatcatcaatagcataaagaaaacattttattcatgtaacaattagtttttgtctgattcccctgcgtctaaattaagcatatggaactaatcttttggagttttggttattttgaaaattctctagccttgatgaacttaccattatagtcatgggcactttcataggttaaagagattcctgagccaagatctcgagcggcaagtaatgctgccagtcgaggtgtaagaggcggtgcagatcgaggcgggcgaaacagttcttttcactctagctccattggtaataggaaaaaccaccatcagtatcttcaaggttatcattggttgtaatttcttttcacattttttttttgttcatttcaatattcagacaatgtggcttcaaggtcaatctcagggcctggtatgacatcaaccaattccactcagaagcaaacaattccaaggtaagagagcttcccttttgttgcatatattttaagaagggcttgtacagcaggtctgcctttttagaaggcataccatttttctagttgtcttttctctggagcctttatctgtttgcatttgatatgatccttttgcattattgttaattctgctgttatgtgtaaaatttcatgcaaacagcataggtttttttacaaacaattctcttgttagatgactatgactcaatagttcatatagttacatataattgttatctgagactatcgtttgtaatgttgtgttagattcaaatgaaccatatggaatatggatgaacttggatgatgcatcccacatgaaagttaatgcatactacaaattttatctgatgcgttgatgatttcataacgccttcttatttcactctggggaattcatgctcttttttatctgctgtagttccttggtaaacaaaagtgtggttgctgatggaccgtcggtacctgcacaatcatcatctgggtttcagcacggttggtctgggacaccaggtcagttgtcaatggccgatattgtgaaaatgggcaggcctcaggtaaagcagtcctctagcaagcctgcggttactgcagacaaaggatatactggacaatacccatctttgcccagtactgtaaaccagaatttgaaacaatctgctagcacagtttcaccaacaaatcctgaccaggggttacattctgctcaagattctattcatcccaaggatcacaaccactcagcagctgtcaacaagcaggcatatgataatgattggcttccacaggacgagccaccaccaggaaatcaatcagccttgcctgagacatccggtgaccaatcattatatgagtcatcgctacagtcatctacactggttgctggtgtgattaacccccatgaaaattctcatttggatgagaacagatcagctgcattttcttccgagagacacttggaacatcatggaggcgattctgaatatgatgatggactgttgcaagaatcgagtacctatctgcctcagaagaattctcatgcagaagatgaaggtgagtgtagatatgagtttatgaatttgcttaactttagcatctccatattctgtcctgctggaataacctggatctttggtgttatgagcttattgcattcgttagcattggaaaaggcagcagacaatttattagtaaatacttttggtattccttccagaatgccattgatacttgcgtaggtgtgagatgcaacttacaccctgtaattgacgttatcaattcctatgttaatctgggtatgttgaatgcatctctgttatgatagggtttagggaggcagttgttgcaactggcaagtaatcaactttactgaacaaaattgatatatgatggttcctgcatctttttagtagtagaataccagtcttcagatttctgatgtcatgctgttactttcttgatgaataatgaactttagactgtcgtgttatccagtattaaaagttctgtaaggcaacaacaggtcatgcagtttattgtgaataggttttacagcatatgttcctttctggttgcttgttcttttcctggacgctgttgcattctggctttggctgtgcatgacctgcatgtgaatactgatttctttttactattcttgcagttgagggctccaattctgatgtagcgttagccactgaaaacttccagggtctaagcctacataatgaagagttagttccaacaaaattagctgaagataaccctgcagttataattcctgatcacctgcaagttaccggctcagactgtgtcactttgagctttggcagttttgaatctggagcattttctgggcttctccctgttccatcaaggagcgctgatgataacaatgtggagttgcctgttatagaggaatctgtacctctagatcaaattgattcaaggttaattaagtttgttcctgccgtctttatttcactccacatattgcttgtgacatgactggaatgccatttttttaatcttgcagagatcaagactattatgatagtgccgcagttaattcgtcaggaaatgagaaccttgatactatcataggaactaacatggagaacattgatgtaccttctgtttcacagcctgatgtcctgagacaggaagtgcttgatcattccggtcttcaatataacctaccatctgattcaagtgctgcatatgcaaacactacacagccaagtacaatggagtcctcacaaggaaacaaccaggcgcacactctttcccatctttcaaacttactggtaaattgttttctttttcctataatcttcacttttcatcattcatgctgaattgctaacagtactaagtagctttagccaaactatgatcttgctacatacagtaagataactagttttaccttgattggaaaagagccaaataaaaaggtgccatatagacccattcttttgctcataactcttgtctcaagatattgaccacagatgtaaatcattgcttcattctggaatgtccagaataacattgggagctggtctttctggataccagtttttctgtcttctgcatatgcatgttattcaagtcagctaattgtgctcctgcataattcttattgaactcgtttattccccagcaagcaaattcattacacaacagcctattggggtcaaacattgcacctcttcgggacttggacttcagtttatcacctttgctagcagcacaatcaatgacaaaatataactcagctgcaccaactactactggaccagcaatctccatgcaagaggtaatttaactacgctggttcactttctcatggtgttttctctggattcatatttcatagaagtataactttaggaagaaaaaggctccacatcctttctttatttgaaagatgaatttacaagggtgtgatggtgttggaattttttattttgtgtgcatatacagttaatcattcagcaacaagtaatctctagttctctaattttcttcacacacatgtacatatttgtttcagactctgaagccaggagttttctccaacgctcaatctacccaaaatcttccaagtactagtatagcaacggggcctcctctccctcagcaattagtccacccttactctcagcctactgtaccactggcgccttttgcgaatatgattggttatccgtatttggcacagaactaccctgctgcttacctaccatcagctgccttccagcaagcatactcgagtaatggaccattccatcagtctgctgctgctgctgtaccaggagctatgaagtacaatatgaatgtgccgcaattcaagaacaacctatcggctacaagcttacaacagcaaccttcttcagtgatctctggttatggaggatttggaagctctagtaatcttcctggaaatttcactcttaatcagaatgctgcctctgcatcaacaaatcttgggtttgacgaagcattgagcacgccatacaaagatcccagccaatatatggccctccagcaggtaacaattgcaagcagcccttgtgtttctttggtaatttatatgctatataataattctgataggcacggctcggttcgaaggttttggatgagtgcttggcttaccggaaaaaacacttaattatcatataattaattaagtactccatttattattacaaatttgaaaaatggatttatttgtattttctaagaaaattctgtatagaatatgctttttcaaaaatcatactccctccatttcatattacaagttactttgggtttgttctacgtcaaaccttttcaagtttgaccaagtttatagaataatatagaaacatttcttacacatatactattaaaaaacaatcaatgatggatttaatgaaagtagtagctatataatctgaaaagaatgggacattagtcacaagttactttgggtattcctttcagggtgacaattctgcaatgtggcttcatggtgctggttcaagagcaacgtcggcgcttccaccgagtcacttctatggcttccagggacagagtcagcagggtggctttcgtcaggcgcagcaaccgcagcagcactcgcaattcggtggccatgggtatccagctttctaccattctcaaagccaagagcaccaccagaacccggccgagggaggcctgaacggtttccagaatgcccaatcacagccgtctcaccaggggtggcagcagcacaccggctactgaggcctttaccctttgttatagttggggttaagttgcttgccgaccatggcgtgcgtgtatcctgaccagctgcagggtttaagcagctcggactagctgagcctgtgcctcgagcgctgaggatggagggtccacgccattcaaccaacagtttcgagagtgtttttaacatgttcgcgtgtgttcgtcagacaagaatgatttgtgctttgttttgatagccgagttattatatgtgcccaagtgcagtcttccttgtaactcttcttgagacctaacaggtcaccgttctgatttctaagattagtatctatcatcttgacctttgctgatgctactttctgattatcacttctggagctgcgtcgatgctttggcttttgctattgcggcaacgcgttcggtgctgctgccggcggtggctgctgctgctgggcggcggtgttggcgatcacgaagtgcagagcactgttggggtctggccggaacgcccacacggcgacgtcgtccttcacctggacgccgcggtcgacgagccttgtggtttctttttgccggattatggtgtggcaattggagagcctcctggtcaactccatggccatcacgtcgagcggggatgcacggtagacgaccacgcgcacggcgagcccggggctcttctcccccttctccctcggctttggttctggcgatttctttttcttgtgcaagaactcctccaccagcttggcggcctcgcgctccgccgctgagaggagcggacagaggcggaggctggcggcggcttgcgggatgaggaagcggctctgctgcgccgacaggtcggaagcctccactcgcttcctgcagatgaagtgcagcggcaggtcgccgcgtaggcctagtagcggcagcagctcgccgcgtatccacgccggcggcgggggagcggcatcgtcatcatctactctttgcggcacggcggcgcgagggacgtgcgccgccaccgcctgcaacgggacggcgtcgatgggctccgctgcaatcggtgcagccgcgtcgatgagcatgggctcccccgcggcggacacttccgccgtggtaccggatgcgctcgtggaatttccaacggcggcggcgctgttcgaggtcgttatcgtcgtcgtctggggggctaattgggcggcagcgtcgccggggctgacggacgacggcgagagcgacaagaagccaggagccacctcttccctgaacctcgcgagcgacgtcgtgacagtcgcccacgactgcaccttctttgcgtccttacgcgctactatcgaactctttcgcttcatagcgttgagctactaataatttaacttgggtttaatctcctctaatcccaaactatttttttaataatggccaatcaaagagtaattacagttccgattcgacttaggctcgcgtcttttccgacttgtagtcggatgctgcgtccgtgctatgttctgtttgagcccggctagtcgtggaactggcccatgggcaaggcggacacagcggcgggagggacgtgcgccgccaccgcctgcaccgagacggggtcgacgggctccgccgcgtcgacgagcatgggcgccaccgcggcgggcggcgggcggcaggcactccttccgccacgctgccggacgcgctcgaggaaattccgacggcggcggcgttgttcgaggtcatcgtcgccgtcttgggggctaattgggcggcatcgcgggggctaacgctaacggacggcggcgagagcgacaggagccacctctttggggtccgtgctagtcgacacaggcacacagcccacgacaggaaatcagaatagctcgtcaatggggtcgccgccgccaccacgctgctgcgcagtcctaacgtcgcgcccaccatggttggcagttgctcgaccggcggctattcggtaatcgccggtcgctatcgtgcccgtgtcgtgccttttctaggcgatgtcgtgctgagtcgtcgctagtcgttacatgcgcttgtcgttgtcgtgttggcacgttggcccggatagcagcccaaacacgacatggctagacgacccatatctaaatgggctgtgttattcctagcccgttaactgtacatgcgtcgtgctccagcaggcacggagagaccgagcatagttgacaacctattagtgcaaaggaacttcgctgtcagttatgtgaacaaagatctttttttttttatgaaatgcttgttaaacccaagcatttagcactatcagaaagctcctcttacctttgctaaaagtaattagtccgcagtcactttcatcgcccaggattccgcttaacaaaaggaagcaagctgcaatggcgtgtgaagagtttctcaaagatgataagtttgtgggcgacaaagagagagataagtcaagggctaaggaacagctagttaggttgagtgcttggcaattgacagtttgacattattcgtagcctctgcttgtctgcaataagccaataacaacagcatcatgagagaaaaaaattaccattccaacgaacacagcgaaaaacagcatgcaagagagcgtttcctttaagcaaactgtgaagttgacattgtgcaatagagactgaatctgatccagcccttcaaaacttcgatatgtctaacttgatgttagtccttgagaattgagataatcagttgttcatagtttttatatgcatacgaaagatgcccagagcagctacaagttgacttccacgagcctttctttttcataattcattatgtaattactcgtaacattgttcagctggtgacatgcgatgcacaattaagaaaaccatgagaccacttctcctcctaggctttttctagttagctatataagaatattcagagacagcgaaactgctatgatctgtacatcttatctcctcctctttctgagacgaataattaatcgatcaattagtggatggatgctctcgcttaatctgctctctctcgctgagttcacaccgcgacggacggctggcccaccagatacacgtgagtacgaccccgcgttttttggcgtgcacgcgacggggtgcgtggagcgagcgagatcccccagcttactagcttcggtagcccgcggcgagcggcaacgcatcgcttcgcgcacacgcaatccctaccactccttttcgtcggcggatgcaagcggcagagaaggtgaggtacactgccgctgaaaaccgggcccagatatgatttgggcccacatgtcagcctgtggtgacagtgagtgctttggactggggcctactgcgtcgagagctacacgtgtcaagtgaggagattccacgaggtggccatgcaagcgatctactctagctacgtggaggtgttacgcatctgaattcgtaggaaaggcttcacttgcaaatcattgctactcctgctttcaatacagtactactgctgctggtaaatgcagatttgatattggaaatggcctattggcttgtatttaaatcttaagcattttcttaacaggatgtactgacttaatcatcaatgcagcatgttgtttatgaaaaaaatattgctatatttttgtagctagttgtttctgtgaaggtgaaaatctgagcagggaatatctcggtgaaggaagcaaaaacctcatgctctgaatgacccattttctttgacagagcccttgtttagtttctaactttttcttcaaactttcaactttttcatcacatcaaaactttcctatacacataaacttttaacttttccgttgtatcgttccaatttcaaccaaactttcaattttaacgtgaattgaacacaccctctgaatgaccattttaatagttaatgtatcatgtaatgagatattccgaccctctaaacgcaaagcacgtggaaaaactgcaactaaccattctgaaaaaaagaaaaaaattttcataggagtactagtttaataaggctcatgaactttgtggattaacatcccaatccaccatgcaatgggtccactctcgacaaataaacaattgagacgaagcaaacaaaaactttatgaacaagtggataatactataatccttcctccagggctccaactcgatatacttgccaaatactccgtatatacaatttccttgtatttaatgtacttgcaaaaaattaatgaaacctcgttacttcaaagcaaagaaaccatcggattcctaatcaggtacagaagaaatacgaacaaaaatcaattagtaaatcgcgaaaaagcgacgtcctaactgagtcaggtacgtactcctcttgcccccacgcaggccacttctccgggtaaatatagcagtttcccaccccactcaccccgatccaacggctgagccgcagccccaggaggatcggacggttggcagcgcgcgcacgcctcctcgcctcgctttatatgcacgcgcggtcgcctccaccgcccgtagtgctcggcacgtcggttgttgctgttgctgctgctgctcctcccgttttccggtgagctctcgtggactccgcttgacttgatgtgggggtgaatctgtttgataggtgggggggattttgcggtgttcgtgtgagttttggtgtggatctgcttgttcctgacttcctgtgtgtttgagggtaatctgggttatttttacgggttgtttttggtgttttttgaggagttttttggtcggatgggtggtaggtctggatggattgttttggggcagctttgatcggattttaccctgggttggataactgatcggtgtttttctgttcgtggtttggtgttgatttttcggttagtgcatcggtgttttctgtaactgctgctctccgattttgagttttattttttttctgttttccccttcagttctagcctcggttccatggctgaaccttcgatttgattttgtttttttttcttatttcgtgagttactaatcttcgatattatcgactaatttcactgtgttttaatcgtatcgtcagttagagagttgagatctaacagtcgttgtgttccagtgttttccccatttggatttttcgatctcatcactcctgacgaaaaatttctcatcgccttctgtttggtttggtttggtttttctcgcgatttgccgcagatcgcagccatgggaacccgcagcgtggccttggtgctcctcgcggccgtgctgctccaagccctcctccccgcttcggcggcggagggtttggtgcggatcgcgctgaagaagcgcccgatcgacgagaacagccgcgtcgccgcgcgactctccggcgaggaaggggcgcgccggctgggcctccgcggcgccaactcccttggcggcggcgggggtgagggcgacatcgtggcgctgaagaactacatgaacgcgcagtacttcggggagattggcgtcggcactccgccgcagaaattcaccgtcatcttcgacactggcagctccaacctctgggtgccgtcggccaagtgctacttctcggtgagtccctgttcgatgcactggtcaaggggaattctcccaagagtcttgttgcgattgcgacctgtgctaatggtggatttttttttccttgtggcgattgatgcagattgcgtgcttcttccactctcgctacaagtccggacagtcgagcacttatcagaagaatggtccgtgccttaaaactttccccaaccgtgctagtttatgttgtgactgtctgcctctctcagtttacttggatgcattgacaacatccttttttgctattactcgtatttgctctatagctggtggcatatctcatgttgaaatttgcccttttaatccaaaattggatgtaattgaaagaatcctacgtggtagttatttggattttggtgtgaaaaaaaatagccttgttagaagaagcaaaattggatttagttaaaaggatactagatggtgttatttggattttggtgcaaatcaaattaggaggttggttttattcaagttaaagtttgttttaaaaaaattctcctaaaaagatagatactagatttgcatatatgcattgaaaattacatcttcgcttggcggttatacttttagtccctctaaattgttcaatcatttatgatgaaaaggaaaatcattttatatcacaaagtatttatgatgaaaggggaaaaatattctgcatgggtttgaacaaaatacgtggattggtgtagccttaacatacttgaaaagggtatgatgttgatgtagtgcccacatggtgtcgcttgacattaaaacgatatgcagtcaggattgaggaacattgctgacaatttactatcgctgtctgtgttgaccacaataattcagatgtaccatcctatcttctaactagaaagatgcatggaagtttcttacattatttccagcacttgaaattttagtgaaatatcattaaaacataaccacttactttgctgtgatatgaaataaatgttttatttcttggaaagtggtatattcatatattcttacagtaaatttattgattttcttttcatttatttctaaattttaaccacccttttggtagcttaaggaaaattgtatgtttgacagtcctgttttctgttgtttcatccctccaggaaaaccagctgccattcagtatggcactggttcaattgctgggtttttcagcgaggatagtgttacagtaggtgatctggttgtgaaagatcaggtctgcactatatatctcggttaacttactgattattatctctgatcatattgccccaaatatttttaacattgttgcttcaccgctttaggaattcattgaagctaccaaggagccaggtcttactttcatggttgcaaaatttgatggcattcttgggcttggatttcaggaaatatccgttggagatgcagtacctgtgtggtaagacaacctgacttacgtgatctaagtttttgatttctcactgtggttcacagtagaagagaaggtgctcttttgcatatagtgattatatttgtatgaatcttccactatctctaaccacagttcatctatgcacgatacatttataatggtgaagaatcctagatattgacctgctgattaacacaataggctaccttcattctgttaaaaccacgtatctcaaaatatttggctggttgttttcttgcatatttctgttttatttttctcattatatatattttggcgcatttgtcatgataattagatttttcacgtatcatgcacataatatagcagatccatagtccctaatgatatgtataaatcacaggtataagatggtagagcaaggtcttgtcagtgagcctgttttctccttctggttcaaccgtcattctgatgaaggagaaggtggtgaaattgtgtttggaggaatggatcctagccactacaagggcaaccatacatatgttccagtctctcagaagggatattggcaggttggtcctgtttctgctaagttctgtagtgttttcgacatttgatgtaatgtttgcattgactttgtgcagtttgagatgggcgatgtcctgattggaggaaagaccacaggtactgactcttgtttttcatatccgatctgtctaaatgagaaataatcttacacatcgttacacctttgctgctatcaggattttgtgctagcggttgttcagctatagcagactctggaacatcattgcttgctggccccacagtacgtaataagcttttgtttatacttgttttttttttatcatgatggcctacatttttcacaacagtaat

SEQ ID NO: 9460 - DNA, 28583 bp, Oryza sativa
acaggctcatgagaatcagatgttggcaaaggaacttgagaacaacaactgtgagttgccggacaagtttgtggcaggtggcattattgccaaattgccaccttcttggacggactttgctacttctctaaaacacaagaggcaagagttcagtgttactgatcttattggctctttgagtgttgaggagaaggcgagggcacaggacaaccggggcaaaaagatcgagggaggttctagcgccaatttggtgcagaagaagaaccctcacgcatcccacaacaacaacaagaaagtcaaacctgacgtcaaacccaaggctacaaccaattttaagaagaaaggcaagggaaaggcaaaaggagattgctttgtgtgtggcaagcctgggcattgggccaaggattgtcctgagcgcaaggacaagaagtctgcaaacatggttattagtgagggcggaggaacattggggtatggtaaatttttacctacagttctctctgtctgtcactcacttgattggtgggttgatactggtgctaatattcatgtgtttgcggacatttccctattttcttcttatcaagttgggagaggttcctccttgttgatgggaaacggatcgcttgtggctgttcatggtgttggtacggtcgatctgaagtttacttcgggaaagatcgtgcagctgaagaacgtgcagcatgtcccttcaataaagaagaatctagttagcggctctctactgtgtagagatggttttagacttgtgtttgaatccaataaatgtgtcgtatctaaatatggaacgtttattggaaaaggttatgatagcggaggtttgtttcgcttttccttggatgatatgtgtaataaagttgtgaaccatgtaagcgatgatgatgatgagtccaatgtgtggcattcgcaactttgccatgtgaattttggttgtatgacacgcttagccaacatgagtttaattccaaaattcactttagtcaaaggctctaagtgccatacttgtgttcaaacgaaacaacctcgcaagcctcacaagtcatctgaggcgaggaagttggcaccactagaaattgttcattccaatctgtgcgaaatgaacggcgtgttgactaaagggggaaagaaatatttcatgacactgatagatgattgcactagattctgctacgtgtacctattgaaaacaaaggatgaagtattacattactttaagatctataaggctgaggtagaaaaccaactggaaaggaaaatcaaacggttaaggtctgataggggtggagagtatttttccaatgagtttacttctttctgcaaagagtatggaattattcatgagaggacgcattcctattcaccccagtcaaacggggtagccgaaagaaagaaccgcactctaactgagatggtgaatgccatgttagacactgcaggactttccaaggaatggtggggtgaggcaatattgactgcgtgtcatgtcctgaatagaattcctactaagcataaggaagtaacatcattcgaggaatgggaaaggaagaaattaaatctctctcacctgcgcacatggggctgtttggccaaggtaaatgtacctatagccaaaaagcgtaaacttggaccaaaaaccgtagattgtgtgttccttcgttatgctatccacagtgtgggatataggttcttaatagtaaattatggagtacctgacatgcgtgttggtacaattactgagtccagagatgccacatttttgagaatgaatttcctatgaaaaatgcacctagcacttctagtcaagaacctattttatcccctgagcactttgtgctgatagaacacattgatcaaacgcttgaggaaaattctgaggagaataacattgtagcaactcgaaagagtaagagacaaaggactgcaaagtcttttggagatgactacattgtatatcttgtggatgatactccaagaaccattgaagaggcatattcatctcctgacgttgactattggaaggaagcggtacgcagtgaaatggactcaattatgtctaatggtacttgggaagtcatcgagtgtccatatgggtgcaagcctgtaggatgcaaatgggttttcaagaaaaagcttaggcctgacggtacaattgaaaagtacaaggcaaggcttgtggccaagggttatacccaaaaaagaaggcgaggatttttttgacacttattcaccggttgctcgcttgaccacgattcgagtactacatgctctggcagcctctcatggtctactcgtccatcagatggatgttaagacagctttcctcaatggagagttggaggaggagatctatatggatcaaccagatgggtatgtactagaaggtcaggagggaatggtatgcaagctgttgaagtccttgtatggtctcaaacaagcgcctaagcaatggtatgagaagtttgacaatacacttacatctactggctttgttgtgaacgaagctgacaaatgtgtgtactatcgtaatggtgggggagagggagtgatcttgtgtttatatgtcaatgacatattgatctttgggaccagcctcaatgtgattgaagaggtcaaggactttctgtccaaaagctttgaaaagaaggatttgggagtggctgatgttattcttaacattaaactactgagaggagatgagggtcggattacacttgtgcaatctcactatgtggacaaggtcttgagtcgctttggttatagtgactgcaaggcagctcctactccttatgatcctagtgtgctattaaggaaaaaccgaagaatagcaagggatcaattgagatactcccagatcattggttcattgatgtacttagctagtgcaacgaggcctgacatctcatttgctgtgagcaagttgagccggtttgtttcaaatccgggagatgatcattggcatgctcttgaaagagtaatgcgctatctaaaagggacaatgagctatggaattcactatgccgggtacccaaaagtgctggagggctatagtgattcaaactggatatctgatgctgatgagataaaggccacaagtgggtatgtgttcacacttggaggtggcgctgtttcctggaagtcttgcaagcagatcatcttaacgaggtcaacaatggaaacagagctcacagctttagatactgccacagttgaggccgaatggcttcgtgagctcctgatggacttgccggtggttgaaaaaccaataccagcaatcctgatgaactgtgataatcaaacagtgattattaaagtaaacagttcgaaggacaacatgaagtcatccaggcatgttaaaagaagactgaagtctgtcagaaagcagaaaaactccagagtgatagcattggactatgtctagacggctaaaaatctagcagatcagtttaccaaggggctaccacgtaatgtgatagactgtgcatcgagggagatgggcttgagacccacttagagttgcacaatggtggaaacctgtccattgtgatcggagatcccgtgaatttagatggcgaaacaaactattgtgcaactgagagaagagaccctaaaatgagtttatcttcatgatgcacttctcttctaatctgtatagtaggatggtatacaccttaatgtgatccgagtggcttttcataaagaagagatgttggcctacagaacatcttagaaggaacacacctatatgagtccgactgctagtcacagtctatgagatctgggtgatctctagatactcatgaaaaggccaggagtatgacttatacgctccaaacagaggggatgcaaatggcagcctagtaccagttaagggtttgagtgaaacctgaatcgcacaagactgacaattcaaggcatagtccattattcagttgtgatctagtgtagctcttttcctaggtggaagttcaacttaacagtctccaccgaaacgctggtataacaaacaggatcagaatcgagagcatttcctgtgagccatgaaatttggtggggattgttagattaatggtctaggcccaattaaatcctaataaattccattggcccacattaagtgctatgggtaataataccaccttggaaatctaagtgaagaggtctcaacttaaatacagagctagtggagagtctctgttgaccggttgagatggtgctcggacaaccaggcggggcgaggcgaggcgaggtagacagctgctgctgcgctctctcgttttgtaacggacggtaataaacacggagaattgattttgtatcaatgaacgcttcggttacggaattaaacgtcgtgaattgattccgtcggttacggaattaaacgtcgtgaattgattccgtcggttacggaattaaacaccgtgaattgattccgtattaacgagcgcatcgattacgaaattaaacaccgtggttgatgactccgaacgttactctcgcgctcgcatatatatactccgcagcgaccagaaggattgacgaagttcttcctgactcttgcacttcgagttcctcctcctatgttcctgagctgcagaatccttccccggttctgttcacctgcgtgcacaggtgtacgggacgagcaggtgcctctggaactccgttcgcttgagaacttgcacgggtagacgggcgatcaagtttttgggtagcgcttcaagtgtggctgctcctgttctttgttcttcgacgacaacgttgcatcttcctctacttctgcttcaccatggcttctactggagagaacagaggagacaacatcaacggaggcaatacgaatgcctcaacatcttctgcaccattctctgggtataagattctaactttatttgattttcttcttgttatttacatgttcacaatgttatccatgggacttcaatcctatgtgaatgtcaacgatgtctatacttattttaccttaagcatgctcatatttatgtttagccttatcactagattgcttctcattgtgtatgtcatgtttattgtcttaatattttggattaaaatataccgaattatgaccaaatttccaacaggtcaaatactactgccctttttctgttgagaaatttgcttacatttgaatgtgttcaatggaattatttagtttggaaatactatcgaattattgcaatttgacaattgcttgaatttgacctgaaacagatggccaactgatgtagaccgggcctagtttaagcccgagcaggcaccaaagatttaagctgaattaatattctcgcttgctcaatcactgaattcaaaccgtaaaaattcttataaatgaccagacattaggaagtactggtaaggaagtcaggtgcatcaccattttacagctacaaaagttactcacaaaagcaggcattttagagtctcaagaaatagttcagctccttctccagacccgttctaatctacatttcgccttggctacttcctatgtctaataacacgttttttcatgcaaaatatttctatataaaaatgtttttaaaataacataaatctacttaaaaaattcaataattactccctctggttggacaaggttaaggttaagcttttataactttgaccatcaataactttaaaaatatttagtttaaagaaactagaaaaacatatatagatttgtctttcaaaacaatataataaaagtaaacatacatttatttattgtatatattattatagaaaaataaggtcaaaggtatatcttgtagaacgtgacattgctcaaagcatcaattaaaatgaaaccggagggagtaatacttaattaattctatattaatcattttcttgttttgcgtccggctaataatccgtttcaaaacccactttggaattaacgaagcctgaaattcaggcctggactgtcatcatgctcatcttttttttctctacatccttttatatgttcgatgcgaaagcatattgagtttacgcaaaccattcttgcaggacgatctcggataatggacagttcgtacgtagtagtagtacgttgggataaaatttggcaatcgaacaatcactttccagcactcgcgtctcactcaccctcacctccacattcattaatgctcgataggtgatggtactactactagaagatcccacccttgcaactgcaagatatccactgatgaccaattcatccaccactaattactcatctctacaggctcatgtcgtcgtctagcttcagttctcaagctagctagctagatactacttctacttcctatatatgtactcatatctgaatatctgatacagtagcaggcaggcgattcgtggtcgttgaagcggcgaggcatcgatcgatcgtcgccgtcgtggtcgcccaggtccagcaggctgtgctcgatcgcaattaatccatccatccaggacgtacgacggcgtcgctttcgccggtggcttgcaaaggcagcctctccggctttgatgggacccaaacgccgactcgctgtcgctgatcgttaccacctcgatcggtcgccgccgcgctctggaccaagctagctacccagccaacccttccttttgccgcgtactcgctcgcatgaatcgacctgatcttttttattttcgcaaacgcgcaaaatgatcatcagtatattagaagaaagtaaagttttaattacacaattgccgtggaacaaggacaaaaaaatggtctccaaaaccaccaaaaaccgacgatagaaaaaaattgaaaaccctgaagcgatatgatcatctgatatctccattagaagttcacgagtaattgggggagaatttaacgaaacttgatcaaagatgaatactaacaacaacctgctagcttcagtactgtgtatgcatatattgatatatgggaaacctgatcatgaacgaacggctggtgagatttgacacgcaacttgaccatttcttggttggtttggacatctcactagctagctgaactgctagatcgttcccaagaaaaaagcagatggatcgatcgatcattttgaccaaggaatatgcatgcagggcctatcaatacaagaacgtttgtacgacgttttgcaagctagtcagccagccaaattaagccttttggattcacctgcacacacgtacatgtcagacagtccgagtcggtgttaactcagtcatggagatttcgatgggtttggatgaagctgactttccttttgattcaaaggtagccatcgatcgacaccagcaagtaatagcagcttgcattggtcgacgccaattaatgaccggtgcaacggcgaccatcgcggttaattaactagctgttgagaccaagtgtcgttgagtctaagagtggattttaaactgtagatagaacgtttacacgttatttgcatgttactttgagggaatgttcactttgatgtcaaaaaaaaaccttaccaaattttggtattgccaaaattttgataggatttattatataggtgcaaactaaatgtagccacttttttgacaattttatcaaaatttgataagattaaaaatgatatcaaagtgaacatgccctagaaattaacttacctcattggcgattttgatgtaggtatacaagtcagcgagcttgatggatgcaattaagcagatggaaccggcggccgggcgtgtctcgcaagttcagttatctgcccttctgctggggcccttgaatatgctggacaacacagggttaattacgatgcgatgttcttaattagtagtttgcagctggactcatagtctcatatgcggacgtattcactggggccttaattaatgagaacttttactggtacaatatactaccagtatatactggcagtatataaaagggcatattaaaaatttgatagaaaataaaataacactttagtaattttctgttcagattgaatctaattgggagtacccggtcctggatcttatcgtgcgctaggggaggagcatactgaccgccatttgatgacgaagcacgtaatgatagcatgatttgatgatagaataacgaagaaaagacaaaattacccttcaaactttatactgcaatctaattaactaaaaaaatcaaatcaatttacaccgttagatcatatatacttgcagtatatactagcagtacattgtaccataaaagttctataattaattaattccgcttgcagtactgcactgtttccttgagcgctcaattttttgaccttcagagttcagacaacgagtctgcaaagtagcacgatctctcgctcataccaaagtaattaagcattgatctgatgacccagagagaacatatagaagcaattgagtaggagtgtgcgtgtgtgtgtgtttatgtatgaacaatgagctggagtgaggtagaacctcataaggaacataccaacaaagttcatgcatattgaaattggttgtatacacggactaatcatagcttcaattgttaggtccaaacaaatgcacttcctgcaattaattttgtctcagattttcagatatatatatatatatatatatatatatatatatatatatatatatatatatatatatatatatatatatatatatatatgacactcatatggggcaccatggtgcccgggcaccatggtatctaatgcacaaaatttttcaaattgtgagtatatacctagttataataatttgattcatacctatacttatcaacaaaacaactcaaatttaactttatttcacaatccatgattacatacctaactaattatatgtatggatgctatatacctataatcaaaatctaacaaaaacaagttcaaattcagttcaaacttgctttaaactagttagtaaagtagttaatgttaatacctaagtaattgaaaaagtttcatactcatttgaattgggtatatactcaatttcaacaatagtgcccggacaccatggagcaccaaacaaatttactatatatatatatagtaaatttgtttggtgtatataggtgtttgttcgttgtagtactagtacatatatatggaagatacttctcaaagtatcggatgaccctccattttcatcaaacaattaattaatgaaaacaaacacatttttgtgtccccttcagtagacggtgatcatagctgtagatcaaagctagcaatctagctagcaatacctgggattgagacccagtgcagttgttaatatgacggtaactctagcagttgcaaggtagctgatggatcaaaaccagcggcccgaatcattaaaaaaaatattgttcacgatttactgtagccaattcctcatgtggcaattactttagcgtctaatgtgcaatagggtgggagagcaaatccaagccgttggctgcatcgatccaacggttataatgtgctccgactgctaaagttttagtactactacgaccgcactagatctcattccaatagctgggtaattaattattgttctataccttgatattgaagtacgtactttattgtatatgaccagggaatggattctaatttctaaaccctcaagagatgtaccctcgtttctgtcattcaatgtaaattttctttaaaaaaattgacaagatggaataatatgtatgtgatatatcacatattaattaagctagcttattattttttaaagaaaaacataacttttaagatggcatatgaaaaacaagagaatgtttgctcgagggattaaaatagtttcatgtacttcatctgcaataacagactcaagaaaccatagatgaacatgaaacagaaacgatttacagacacgcacatgcatgcctcttccctaacaacttctgaacgtactgatgatatgaaggagcaacaacaagtgtctcatcatgatcatgcatgacaaaattataatcgagctagatgcatcgcatgcatggacaatcgtgatgttgataccaagaacaatcatgcatgcatgaacatcagaagctagccctcgatcagctgctagctagctggtcccatgattataacaaacaatcaaaagtactactatgtacatactcctagtagctatcagttggagtcaattaaggaaacaagagcatgaaattaccactgctagctcatcatcagtattcagtactactactgaataatgccccccaaagtgcagtgcaagtctgcacgtacgagctcatgagaatcaggtacatgtacaacaacttctactactagtagtatactactgctgctgccgccgatgctgcatgctacaactaggctacttgctagatcatcatcatagtactacacgtaccatcgtcgtagaatgcatcgtatacagatcaatcgatcagatgttcagaaccaaaaaaaggagaaattaagttaacaagatgcaaatcactatcagagtatatcagtagccggccatccagctcgagctagtgatcatcatcatcatcatcgatcaacggtggttgttgttgttggcgtcgtcgttgtgcaagaacggcgacgggatgaacatgtcctgcaggaggccgtaatcctgcgccatgaagtgctgcatccggagaggagtagtagcagcagcagcgctccccgtcgccggcggcggcggcggcgtggtggaagcaccggtggtagaggcgatgatggcaaccaagccagcatgatcaggctgcggcatctgctgcatggcggcggcgtgcagtgatccgccgctcgccgccgccgccgccgccagctgcatctggtgctgcatggcatggagatgctgcgcatgcggcggcgccaggaggccgccgccgagcgcgtcgtgcggctgcggaggcaaacggtggccgacggcggctgcgaagtggccgggatggtggtactggaggccgccgtggtggtgcgcggcggcggcggcgccgaggaggtgcgccgtgccgcgcagcgtcgccgggatcgggtgcgtgtgcttcccctcgtaggtggtgatcaccaccgccgcgtcctggtacgaccgctccaccctcttcttcaccgggcacttctgcgtcgtgcaccggtagtagctcctgcacccatccatccatccatcacacaaacgtaagaaccctaatcaattatcaatgatccatatatatctcagctaccaaatgcattcatgattcataactaagttcttactcgttccatttcatattataaatcattttaactttttttctaattaaacttttaaaagtttgatcgagtttattatagaaaaatatagctacattaattttcaacacgaaacaaacgtattatcaaacatattaatttaaatgctagttttgatgaagctaatttggtgctatagacgttgctaaacattcctataaatttgatcaaacttaagaaaatttaattaaaaaaaattaaaacgacttataatataaaacgaagtacctgggaaatgggctgttcttgacggctttctggccgtacttgcgccaccggtagccatcctcgaggtggtcgacctcgctcttggtcatgaacgcgaaccgcggctgccgcggcctcttctcccccttccccttccccttacctctgcaaatgaaatttttttttcactcacatcaattcatccagtcatcagttcatcacacatcagctagctatgctaactaattaacagcaaggtcaattcaatgacagtactactatactacccaacaagctacatatttttggtgtgtgccatagatcgagcaagatcatgttcatactagctagcttaattagctgcaaattgagattaattatactaatcgatggatgatcagttgttggtccattcaaacatagtggctgcgtacagagggtagtagtagccgcgtaggtacgtatggacggcacggcggcgcgggcatctacacatgacgacttcagagttcacacggccatacatacatgcgtacgtatgtacggcctggtcatatattttggtaggatctactgatcaatttgtgatttaactgctagctagacaatttggaggaggggtcagggtcacatttacagatgcaacaaaaatctaggagtttaaagttgcaaggtaaattaagtttgccatgaaaacgatagatcgatgtgttcagttaaacttaaaacttggccaccaactgagattgatcgatatcgatcgatcagttgagttgataggctgaatctgcagactggtgtgatatattatcctaattaaatgcaattcatatattgtgtgtgtgtgtgtcgtaatataatgcttgcgaactaagaacgcaccatgcatatctcaaagagatatcagatgaagacaagaggaagagatcaagaaagtgatgcaaagactagcaaaaggcgtgagcaaaaaaacattgatcaacttttttctgaaagaaaaaaactacctaacgatcaagctcttttcgttttgtattaattgctcggcgagcatgtgctagctagtgagaaaccctagcgcatcgagttcacacgtccttgaccgaaaccaaaagaggagccaaaatgcacacatcttgaccaaaccaaagaggaaataaattaaaacgtgaagaaaattaaacatgctcaaatctggatacagtcattcaggaaacagacggaagaaaaatcaacatgaacacaaagagaaaacctgttcctgattattaatctttttttgtcacattaatgtcaccaatagcaccagtcagaacagaaaatcaaagacttcgccaaatcaacctttctaaagctagcaaaatgaatttcaagatacagttcaagatgggatgaatttcaagatccagttcaagatgggatgggatgagatgagatgagatgaaagaactcaccctttcttgttcttgtcttctccatcgccatcccccttggtcgtcgacgatccttccttgccgtcgtcgtcgccgccgtccccctcctcctccttcttgcacttcccggccgactcctcgtcccctccggcgccgccgccgacgccgcacgcctcgctcgacgtcgacgacaccgacatgctgttcggagtcatcggccccgccaccgccgccgccgccgcagcagcagaagcaccacccccagggaacaacccgacgccgtccaccaccagctccctcttcacctcctccagaggcgccacgtcgtcgtcgaactccccggcgaatgcctcgtagtccagcggcggcgtcgtcggcgcgctctcctgcatcaggtggtggtggtagtcgatgaacgaccacggctgctgctgctgcagcatccccggcatggcgccgttcggcggccgctcagcgaacagcgacgccagctcgtcgtggaacgggaagccctcgccgccgccgccgccgcccgacatggagctaattaagcaaactagctagctagctagctcagatcgagctaagctttgctccaaattaaactgatcgaaatcaatcgtgcaagcaagcaagcaagctagccctcttctccttggcgtttgctcacatatagatcgtacttgctagctagctagctagctactggctagtggtgtggtgatgcagtgaagagaaggagatgagaggtagacgacgagagagagatagagaggggaagaagaaagggagaggtgtgtatttgtgtgtaagcgagctagcacaagctgaagctagctagtgtgatcatgtgtggggatagctaggtggttgggtgagaggccaagggcttagttgaaaattcctagttaatcacgggctttgtcgcataattgaaattaacaaaaattaattgatttgatttgctcttgtcatgtgtactatacgccactgtactttgcatgcgcaacactagtttttctacccttagatcgagttagtattcggtcgcaggttttaccttctagtaacatcttgttgtttgctttaccaattctcaatgcttcatgcatttctctatattatcaaccaaacttttgctcttgtttaatctcttatacaaaaaaatgagaagaagaaaaaaagtgagtacaagaccatgtcaaggcttgtgagttactttacctttcactaactttctccacagctttctaattgcagagtcgtggatttattaaatgacatttggaacagtagtaataataaaaattattagggctcaaacaatgtcctaattgcgaacatggtgggaatagctagaaggggagtggtccaaggtcgtatagggtttagtcagcgacggccaccggaggcagccggtcaggtgagtcaacaggacggggctgcgtcaaaccattcaaaccattcaaacccatccctcaccggcacgtgtccgtgtcgctttgaccgggcccactcgcgtgaccgggcccaccgtcgatgggccagcttgatgacgttagcatgacgctgccgatgcctcctcgttccttctccgtccgatggcgatccgacggctgtggcgtcccgacggtggaaaagcgagaggccgtacgtgtcaaagggaaaaaaaacggcgtgcccaataaatcgtaaccgaaatttgcaagccaggaattcatcggctggcacgtattaaatgtgactgattttacttgttaatcacatttagtaaaaaaggacactactgctttacagctttctttttttacatgtgtctaatcttcagatttacagctttttttttaaccacgattacatgtgttgcacggaaaaatgcgaccaaatgtaagttgtaattttaaatctcgatcggataatgattcttcatcatgtaaagtggtagcctgtgtcaaaaagaaatgtttcattaattacctctcctaaacctgcacgtaactactactccgtagtaatttgtcagaaaaggcgtttcacctgacgaggcaggcaggccgggccgggccggtgcgacgacggctcacgctacagcgagacatgtcgcgtacgcgtcgtgtcacggtgcgaccgagtccgtgtccgggtcgcgaccgaggttggtcgcgggcgggccgaccacagcctggctcggcgtacgtggccccagatccggccgtccatccatccccccgccgcggaaaggaacccgggaaattttgacttagcttgggggtatagcgaccgatcgagctgttgatttcgctgccgttttcttcttttccggcaaaaaaagtttcggcttaattagtttggtccaacctgcggccgcgacgacgacggcgatgtcactgagatagatgccggtcagctagctccagcgccttcaggtttgtatcccatactgatcgagcagctaggatcgcccgatgaatttgtcatgtgttttctctcctatcaaagttttattagaagtatctcaaatgttttaaacgaaccggtactagatgtgttaatttcattgaataaaacatgagtaaaaagtttggtgaaaggaaggttgtaaacggagatgaaaatttcctaccaagcgtttctgattctagcgatatattgaatttatgtttataagtttttaaaacgttgtattgcaatggtcactaaatagttagatgggtggaaatatttaatttctactcaactgagaatcattttcatagagatgctaccgtttctaactgttttcgttcctcgtatattcataaaaaaaatttgaaacaaaaccaaagttgttttggaggaattatggtgaatgaatcgaatgtgggtactaggtaggtcataattcatacctatttatcacaaagtagttttatctacctgatgaattcggagtttttggtaaggtgaagaagaagaagaagaagaagaaatattcttcatcagtctacaagtggtcctgttggtgctgcggagattccttcgcgtagctagcacaacggattagctataatagaattttatcattctatatttttcagttcagattaacatatgacgtgaatttgactaaaatgacgcctagcttcagtttaagcaagactgctcactagctagccaagtacgatcagcatatataatcgtgatcaggtctatgggttggttggatggacagtttttataatgaaatcgagttgaatcgcaacgaccaaaccgaactgtctctgatgcagctgagctagcgatcttcatgcttgcaagttgcaacagtattccactctcaacaaccatcaataatgctatcgagtctgaaaacctgaacattgcaagaacctgcgaaatatatatataactggaatataaatattttctgcgttcgtacaggcatattttatcttctttatatatgttgattcgttgaaaagttgaatcccatcaacgtttggtccagatggaaatgctgcattcatcagtcaagggtgtatctctaccgttggcacgtcagaacaaccacaatattttcagtttttcagtcactagtagcatcgcatagcatatgcaactgaaaattcagagttcagacttgacaccaacacattgctgaaacagaaagacagatttaatttacaagtgctagaacagtagcactacacaatgggataggaatctttttgcagagtttattaatttggcggttgcttgtcattactgtcatcagttaaactaattaactagcgctagtaggaagctgccaaaccaaagtcaaatgcaaatctgaagatgtattggagaaagattagaaaacgtaccgatcgatatccacaaacaaggaggagattaattacctttatttctagtccaaataaatctcccatctgatgcgacctggtaataacaagcaagcaaaacaacatgcagttaatcagccagcatccaactgctaatctacaaaaaagcactgtctttttgtgactaatttagctagcatgctaacctcagtacaaacatctttttgcttagttaatccagtaagagacactgtgccgcgtgaggctcattggtttgacttgtgccaaagtcccaataggttcgtacataattatggattagaataagtttggtccaactccttgctcgattaagttaggacggtgtctacacctaatccgcaccattacggcaacaagcatcaagcaccgtcctcctagctagatatttcgtaattttttatttctctctagtttgccctaccattcacgtgaatttccatgcatctacatatgaacactcatcaatcatttttatccccacaagtttagctctgtactatacagagaatagtgtgcagtcattgcttcgtctgaaataattttggtgcttattcgcaagaggatttttatagttcttgagaaagtatcttgagatacctaaattttacattaaaattttggtatcttgagatacttagtaatttgagatactaaattttacattagaaaatatggtacctctaaatactttttcaagtacggtaaaattaccctattcacaaagaatgaactcacaaggaaattaaaggcataacttgtccaaaaattaaattctcctaccaagttaagggtaaaatgtactgagaaataccaaattttctagtataaattttgatacctacaaatattttctcaaatactataatatttctaggtattaaacacataatctagggttattcagagagagaattcaaagtgtaagatctttcttgtgctcatctatatagaatcatatatattgagggcccctttgaatcaaaggatttatgtaggaaattcataggattcaaatcctataggaaattttcctatttggccctttgatttaaaggattgaagctttccaaatcctatgaaattcttatggaatggcacattgcatgtggattttggaggaaatttagcaagagctccaacctcttggaaaatttcctttgagtctatctctctcatccgattcctgcgtttttcctgtgctctaatcaaacgaccattcctgtgtttttcctgtgttttgcaatcctctgttttacacttcaattcctgtcataatactatgttttttctattccttcgttttttcaaccctaacattcaaaggccctgatggattttctaggtgggcatggatcatgcatgttgcatggggacctacttaagcctgagaatattgaccacagggataatcaaggtgtacgtcttccgtacttgggtggcggattccaccatgagaaaaaaaaaacccaagcagatgaatgattccgcaggcgccttttgaacagtggaccaagctgcagactccgttcaaccaaacgaccggcgtctctctcgtctccggccagccgacgtgccgccgtcgccgtcgtcgctcgcgccgcaagcgtgtacgaaccttccgagtggtttccactcctcaaactgaatcgatcgaactcaactctcaactagcgctagtgggatctctccgaaatttgcaacttgtgcgggttaattagcatgctaatttgcagctctacggaggttagggttcatcggaatgagtagcctgcttgccgatggacaaggagtgcactgcttgctttcctggaaaaaagaattgttcttttgtctctcttttggatgcagaaagatggatcaaagtgtgtacttgcacgcaagatagacagatatttgtatatctgtacccctgcttaattagctacatcgtgtagatcattaggctgccaaacaaactttccagtgtgagattccaatgcaagcacacaagatcaaaattcttgggaatcatttatcagttctagatcactgtactgtgtcaacaattgtttaatatatggtttttagaggctgggtctgtgtttgcttatggggcaagagatccatagacaggggttagaaaatatcaaaacttatgcttgcaaggcatgaggcaatcatgaacatgacaaaatgtttattaattaattaattttcacaggcttgacttaatccggttaattggacttaacctccccaagtcaagtacagctcttggactgcgttccaacatgttcaacttggactactgaccatcatgtcactgtcttcaaatggtgtgcctttgttaaactaaactaatctacccaaggaaaagggtaattaaacatctcatatgtatatatctattgatctatataacaaccagttaaaaagaaggacacattaccttattttttagataatgaagtggtagttgccaattgcatccattgaactttgaatccttcacaattcaggcatctttggaaatttccttacatattgtactgatcaacaaatcctgaaaccttctagcacatgcatctgttccaacatcctgattcctcgatcgcaagatagattttccgaactattctctgtttgaaatgagcagcatctttgaaaagttcatttgatgaaaacaacatcccatttgcttgccctgccagattggtatgagacagacaaaaaaaaaagagcaaagtttttcctcggagaaaaagccggaatattttccttgttcaaacggggtgtactgatagacagcatcaggcagtacaggccgtataaattccacatttccactgtaacaaaaacatccaaatcgagcacgttttggagccgtcaaaaggctgaaaatgccaaggttttcaactatccggagtttaccatggatcacaagtcacaacctttctcagccaaggcatcgacctgaatgactgagtcgcaaagctggaccgattactctgatgcccgtaagaaaggttcagaaaagtttgcagctttcaagtgctagttgataggcaatgggtaggaatatttcacatttcaatatctcgtcacccccactgagagacaggatgtagaaaggttggctatctctgatccttccatttcaaagagaagccttttctaatctgaaataaaatgcactttctttatatcaggcttttgtaatatgaaaactcttattctgtagattctgaaagtgattttagttcagaattggagctgttggcagtagatggtccaagctaggatcaccttttatttaaagagcttatccatatctctggaaaattagttttaactgtaatcttatatctgtggatcttagaccaatttatccagtgctaagaaaactgaaaagcagctaggttaatagtactgggtgtaactcagtcactgggttgtcttgtgatttatggatgtatttcttttggcagaacatagaacatagtagtactagatatgtttttctcacattgttcataagctctgatgtgattttttagttttggctttaagttacataaaccgttcctgaaacaacaattattagaaaatcagtacctatcagtagtagatgttgtgattggtcagcagaacagatctaaaagttgagagtacggccttgtttagttctaaactttttcttcaaactttcaacttttccatcacatcaaaactttcctacacacaaactttcaactttttcgtcacatcgttccaattttaaccaaacttctaattttggcgtgaactaaacccaccctacatgatctagagaaggaatgcatgctgaactttggtgaacaaagtcaagagatgaccactgttgcaaagagcaattgtgtggagatccacctcctcattgttttctgttcttgtttcccctttggaccagtgccatgagcagcagccaataaaaattggaagctttcagtggtttcagcaaggctctacctcatgtgatctacccttgaaggattgttaaaggagagaccatgatccaggcagagttttttttttgtttaatatgtggcaggtgaatggaatttattctgaaataatcatgcttatgtttggctcttttgacttgctcctagcacatcagtatttcttttttcttctagtagtattatgatattatctgcctctttttctggggcagcagaactgcagggaatctgcttacaagagccccatacttgaaagttttcacactgctaacgctaggtttccaaagattatcttggcttggttctaaagggatggaaaataatttatatatatgtttcttctttcttcctaactgatgaggaattcttgtactttccattctcaactgcctgtcaataatacatcaaacagaaaaatatcgatctgtatgactgtatgataagcaattctttcaggcctccattaaccagctcaacagaaaaatacgaattgatgtgccgtagttggggattcagacagcggttggtcatttttggctagtttcagataactgaaacactgaacttgcagagcacacgtagtactcccggaatagccttcacctcgagtctaggtccacacaaaaattttacaccctatcacatcaaacatttgacatctgcatgaaatattaaatatatgttataaaaataactaattgtacagattgcgactaatttatgagatgaatcttttaagtctaattgctccattatttgataatatagtgctacagttaacatttgctaatgatagattaattatgcttaataaatttgtcttgttatactgatagattatataattagtttttttattagtgtccgaacaccccatacgacaccctatataatatccgatgtgacacgttaaaactttacacacttggatctaaacaccttcttacaattgtgcagatctcacatgaacagttgacacaatttttctgttcgatctgcagcaagctatacacacacgcgcgtgcgccccgcagcagcacagagtgcactcgaagtcaagccccgcgtgccatctccttcacactcgcaacccggttttacacagaggaattcgaacaagaacacagcattattgcaccactccactgtggtcactcactagctcgcatcacagccaccatgcagcagaaggcttagccagaaacgcgtcttgaagagatcgagtagagacaagcgtgtgcgctcgtcgcgcgatgcatatggcccatgccgcgccgatctcgtcagtggcaatgcacatagctagctagattcttctcttgtcgcaaaggtcaacgactccggtaaacttttctccataggtcagtgactctgtattaacagtttcaacccctacacacagtcgcatgcagctagtagtatacagtaatgtcaactgcaaggagttacccgaggattaagatatggtgcatcgatcagaaaaaaggaagtaatagtaaattgatgcacgagcacactcatgagtgacatgagagagatgtctgtccctcctctgagttgctgcatgcgtgacagcgtgatttgtgctagcttagctagctccttggttttggttttagcttgatccatctaaaacaatggacgacatgcctcccaaaaagtcagagcacatgcaagcccaatcagctgctcctgagtccagacagagatgtgtaggggccaaagtggcaaatcaaatctgaagaaaattcttactccgtccgtcctctaatataaatgattttaacattttacttatactatttgaccactcatcttactcaaaatttttttggaattattatttattttatttgtgacttactttattatctaaaatactttaagcacaattttttgttttttatatttgtacaaatttttttaataagacgagtgatcaaacagtgtaagcaaaatatcaaaaaaatttatattaagggacagagggagtatatgagtggatatattcttcagtaaaatgtaaagctcagagtaaaagactgaatctttgatgcagtaaacggaaacaaaaggctggggggtcaaatgctggcatgcagccattgtggcgacaatctattcatcgttttcttggtctaaggcaggatctcaatctcagcaaatggtacgggggcaaatgggttttgggttgttggaagatcgaagctagcagatgcttgccgatggtggtggtcaaaatgcttgactcgacttctctgctcggatcaatcgagctcgcctttaattacttttcgctgcactgtttactcttggactgatttggtttgaacagataagtggccgagattaactgacgaagaagaagaagaagaagaagaagaagaagaagtcgggcgctgtcaatttggattccacgtttcgtgctgcacggcggcgctaagctccggcgaggcacgccatgaacgacggcgtcgatcttgctggaaattgggggctcggagtttaaaattccgaacccccatgggttacagcgactcgattcgtggacaggaaaaatgcgaaataatccgattcgacacgtctgcaaactgtcaatccaagccgaacactcctgactctcgtcctcctcggccggcgccggcgacgacggcgagcgtggggaagcgtcggcgacctggttgggccgtacggcccagatcgagtggaggcctcgaatgggcaggcgacttctgttgggccgagttctgcctgtctttccataagttcactctcttttagttactagatgtgcgttgcaactgatagagccaatttaatttgtacatatgtgtcggtggataaataatccattgttcgtttccccgcaaaaaaaatccattgttcgtttatttatgtgcttatccaaatcatttattaccaaataaaagactatttgtgtgcaaatcttttatatacctgttgttaacgactcaaaaggaaatgctgtaaaataaagtatgataaaaaaacaaaaggttgaattcaaaattaagttctaaaatctaaattttggcttataggaataagcatcagcaaaacaatgagacattcaaacacggctacacgagcttgatttatcgtgcagctttgtctgaagttgggaaggaattgatgacggacagaatcaacaacttcgatcatcctttatttcggttgtcatgttttttccgaaaataaaattgattcttatgaattattgtaacggtatccctgatagtacgtatgagtatgtgtggagactgacttgaaatcatgctaacatgtgacatgaatcgtgccatgtaatacgaatagacgacctacgtgatatttacacggattctgcgagtatcattcgcttggtatccacatcacatggactctcttttgtagtccgcttgtgattcgtgacttcgcaatgaatgttacgtgtgacgggaatcggatatgaatgatgtagcacagttttgacaaaaatatcttcaatttttaaatcatgcagtcccaataggacatgcggcaagggcaaatcgcgcgtgcgagggcgttgcgggcccaatcgcggcggcgcgcaaagacgcatgtggaaaacgaactcaggcgcaacccccgattgctgcggacccaattaatttgcacgcgtctcagataagaggaatactctggtgtaagaaaaaggaaaaagatttgatagaaacataaaattaaaaccgattaaaaaaataacgtatcaaaattctgacagaaacatcttcgaatttcataatagtggagatgggtccaatctaattcgtatgcctcaattgtaatatcggatatgttcatcccccacaattatcaaaacctgtataacctcttctagctgtttgaaagcagttttcgttaacgtaacttatatattgacctaatccaactaatcgagtcagtatgtggctattcttttttacacctctcttacttttatcttcctttgtacaatctcttttctctagagggcggggacacaacgccgtgcatgtgcagtactacataggaccctctctcgacgccgatgagcttgagctggaggaggaaagaagaagtggggcgctgtaaatttggactcctcttgaggcacacggcatgaacggcggtgtcgttcttgcaggccattgggcctcggaatttgaaactccgaacccattgcgttctctgtctgacagccgttcgattcgtaggccaggaaaaatgagaaataatccaacgctacacgtgtggacatgcagtcaattcaatacgaacactccggcggtgccggcgccggcatcggcggcgacgacggacgacaacgacgactggggaatcgtcaaggagctcgacgacggcgtgcatggcgaagcgtcgacgacttgttgcgccgtgaggcccagattctgtggaagcctcgtattgggcggccgatttgtactgggccttgtggtatcatctggcccgtctggctatctttccagcctggcccagattgagccttctctctttacttcttctctaatgggcctcagtgtacctccgtagggcccaacctcgaatggatccaatactcatgggccgtgcggcccacgatatactcagctgcatgatttacatacaactcacacattattgttgttattgttgttgttgtttttctgcatgaattggcttccaaaagcaaaggtgcagtagcaaacaaaaaaaaatggaaacaaaagaaagaagcaaagtgcactgctccacgagttaagtggaaagccgtatctctgtcgccaaagctatatagccgcgtgtcaccggaaaacccaaagaatcaatccattaagccgattaattaattagccaggtttgccatcatcattggagccaattagtttctcatcggagcttgcaagctagctgggtgacagcaaggagcagaaaaatgttgcaaagcacaaagcccctctttgctctgttttgtcatcagtacttcttttttcatatgcatattgtacgagcagaaaaaagtgcttttagtctgaattatattgtacgagctgaatctgaatgtgatgtatggagaattagcaacaatggagtgttcgttgcttacttgctccagcttgttcacggggaatggcctaagtactccggatgcaaatcttctgctataatgcacgtgtagtatgtgtcactaattatgtgggccccacttacttctggtccatatgtcagtgacacctactgcatttgcagtacagcataggcggttcctatccggaacagaatactgatcacagaaaacaggacggtttattagcgcgtgattaattaagtatttgctgattacttttttcaaaaatggattaatttgatttttttaagcaactttcgtatagaaactttttgcaaaaacacaaaccgtttaacagtttaaaaaacatacgcgcgaaaaacaagggagagaagttgggaacatgggattacaaacacaccctcagagtactccattgcatgcactaatgcacacagcacactttcagtttcagcattcagcgagcaggaaaagaaatagggccaatttgaactgctaccctaccaaaatttgcagcaaaccaaacatctctactaaaactttaccaatgatataaatttggctttgcctataaatttgtctcttatgggcaaattttgtctttaatccaaataaacattttcaactctaccctaccaaaattttggtagtaccaaaacttgcccaagatttgacactaccaaaattttgatgggacatcaatccaaacatgcccatggtcttccaccatctggcgcttttgcaccatcctacgcgaaaaagaaagaagataaggggcctgttcactttgttgccaaaaaaaactttaccaaattttggtattgccaaaattttggcaattatgccaaaatgctaaaattttggcaggatttcttatataattaccaaaatttggcagcaaactaaatgtagccatatttttgacaactttatcaaaatttggtaaggttgaaaatggcaccaaagtgaacaggctaagataagaagaggctcttactttttttttctttttttctagaactctgtagaagctagagaaagcgtgaagaccgcgtgattttaagcccaaacgctttggactaaaaaggccctgaagatgtagacgatgagttcccccgccgcgtgaagccgtgaaccatctcagccgctgaagtggctttagcttttgatagcaacaagctagagcaattggctaagcaaaacaccaacttttactttcagtctacgtatcagagattcagagatgtgttcatgaaacagcttcatttcagggcagacaaaaacacatcatatatataacagctaccagatttactcaccggccggcctctgtttctcctaaaagaagcggagagaacagatgccgtccaaaagaggggaacaaaaaaaaggagagaaaatcgaacattcagtgaacacactcgcaaaagagaagcagaggatgtgactaggatacgatgtgataacgatgtgacaaatctgcactcagttcgctaagatggcaagaaaaaaaccaatgggaatttgtgaaatgggcatatatgttccctatctagaaagtgatttcttccactcggtttccgcgcgttaacttcgctttcgttcagctcagctaagctttgccggtcacctaccaaagaatctcctttacttcttttctttctgctgttgctgtccttctcctgcagcttcaggaaaaccaaagaattggaagtggcttagcagtgatcaactgatcactgatcagactagcagagtatgatagtatgatcaattcatcagtgtgattgtgtgaagtgtgtttatgccgaatatgtgttatgctaacaatggagtgtgcattctgcattgcattgcagaggcttgttgatgggaaaataacctggattactccactgcacttccagcattctgcacgcatccagagaaggaaaaaagatagctccaccatcctgcactttcgcatcatcccatgcatgaggccggccatttttgttctcccgaaaagagtagagaagaagacgaacttttctagaactctgcaggggctagggaaagcttttgccctcgtgaatctcctcaagtaacggccttttagcttttgatcaccacaagcttgagcaatttgcttggcaaacagtacaagcaacaaccccgcccccccccccccctccccttttttttttctttttgtgtgtactgataagatcagtgtacaaccgttcatgaaacatcctccctccgtttcaaaatgtttaataccgttgactttttagtatgtgtttgactattcgtcttattcaaaaaaatttaagtaattatttattattttcatatcatttgattcattgttaaatatactttcatgtacacatatagttttacatatttcacaaatttttttgaataagacgaacggttaaacatgtgctaaaaagtcaatggtgtcaaacattttgaaacggagggagtattttaaaataaaatcaacacgtgattgtgctatttcattgagtttagaggtaaaaaaaatacaaccaccaagaatgagtgtcggtgacatggggccgggggtatcgtgactagaggcttgggtagccgcggtcacccacgtggcctgaccccctcgggggggtcgggcctgagggtgacgtggccacccctccctctgtctccccgagggg

SEQ ID NO: 9461 - DNA, 49209 bp, Oryza sativa
  unsure (1)..(49209): unsure at all n locations
cggagtgcccggtggtggtggtgggtcggagcgggtgctgcctgagccacgtcgtgaagcggctgctgcaggggctcggggtcaacccggcggtgcacgaggtcgccggcgaggccgagctcgccggggtggtcgccggcggcggcggcgtcgcgctgccggcggtgttcgtcggcggaaggctcctcggcgggctcgaccggctcatggccgtgcacatctccggcgagctcgtgcccattctgaaggaggccggtgcactctggctctgaatcaacaacgcagtagcgatcaagctgttttccttttttttttctttttctctcctattaggttcaaatcatctgatgcttttagcttcttttttttttcatggcattaataatggtgttgtaattagataggacgaaaaacttgaattcttttaggattttaataaggatgattaggagaagtgtgtgtccgttaacgctactgtacttaattaccttgtaactagtacctatacctattttcgaccatgtaaatacgaatgggagaaatgaagagaaatatttgcggtatttacttgtcccaaattcccggtgtttttccggttgagaatctgatgctgcaaagaaaaaatattgctgcacatgcgcttgcaaacatccctttctcttcctgaatgcgttgtcgccgctaccgtgcatgaacggcagcgtattggatgcttgtaattcatggccggctgttggttgttgtgcacctgtgctaatatttttcttttcctagttttgatattctgatatcacaattatatatttagacttccctcaaaaatttatatatttagacactattgttctaaacatatggagtaagtactaaaccttaagtttgattaatatttgcacctctctatatctgtcactgacattttgcagccacctgcaggatttaattcaactaaatctgtagcaatttggaagtaattaagccggacgcaggcaagcctgatcatcagcaaagagaatcaagcttcacacgttggcatgtctgtccatgagcttcagatagcagcattattccacgtcaggaaagcagaaaaccttccaaaactaacgagacacaagccaacctgcagcgtactattgtagtacgtagttgtaccatgtaagaaaaaaatatacaatcctatggaattatagatgttcatattctctactccacctgatcatgcatgcacggctaggccggtgggaaaaatgacaagaggcgaggcacatgagttgtcataacgtcattaacaaaaaccacacgaaatgcatttatatataggtgtcctttttcttccttgctgtcaaatgcgtaccaaataaatcatgcaatagtttggataccctacatttgcactggctggaatggcactagccaactacctaggatcagtcagtcccaaaaatcattatctagaaaaagttagtcccaaaatgaaaaaaaaaatcttgatgctcactttgaatttttttcacacattatgtggaacagatatcaaactgcaacagagaatgtgaatatgcaaaaattatagtggtttgttcgatttgtaggattttcaaaacataaaaatagtatgagaatatatatgcaaatctaagaattgtaaaacataggaaatcctatgcaaatctaagaattgtaaagctcgagtggatttttttttttggtgtgtgtgtgtgttttacatcaagtgaagggataaaatttttctattgtcgattcctttgaaacaatggtagttttagtgcccatttcaaaggatggtataattctatacttttccttcacaattttctcttaaacgaatgagccgtagttctttcgccctgtgggaagccgcaagctggcatgctacaaacctactacaaactgattgctgagttatacgagatgctgattgctgagtgcgtttccctatcatccctatggcactagggcatgaagacagtttacgtcgaaaagtaacccaagtacaaataaaagaagacttgactgaccaatcgagatatttttatatgcatctctcaccgtcccataaagtcataacagttttggagaagcaattgtacaactcaattcttcaaggaaaattgcatgttatgatcaggaaaatgcccttctgttagaagtgattacagcaagctaacacgtcactatcatcacaaattcattgagattttcagatgagctcacgccagagtaaggacgtttacagctcaagaagcacgtggcaagaaagataggggagaaaaggaaaggcggtgaattacaatcaagaaattcagattgttttcaggactgcaaaactttagtgcatgactacatgtctgtgagactctgaccaatcaaataaataaaatatatatggtgtaagaaataaaatgcaaatggaaaagactccgtgttaaccagtccagagtaactgacaaatacatgcatggtttcagtttcagcttgctacaaattgtgggcggtggatagatgtaattatgtaaaagcttaagctaactcttgcatatgattggcgttatgaatttttcttggtaggcatactaatcgcgcacacaaaaataaaataaaataaaaacaaatgatgccttccagaattcagattcagcaaagaaccaaccatgagacgtgctgacatatcagtggcatgataagagcgtctcagcttaacaataaaataaacaaacaagcatgtcgatgtaatccgatgacgattgcaaatgtacttagtctcatcgacgtggcacgagcaaggccacagtacgacgtgagataaagatctgcgagatcacgcagtgacatcaacatgtttgacaagttagctagcagttgggcggcaaatagtgctagtaaatggtttgcaaaagacacctacttgacgtcacgactttgcatatgtactcatcaatatacgtcatactcatccttaataaaccacaatctcccccttatgatggtttccagcaacaccctaagtggatgactttggctacatctaggatctggtctctttgttcaaccttgtcaaaaacttcggttcagaaatctagatgccttgtttcttaagtggattgttctttttgcactaattccatggaatctatttctccttttccaattagctgtgaatattggagtttggccgaccacaacttccttttgaagcttattatgaggcctaaagaaaaacgggccaccttttagcgttagggacttgagtgaaacagaagcgtagaggaaagaagagataagctatggtcaggcagaccagctgaccaggtggcaggtgcatatgttagtatggaatacggtgttgaatataaaaacaaacaaacttggaggcagtcaggagtcaggacgcaggagaaacgtgtttaaggtgtaaagtatggtaaaattgcatggcttaaagtcagcaacttaagtttctagatgaagtgatacagaatttggtattatggtaacatagcctgccattttcttttttttaaaaaaagtagaaattatgtagatccatttgagtaccgactttggggtgtggattctactccttctgttaaaaaaaactaatttaatattggatggaacttttcctagtatgttgttcagattcattgtactagaaaaagtctcatccaatactaaattggttttttatgggacggatgaagtaatgcaaaagagaaccatcaaattaaataaagtatatacacactatttccattgaatgctatgaattgatctacaatgctgagttcaagtatcttaccaaaacacacagctgaagtcatgggatgggcaagagtcatcatgttgtcatgcagatggcccatgaaagcaaccagtttggctgcaggccacacatagcccttggagtgatgcaagagccatctctgtgtatatcctcataataaaatgcggatttttcatggacagggtgtcaagatatgctcacatctgcgaaccataaacatgagagtaaatggcgatgaacacccaccaaaataatatcattactgagcaaatgatcaaggcaaaccccccaaaaaactcaattgtatttctttttccaaattaaatgaaagtgccagcaacaaactttcataaaatccttgtttttcttatggtttatggatcataaaattctcagtagcaagggaaaagacagataggactctcacatttacctttttccacagagagctggcacatcatgttccatcataatcgtgcattagtctgtttgatcctacaaatcattggcagggctgcagcattatataggaaaaaatctgaatcggttagcaagcgctactactaaaaagaagatagcaagtactaacaagcagaaacagtcggtggcccaaattttacagtttggacgatttgagtccattttagcccctgtcggctgaatagcatgtagcatgaaagataagcatcagtatgaacttgaatacatttgtagtgaaaagaaagtaggtaagtaatacatataaaacatggcatggataaaaaatggagaccagactgttagaattagctccgtttcagtaaaaaacaacaaagtactccatccgtttcacaatgtaagactttctagcgttgtccatattcatatagacgttaatgaatctagacacacatatgaatctagattcattaatatctatatgaatgcgggcgatactagaaagtctacattgtgaaacggaggaagtatgctacaggatacacaaaggtgactataatcagataatcagttcaagaaggcacatgtagatgtaggggagctttaggttttacagcagtaagcttcctgcattccagtcattaagcaacagtgtgacaccatagcaaagtctttgccttgaactaacacgtgcagagtggaaaaagtggaagccatggggtgatgggggccaggcttttagactatcactgtatcaactcttgttccccagtgaacctccatactgattggtatgtgagcttcaaaagacagcttcctgaaagctataaactagatcttgaagtcaacataagtgcaatgggcttctgcgctgcagtaaaggatccaactgaaacttcatcatggcaattgtctctagagagaatcaaaccatgaatcaaaatcgtccgacgcatttgagggtccggaattaggaggaacactgacacttgagatgttgtctttgcccttagcagatgtagtttgtttctgtccattcaagcacagtgaagtgtcagtgagcaagtcgtccaccaaatcatcaatagatgtagatatatctatctggttagcatatctgatgtcaatattgtggtcattcttggaagttgagcctggttcagcaaaaccttcattctggacagaaggagaagtctctgaaagcaagtcatctagagcatcgtcacaagcagcagtcacaagcagcagtcaccgatgatttggatgaagtgctaggtgtaactttcttatctggttgattgactttcacatcttgcaatgttgatttgtttccaaatgattcatctaaattggagccagaaagatgagttccaccaagcgtattaagaagcatatcaagttcttcttctgcagcaaccacctcaaactttgccccttcactattgttattatcttctccagtgtccaaatgcacagagtgagaactagtcttgggtgatgatgtggatttatcttcttcaaaacatttcaactgacaatctgctttcatttgatcatcacaacgaatgctgtcatggtcatgaatcaagctgcctttagcatcactatccacatctgtgcctctttgaatctgtatttgattgacctcagatgcaacagcctataacaatcaggcaaaaccatgaatacacaatgaaaaaaaaaatagcaaaagaaaatgatcttaatggcaagtaaagtaggcatatacaaagcttgcaattaaaacatcaatagataaaagcatccaaggcagggagaaacagctaacttactaagatgaatactaacagatcaaaaacctttatgaaccaacgacctaacaattgcatgaaccatgcacaaagctaagtaataagggctctaaatcatcccagttggctgtgtatatctacatgtgggtatagaggccagatttcagtccattatctaaaaataattccaatcgtcccagtacaataggtaaaatagacatagtttactagggtttaaatacccagtgaaattcattactctatctaatcctatgcagatggctattgtactgtacaaaaaataatccttccaccactcagaaagtttggaagctaaaaataagctatgtggctgatggcagaactaagagatcgtagtgcagacagttaccatgatgggccactggcaaaaggtgcattagtgaaatatgaaaggtagatatcaaaccatagtgtggttaatgcacaaaatagagtgcctagaggaatggccaataggcagatggatatcaataataccagcagcaaatatcaaccagagcattgaaaggctgcattgcaggcagacctgccatggcaaggcatatgagctacaggcattaacagcagagattaacttgtagcaagtggaggtcaaaagggtaggcacctaggtgatgatgactactacagatcaaccataagggtaccagcccaaattgtccttttaagggtttgttttatcacatggaaatcagaataaggaacattgcacattttcattgtatacagattgggtgtcgccatagacccgtagacacttcaagaataatgtttgcatgaagtaagttaaacccctacttgaacatagtgtaaaggaccgtttgttcataacgattttttaaattgaactttagaaaaaacaaaacaagggtatatacaatttctcacggaaaagcaaaactacagttacagtttactaaaagtagacaatgtagcacatgatcaaatacatttgagtacttggaaaattagcaaaactaaagaaaattgctataaacagacgtaccagatcctcaggtagcagatctttctctaagaaaagcctctcagaaagcttaagcttcgaaagatgggtggccaatgcatgcagatccatggagagaaaaggtacctaaaagttgaggggaaacaaattctcacataaatatctaaaaatgtgatatgaagctgcccaaattcacaaggttttaagagttgatacacaaattgtaaggtacataatcaaaactacatgagggtctacaaatcaaaataaagtctaaattccacatccctgtctgttcggactactatcatcaagctatccagacaaatttcactctgtaaactgacaatagtctcgatgcaagaaacaaagagaggtttcagtcatagccccaaccatgctcaaacaaaacattttaatcatgtacatgtcattcgtctcactaagaccaaacattacaatagtttacttgatgtggcagcacaagacaagtaacaaacgtaatatcacagcaccaaattttacctcgaaatcgggtgctaaatcatcttctaagatgaagttgtcatcttcacaccaggacaaaatctcttcccctttagcttcaagcatagaggttgaagcctgcataaaatctaaaaaaaaaagaaaaataaaattaacaaacttagcaacagtggagaaagcaatcacaaatagtaggcccacttcccaaaggacacatcacatgatcatcatcaaaataaccgattacagacatcaattttccaaaactctcaaaccaaaatgtaagttgtggttatatactaactgacacagcagaaactccgtttgaactacctagcggcctacgagatgtatgctcaactcaaattctataaacaaaggagtacctcatgatgtttggtatgctcaactggcttcttaagtgaggtttaatatgactaagaacaaaatatttctcagtttagctagtgccctcgtttcgtgtgatcgtgtctatgtaatggtaagcaaggatcgcagttcatgcttgaagcgattctcccgatgagctttgtcaatgaggtagtggaggtagggtcactcaccgaatggcgaatcctgggaggagagacgctgcgcctcgcggggctgagcccgagcctgctcgagcaggaagccgaagtctgcgcccttgctgcgcggcgccacctcgccggtccactccgagggggccgcggattcatcggcatcgtcctcgccgtcgtagcggtcccagttcgacgggaggttgcggccgcgggggccggaggcggaggcggcggcggcggcggcttccgcgcgcttctgcctgtgagcggcggcggcggcgggagtctggtgggcgcgccgcccccgcaccgtgtgcgagcgcttcgccttcgccgccgccttgggatccattggagggagaagggagggagagggtttcggcggcgtgtttttatttgcagttaagtccctgtaggttcgcgattatttcatctaactccctgagatttgggggaaagtttgctttaggtgtctacttgcatatatttgttgataaattttcttctaaaaatttaatagtattttttaataaaaacatatgtaattacattatagcctgcatgtaattataatgtaatgaacctttagattttcaagagtttaaggaggaaaagaaatcacagcgcacgcatactattttactataaaattgatactcactaacttttaaatcacaatatataagtgtgtcgcatcatcacccaataccaattattatatatagtattttaaatcatatgtaagtgtgttacatcatcattcactagcaattattatctagagtattttaaatatcatgcaagcatgacatcattacaatttagttattatttctaaaactcaatatgcaagcaatcaaatcattatcttcacatcattttcatatttatcaaccatatatatctatcgtttctataatatataacatgcatttatttatctatgccgtaataaaacgtggggtatcaactagtatgtgagaagattcggccccacgaccttcgtttcacgaaaatattatttatgaatgattttctaaagttatatataagttacattataagtacatgcaaattacaatataattataccatgattgttgtgctataattgcatatatcacttttttttaaaaaaaaattgtcaacaaatagtattagtactatataggtagtccttcaggggtgtgtttgtaatttaaaactttatcgagggcctaatgaggacgccgactccccgccgcgggatcggctgccactccagtcccttcgcttccgaggcttgacggcggcggcggaggaggatgcgcttcacggcgtctccggtggtggagctgccggtgggcggcgcggtgctgacgttcgagcaggacaacgactccttcgaggtgggcacctccgtgtggccttcctccctcgtcctcgtcaagttcgccgagcgctgcctccgcgacccggcgctccccttcgccgacgtcctccgcttcccgggcacccgcgccgtcgagctcggctcgggctgcggccccgccggcctcggcctctcccgcctcggcctcgccgacctcgtcctcacggacatcgccgcggtgctccccgcgctccgccgcaacctccgccgcaaccgccgccacctcccgcgcgccccacgcctcgcccagctccactggaactgccccgcgcacctcgcctccctcgcctccccgcgccgcttcgacctcgtcgtcgccgccgacgtcgtctacgtcccggaatccgtgccccacctcgtcgctgccatggacgtgctcgccgacgccgaccgcggggtggtgctgctcgggtaccaggtccggtcgccggaggcgcatcaggccttctgggacgccgtgccggcggccttcccggtgatcgagaagattccacgggagcatctggacccggattacgcctacgaggaatccgatgtgttcgttcttcgcaggaggccgcgacagtgaactggtgagcaatttgcttaccatttgctcctcaatgactctgcaggtttgcaagaattgtttgttcagctccaaagttattatgatcatttggttgtgatagaaactgatgaaatttgcctcaatgtgttgatgcagtcagtggattagtgttagccgatatcgcgacggattcgaccgcgttgatgagtggatctctgccatgagttatggttgacgatacattttgttgctatttttgctactagaactctactagaagagcatattaagtggtattgatggatgttcatgattgattttcttcgtgctgttctgtgattgacaaaacaaaaattaacttgtagatttatcctcgctgaggatatccatgctcaacctttatctgtcagtttttattcgttttatggttgctacctttctgtctgaacttgtagaaactgtgaatgcttgtcttgatctcttcctaatgggctaataactgataagatatcagaaggtgtgacattatgcatcgcttcattgtgttttgtgcctgcaatgtacagccgatctagctcaaactgattacattggcacttggtagatattgctattgtggtttatgaaagactggtagtttggtaccgtgtaatgcttgaacttgtcgcttaattgtagactagtaagaattttgcaagcaccaattctgctgtgtctgtccataagcttgaaaactgaatgtctcaatgcagtatgaagcgtgtccaaggatgtgtgcatgaggtggatggggtttccatttggcatttttattgaatgtgtggttttgtgggaatgagcacggaattcgcaaccaaaactgacactccattctccacgcattgttcatttcttggatgcgtgatgtagatgattctctgctcattattcatcgacttgtggctgaatgttgaaaccaattgtagtcctgaatggatttgctcatatgcataggtccatcaagcctgtatggctgtatgtatctcttcgctttttagggatataatgctgaatgggtttgcacagatgcattgatgtccagttgaatgttgaaaccagttgtgatgctacttgcaggcatcgattgctggaacatgttttgtttcagaggaaatccgcgaagcactgagtgctatggaggaacattctgcagaggattcaaccttatgatgaactatttagcgtattttctgtgggtcccatttaccacgtcagcaaaaaccatttcccaaaacatcgaatgagttgatttataccaggtttctaagggactgtttggtagagcttcaactttgatccgttggtgtcataacgtgtctattggtgtctgtatgctaattatacttagatcatggtgtcatatatatggataagctatttagctataggttttgccaaaagtcgttagtatcgcctgacacctgccattatactatagatccgctcctgctcttccatttagctctaggagctgggtctagaatggagttgtggaactgcctaaactccacttcacatctctagttcattttgtgagagagttccacttagttctgctcctattttagggacatttaactatttgtcacttttaagatgtggcatctaaagatttgccacttgttgtctattacatgtgggtcctcatgtgcctataacatgtaggttctgtggcaaatctttatcatcactcataagaggggtaaatagttaattattcctctattttgggtggagctaaaactgtttggttgagctctagcttcagaagaagtgccaaataggctctaagataggggaggccttatacctggttttacggtcgagggaggttattcgatcagaagcaagggaggagggaggccggtgggcaaatccatttttaggtgggccaaatggaggcccaactttgtgtggcggtatacaggccgtgcagttgggctgggactccgccttccacaccgaaacggcccacgcgtaccgacgcacctcgctcatcccatcctagccgtcggttccaaatctgacggcatcaaggccctccaggccgtgctcatataggtttcctctccacctccagcccggactctcccgatccttccccaactcggcgtcgcgccgcctcaaccgaagcaaggtgcgtctcatctctctcgcaatcctctcctcctcttccaaatccctcgccctcctcctcgccttcgaaaatcgaggcccgattttttttttttgttcttcctcgcaggagcaaagcggggattcagaacgggaaggagaaggtccggttcgtccgctctcgaggttcgtgttcgtcgcccaaaccctaggttccctcccctcttctcgtttgtcgatctatgtatgttgttgcggtaggttttgatttttttttcggggttcggtgtgaacgatctgtgcctggttgatttcggtatgagagatgcaaatagaccgtagctgatgaaaaccgtagcagatcgaggctgctttgctgctactgctgctgtaaatttcctgtagatttacgttcgggtgtaaatattgaacaaattgatgcgattttccattggaggaaattgaatctacggtgactgctgctcacggttgctgctgagtgctgcttcttgcagtggggagcccgccatggttggattagatgggcggagcttgttttgtgggttacatgggtggttccttcaaccggccaaatcattttttatcatcagtggatggaagagacccttaggctagatatgtagttatgtgattggtcggtgtattacaaattatgtctaggtttctactgtttcattgtcttgggttgttttcttcgattgaagattaatgatctaaaatggtttgcagcttaggtttttaaaacggatcaaatagtattctttgtcgggcggatatttcaaggcctactccggaaggaatgcccttgtgcaacaggcaaaaaaaagtgcctctgtgccatgttgtttgatcttttttgcagttgcaggggggagaaatactaaactttctagtggaagagacacctctatgttgttaacagtgtccagatataggttaaaacttatcatgagcaacatctagcttcatgatttcttgaagtggattacagtcgtttgtttttgttctttctattcactttgttcttctaatattaacggctttgaataagtgtgcagattaggttaaaaggtactgggattagggttttcttgcgagagctttataatgttccaatcacacactgatcgtttcaggggtaaagtcacaggaatcatacttgttggtgatctcaaaagttaaaaatgataacatatgaacttgtttttatttagcatatgctccctttgttgtctactttttctgtatgtaatgcgctatgacgactctaaatcgaggtatttctttctccctgtagttaccagataagccattcatatacatatatatagaagcacttcttgagatttggacaataaattctgacaattttttttaatctttttgttatgtacagctcaagtgtcagttgaagtgttttgaaagtcatggcggagcatttggcttcaatatttgggactgagaaggatagggttaactgccccttttacttcaagattggggcttgccgtcatggggatcgttgctcccgtctgcacaacaggccaactgtgtcgccgacaattgtgcttgctaacatgtatcagcgccctgatatgatcacaccaggagtcgatgctcaaggccaacctattgatcctgaaaagatgcaggagcactttgaggatttctatgaggatatctatgaggagctgagcaagtttggtgaggttgagaccctcaatgtctgtgataaccttgctgaccacatgataggcaatgtgtatgtccagttcagggaggaagaacaggcagtcgctgcgcataatgcccttcaaggtcgcttctactcagggcgcccaataattgttgagtattcccctgtgactgatttccgtgaggcgacctgtaggcagtttgaggagaacagctgcaaccgtgggggctactgtaattttatgcatgtaaagcagattggcagggagctcaggaggaagctttatggggggcgatccaggaggagccatgggagaagccgcagcccaagcccacgccacaggaggggcaatcgtgaccgtgatgatttccgccgtgaacgtgatggttatcgtggtggtggtgatggttaccgtggcggcggcggtggcggtggtggtgacggttaccgcggcggtgatagttaccgtggtggtggtggtggtggacgcaggggtgggggcagcaggtatgacaggtatgatgatggaggaaggcgcaggcatggcagccccccaaggcgtgcaaggagcccagtcagggaaagcagcgaggaacgcagggcgaagattgaacagtggaaccgtgaacgggaggaaaagccttgaacgaaagcagtgatatctctatggatggccggttcatgccttcatggcaatcactatccgctggagtcgtggtgtgctgctatgttctaagtggatatttagtgtgtgtcgtttggtactcatgcttggctgagtaacccttttaaatgcaggattctggattctatttacattgtgtttcgtttgacgtgtaaaccgccgtttgtttttaaatatgcaatattggatcttttgtcagtctattatcctgtcaatgcgcttagaaatctgtgattctctactgaccatattgcttctcatgttatagcggttcaagctggcacctgttgtcttggaaaaaagaaccccattctttcttttgctcgtttcaactttgctgcctgttatttgtttggccttttgctacctgttgttgcttgaaactctataagtgtatatacttacgtgctgtacgctttgctcatagcagcctcaaaagctatacgaacgatacggcagcacgcagttcatggagtgcccgttgcaccagcagataaaaggcaaaataaagcccagcttggactgaacacaagcttcacatgaaattcgcaggatcaccccagaaaagcttaattcacagaatctcccaaaaaaagaggaaattttgtttttgttttttttaaggaattggggcatatgattatgtgaactttggccgagtttagatccaaactttttttttaaacttttaactttttcatcacatcaaaactttcctacacacacaaacttttaattttttcatcacatcgttccaatttcatccaaacttccaattttaacgtgaactaaacacaccctgagtataaactctgggcatacaaaccgaannnnnnnnnnnnnnnnnnnnnnnnnnnnggcatatgagctgggaatcctcgtaatattcctctttggcatatgggctgggaatcctggtacgacgaataatcgaatatccctcttcctgtgtgtggtactgtggttctccacgaaacaaggaacagtctggctctcctggacgaaatcgcaaagcaaagctggggctgtgcagtgcagtgtgcagctgctgtcactacgccgtgtgctcacgccgttgtctcaaccaatctcctctactactgtacgcgtgccgctgccggtattgctgccaaaaccagcacctcttcttgttctaagcaaaaaagtcgccgtcttgttcttcgaaaaaagaaattatacactaccgtgtatagctttctttgagaaacaagcttgagataaactaaacattattataagcaaagtgtgttacacttttcactgacgtgctagtgacaaaaccaattcgaaaccagaatcacttcgcagtgccaaaagctggggcttttcttgcggggaaaaatatatgggtgttgtcatccatctgatggctatgctagtgaataaacgtacttcatcatcttccggatcgtgatatggagtaattatgtttagctctagtatttgtctacgcgtcgtaaaaactgattattattattattcttttttttttgggttgctagccgcttgtgacaattgccatgacggcattgcattcttggaagttggatatgtgttccgcgcagatataaagacaagataatcagataagcatagtacttaaccattgaatatatcgtcttgcagacaaaatacatgatgtttctactcttcccttaacgatggcaaacgaggggaaagagcacatatagtggttttcttgatagaacgatgtatattttcttttcaaaaaaaaaaaagaaactatcgtcggtggctagctagtacggctaagtatgcgaaggttaagagaaggaacaatggtagcttatgaagaagagcgagggtagcggtgtgtggaggagagcattggcagttagagggtgccggcggtggagaagtttgttgtcgccacccatacctaatgaagttccttacatttttctcaccaaatagttctgacacgtggcgcactagttattgtaaagaatggtaatatagcttgttttatataaaagaaaaatttgagaaatatatgctttaaagggatacttggttaattatagtcagatcaattttattttctactattcaaattttatgaaaaatatatatttggatgaggataacttgtgtcccgttgtctcatcttttcatctaatgctcaagaatagggctgaactagaataatctacataaatttgttttattcttccttttttataattttaaagtacaattttaatggatatctggacataggggtagggtctagtcctaactatcatactcttatatccgcccccgttttcatccttatctatatcaatattttttttgtcttacgtaggtaagtagggttattatagttatttgtgtatatattgtttgaatatgtccaaaaactttagaaatataatcattttgggggttggaggaagttaaaaaagagagaggaaaatatcagcgtccaaaatcattgtgcctcgagtgtctcccgtacgtctcgcctcgcctgcgccgatccccatctcgcgagcagagcagggaagagggaagaggcgccgtcgtcgcgctgcatcctggtgagcatccgcatcctcttcctcgctcatccgtcccttccgcccactcttgtctcgattttgctcgcgttaaccctagcttctcttctagatctggaagaagcttttctcttaatttcggagccttaaccttaatacagcttgtttttcctccacaaaagtttggggggttcaacttattccaagttggatccgccactgattagtgagcaacttttagttcggagggtgaatggaagataaactttgacagctatgagttaccactgataacgtgtattgttttggtgagttgagtgtggttttatgtggaagttttctgtgcttatactatgtaatgcttaaatgtattatgagacacttatactttggtcactttcttgtgggttgtcagttgaagtgattttttctttaggcttcttaaaattgtcgccagtagatgaaccattatttagatgagcatgataagaattggttttctcagggggaaaaaatgcatgaaactagtccttttttgggtacagttctggtgcttttatggaaaaatggagttgtgataatagtttcatgtcattaatactttagaaaacttctgtgcggaataactctcaaatgcatagttaggaggagatactgtggattggataagtgtgtctttgtgggtaatgttgttcaaaacttgaaatatcagtctatatgagagcagcagcctcagaattgccttcttttttgttttatgcaactgcgttcttatggttcataggtggtttcacaatggattacactgtatatgcaacagcgctgttgactgagtatttgattttactgcaagaatggcttaagttaataagtaacacattgccttggaccctttgattgacgcaagtaaataatagtgactcattttttcttttgattgcaatttgcttacccagtctcttatttacactgtggtatgatatctatagagttgattattcagatggctgcacattgtcattttactcttttctgatatagcaaattatctcagatgtcaactgttatgtgccttgcctccttcatatccctatactttttgagcccacaaagttattaaaatttctaagatattgagcacacagagcatttagtcatggattcaccaaggcttttagatatactccagttttattctatgcttgatacatgtgcataaggtataagagaaatttattatgttgttaactgtttcttttacgatgagatggagtactactactttgaagtatattgtttttctcttattcaaagccttccaaaattagaacactcatatgcttgctttattggtaatgccattttattgttgtcatataaatgttattttaaaggcattagatttgttacatattcatcctctgatttggatataatttttatcaacattgacacccatcaagatcaagattttcttatggttattcatgttatgtctgttgtttgtttatagatgaaaatgaatgtatccatgtagatgtatcttaatgtaacaaataaatatgtctctgatcattattgtttattagtttttgcttccagctataggaaatttaatacacataattttttatgccttggtgttactcatcaaagcatgtgatcattgtgtcattgatgtttgtcaatatatctctccaatactataaacaattcattggagtgtaaactatgaatctgaaagtgatgattcaccatctaacacatgaattcatgtcaatgtttttcagtcatgtttcttgagtttataaagttaacattagtatgtgatatagaaattactaaattacatgggtcgccactcgccagcacaacggctgcagttgaggacagtttggttaggaaggttatctggtaacatatatgtacgtacctgccattcaactgctgtgtggcatactcttggagtggaagatgggaaactcgataattgaactttgcaatatactccatccgtttcaggttataagactttctagcattgcccacattcatagagatgttaatgaatctaagcacacatatatgtctagattcattaacatatatatgaatgtgggtaatgttagaaagtcttataatatgaaacggaggaagtataactgaaggaggcaacaaaagtgaagaaattttttgtacttggtgtatgctttttataggaaatggttttgtaaatcatgctatcatagtatattgtaaatcttatgccttaagaatcctgaaccttctacttgagatagacctgtctatcaaatgtgttagatgtgtctgcttttggcatattcgagcttttaggtctaagttaatagtgttctttatttctacaaatatgtagatttttcaacagatatatcccgaagctggatttcatttagtgtcaatctcctgctattgccaacactcaatgttgcatattttagttttgcttccaccctttcatgctactcatctgattgaactttttttaacctggatttgaagtacgaggtaatcaagtatgttgcttgttttgcaggacagatgatctaactaatcaactagccctttgcaacgaaaccttactaaccttgtattactagaccaatgtggggttttactaggctgaagtcttatggcagaatggcatattttatgttgtagtatgttgttatcaactgtacagttcaccaaaatgtgatcaaatcctgagattccactgataccaagcaactccagtataaatagcccatgttatagcagcagttgttcgcataccaagtttccgaccatgctagaggacatcatacttgatgcctttgaggttcattgttgggattgttggttatactggagacttaatatacgggattacagatgtttgaaaacaatacggacatgaggaattaggaaacgaaggtactaactggacgtcgctaggtggtcaccggttagcagactcagcacctatttgtcagtaagaggcagtaaccagtctacctggggttcggtacatggatgggatcagcattcaagcaattcaggcggtggcgatgcatgaccatcagagttagtgtgcctccgtaagcctagctagctgtagcaacacagggggtctttggtcctgggcagtcaatcgggtactgccttctggagtgatctcttgattgttgtgtttttattagtcaggttccatgtgctactgcacattattcgagagactggaaaggtgagtaattgagaactaggttaggaataaacccaatcaaatctctttttgcccatttcttcctaaatcaatctatgttatattcacttaaaatccaagcctcttttgggtatgccttccattcctggttaacatgtaaatactgcatttaatgatcaatgtcattcagttggagattttgtagatgctccttttcgaacataatatcctgcatgtaggttaataaatgagtagcctaacaatgcataaccagtacttgattatattggtggtaattgagataaattgttcatagttaatgttcggatcagttgaaagatttcacttgtagaaatatatggaggaataattttatgataaaatggttaagggagagagggagggttttgtttcaacgttagccggccaaacaattccatatatgggaaacatggttatgtttaggggcaagtgcaatcaccacagttcatagtggatggccgatgatgtcggaacataactctggagttgaaacttcaatatatttctgcgaaatgatatattccacaggccataaggtggtatgcttccattagtacatggcctcaacttaatcttttcagtgagaaactggacaaacatttctgttactttagtggcgaactggcaaaatagaactttgtaatgctttggtgaagtagttgaggtgcctcaagaatcaagatcagccaaatgtgtcttcttctctaaatttctgaagtacaaagtctttccttgcattttgcatgtctacttacgcgtcttggattgcactgcattgcatgctaatcatgtttgttactccagtttgcaggataggtgatgataaagcataatagttgaccaaactcgctgtacttctccttaatcaattatgttacaaagaaatatggtgtggacacatcaagttgccagtcctgaaaaccaagttcaacctgaaagtttctatcatggaggtgctgggagcaacttatctaacctgagtgtgcaagttgctgttggagttccaggaaatactgatttccggagtcactatgagagcattaatcttcagcaccagcatgttcagaatccatacccacatgtgggtgttgcttcaagttctgtgttcccatctactatgtacaacccctgcatatcaacaacagcagtggacagatatgttcctcctattcaaagttttggattgggcaatccactactactgcctttatatcatcaacttgctcaaggatccatggatgagaacggcagcagtggcaatttttgtgacagcgtcagggaatttatcaagaggaaaaatgcattacttgtgggtggccatcattttgttaatagttttgcaagctcaagctcatctgcttatgtgcctccaaatcctttacataggtcatggaacgcttcatttgaagcaaatatcctacccagcactggagtttccaatccaccagagtactcttctgcagattcactgaacaattccaattcgatggcttcacatccagaattggtgcatcatggcaattatgtatttccagctggtcacatgagccaatacaatgcatggattgcacaggcaagcagaactggtggagtaccacagtgggaacatggcaatgcagcggctaatcctccaggtaagtaaaccttgtaaatagatcaagtggaagttatgatattttttaaaatgatggtttgagggatcattttatggttagcagtggatttggattgctaaaattgtgaattgggaatagaatagaaaatagtgaagtgagtgtgatttgaatttgtaattggaaaaccttgctttcaacaggtggatttgttcattctggaaccatagacatgccaaatggaggtcttcagggataccaagctggcccttttgccaattattatgggcctctgccccatttccaccaaaatcctctgaatagcatgcagcatcctgctctatttaatcatatccaaatgcaagtacctcatcaacattgcctcagtaacaatttattgcatcacccttctggcaatggcctccccttggatccaagaattctggcaatttcatccaattctgggcatacctttgggcctacagctcagccatctttagcaaaccaagttaatgctgggagttcgagaattcagccatatgaggtgattcacatttcctctgttttcctcatagaacaatggcatatataactaattagatgattaatgctggatgatatatctgatcactgttttttcaacagttcctgtttttcaaactggacaatactaaatttaaaggatatcagaatttagttgaaaaatatcacctgatattgttcctggtacaattcatagtttttgaaaccttttaaggtttttttttccttgtgaaatgatttaaacatacattggctgtcatgttccagaaattaaattccctcgctttcttagcaaaccatataccatatctgacttttccctgcaacctttttatcttgtgtaccttttcctacaaaataaatgaaaacatatagttttcattgcggggtatataatctgcctattgctgtgcctggcaacctgctgaccctagtttggaaattaagtacctaatgctcagttgtttttttttttggctatgcataccatgtacatgaaaaatggtatccttggagttggctcactgaagctgaatgcctactctctttttttcgataaaggaagctttatttgtttcccatttgtgagccattttgtaattcatttcccattaatacggatatatgaagtaataaatttgtctctatagaatgctccgttcgtggatctttcgagattgtatgaagcaggagttattgatgaacatagagatatgcggcttgatgtagacagcatgacttatgaggtatggaatggaatgttagctcatttgggttgtgggttacatttagttgatagatttatttgctttcttctcctacaggagcttgtagcgttggaggagcggattggaaatgttaatagtggttttacagaaagctacattgaggaaaatttgaagtcaagttcttatgtcccggacgctgattgcatgcctgatcagtcttctgtggagaaggatgcttgcataatctgccaggtcttcctcctttgtcattagtctattgtagttttcactactgtatataaatttgtatatcactagctatcagatgcatgatcaataccacaattgttccacaataatgataagcttcactcactatttttagaaacactacttttgcgtaagatagtgtacatatatccagttagttttgacatttgacagcaaagtagttaaatatacatttgcagccaatacatattttatgtttaaaaagggagtttgctctttgctatgtaggaggaatatgaggctaaagaactcgttggaacccttggttgtggtcacaagtaccatgcgatgtgcataaaagggtggctgatggtgaagaacctgtgccccatctgcaaaacaacagctttgccagctgatagaagaaacggatgatggatgccaataacatttattggtcatttgcagcaacaaacattcagctcagttttgtacataagacatgctggataatggttgtgcctgtatttccgttgttgtgatacctaaagctgtacagtgagaatcgctcatcttgtagattgttttagacactaaatgttccatgatgcgcgaacagctatcatcatggcatagctattagatcgctcaatttttccctttttattgtacatgatatttatctttattcttttcccaaaaagaaaaaagagaacttgtagttcttctgtacattgtgaaattcaaagaactaaaggagtttctcagctctggagtgataattctatagcagggcaatctttgttttaaatgtgcgaataatcattcatgcaggtatttaattgttcccatgtattttttttttgtttaaccaatcggctgtttggtttgaggattgagatggtcaattgaccatttgattctaaattgtttgtttcgtacgaggaataaaacaggtttgttcatcacttcattcctcaatatatttaaagaatgatcccacgatggatcttcatcctagatggcctgaatcctcaaaccaaacaactttctatgtgataaactgagaacattttgattgttccatgtcaaatgtacagcattacggatacaatgcaaagcaagcatgaaaagaacaagcatgaaaagaactagataactgtagcagcaaaaaattcatgagtagcagtctagctagcagaagagagaaactgtacagacaatgaactgtgctactgaaaaatagacagcaacatataaataaatcaagcggtcaaaccataatagaagcaaacaaatggcctgtatgaaaatctgacggcctcacaatttcatatccctaaactataccggcaagattatgtcctgaatgaattaatgtttcaaatggcaaaacgaaggagacacttagtaacacatgaatacagatgaggtctatgaatgcaataacatcctgtgtcctactgcatagtatcaaccacctcgggtatctccatgtttgtcaagtcctttcgatctacgctgatgaacaacaagcagactttttcactgcagagacatcatctttgccaccaacattgatggtctgcccctttggtggtgcagctgggtcatcgccgatgtcaagagccttcttgctcactacatgatatatctgggtgagcacttcagtgaaggcattctccacattcattgactccagggccgacgtctccatgaagaaagtgttctctttctcagcaaatgctttcgcatcctcagtcgagacagccctaaggtggcgcaaatctgccttgttccccacaagcatgatcacgatgttggcgtccgtgtgatccttgagctccctcatccacctctccacattctcaaaggtgacatgtcgcgtgacatcatagacaacgagtgcccctactgctccgcgatagtatgcgcttgtaatagctcgatatctacagaagcaacacaaaattatgataatttgctgtgcaggaactaattaataaacagcaaaagcgcatgaaacaacattccatcaagcacagcaggcaataatatgccgcatactccatgactccatcaatctaactgttcagcacaggggattggccataaagaactttttgtccccaatctacacacttcctaactccatgataatctagatgtctgtacaataacaatttcctatgataatctagatgccagtacgacaacaacctattctatgccaatgcctggtcctacacaatctttgcctacaatatcttaaaatttatataaaaatgtcatggcctggggcattttagggtgtaatcaaggaagtctatgaattgaaagaatgccaaattatcactcttcttcttaatcctacacaaggatttaatcacgccaatcatatgagcgcggcaattaaatatcacccgaaatcagagatccacacgagagaaacccactaatcgccaacgattaacgaatggcctagcctaatctaacaagcagatcaggatgagcggagctcgcgggggcacaggcggatctggggtggtgtttacctttcttgcccggcggtgtcccagatctgggccttgacgaccttgtcgtcgacgtggatgctgcgggtggcgaactcgacgccgatggtggacttggactcgaggctgaactcgttgcgcgtgaagcgggacagcaggttcgacttcccgaccccggagtccccgatgagcaccaccttgaagaggtagtcgtagtcgtcgtccgcccggtacgccatcgttcggtcacaccccccacgaactcaaccttctcgccgccggcgctgcgcggcgagggggcggagcggatgggagcgaagggcggagggggaggggaggggaggggagagcgtttgtcgcggtgggtgcggatcgatctcggtctctcctctccccaacttttttgggtggctttgtttgtgcgggaagggaatgcagttggttggggttgggttgggttagtcgcgcgcacgccgaaaattcacgggcaaaaacggctcgttttggtcttttttgtgtgtgcgtgtgcctcctgcctgatgcggacgcggttgggttgggccacgttttctttcaaacaggctgcgttcgttcgggtaacatttgagggagataacatcttgtttttcgcgcgcacgctttctaagctactaaatggtgcgttttaaaaaaaaatcctatagaaaagttgcttttaaaaatcatattaatctatttttgaaatttaaaataattaatactcaattaatcatgagctaatgtctcacctcgttttgcgtatcttcccaatctcgtcaatcaccttctcctcaaactcaccctaagttaaattgcaaaaactactccattcatctcataatataagggattttgggtgaatctggacaagaagggaggatctcataaattattttgttactaatgatatattatatcacaagttattttgttacaaatgttcatcaacttactcaaatttattgcaaaaatcactctagtacgtgtgcttaaccgaatcagaaaatgtgagccatcaatgttgttttaccaaaattaaatacttgattccacggatagaaatgttgagaaggatttaaatattatcgcactaagttttgctatatggagttttttaaaaaagttttgctatatgcaaagaaaaaagttcaatcaaatatgaaaaaaaaagtccaacgcaagcacttagaaaaagaacttaggtctagttctttttctctactcaaaacttcaactacctcgttttccgttagcacatttttcaataaatggtatgtttttgacaaaaaaattctatatagaaattgtttttaaaaagcaaacaaattcatttttaatttataatagttaatacttaattaatattatgctaatgagatttctcgttttgcttgcaacaaaaatatgtctccacaactccatatggaacagagccggtatgcagtgactacatagcgaaaggtttaaattaataaacggtacattttgtttagaagttaattttaaataatagataaatacatttttttagttttgtaaaaattaaaagttatttaattatatgctaatggttttttctatcctaacctcacctctatcttcggtagaaaccaacggcaccttaatcgcgtgtgtcaaatcacagaaaaaaaattggctcgtttgggggtaattttcgggcgttttcgcagggttatacatacggcaagcgaaacgcgtctgaagctgcgccgagtcaaggttgtcgacgtcgagaaatcgaaaagtctctctcgctcagaacaaaccgataccaggtcgcatcagcaacgcggcagcgcgcggcaaagtgagaattgtgctacgaagtttggaacacgcttgcttgttgttggctgcgtgctacgtaccacgtaccaccgcgcaccgaattgaagacgaaaaagaaaaattcggacgatcgagagtaccggcacacgatcgctaccagacaagataaagttttccgtgccacggatcaactcatggatcgatcattcagtttggagtaacaaaaattacgctgtggcgagatcgaaatgcatggagcagagaggattccgcgtcatgggccgtgccgcatgtggacgcatttggtgcttgcctgcctgcgccttttctgtttctttcctggccgtgtatcatcttacgccacattgttgtatgcagagtatgtatgtacatatagtaggagtatagtaatacacggtagtactagtataaaatgctacacagcgatttcccaaacgtatctggccatgcaagcattcatgtgttccccggaagtatttacttgggcaacccatgtggtggttagcagttggtgctcctctacctgtatttagctgcatgcatgagaatatatacatactatacagatcacaatttcagtcgacactaactcgatccagctagcgagcgcttcactgcagccaggaaggaaggaggtaaacgtacgttaacgatgtgtgttaatttgcctgcctcccacgtactactgtactacaggaacaaaaaaaatgtcgcgtctggcacggcaacaggcagggagattcccgacgcggatggcttgaatggtgtactggagtaggggtggcccgaccgggttggtcgttccttcgtcccgacgtgcccaaatccccatgtatatatgtgtgcattggcaatgggcattccattgccatggctgtggtcctggtcccccaaaaggcagtcccaattcgtgtctcgcccaaaggaggcaagcctgtcaggcacttcagcaaaatggcacgctgcctagcttcgccgtgtctgcatccttgcatatgcatgctgccatggtgaacacgctgttatggcccggcccagccagcccaaagatcgatcggttgtgcacgcacagccgggtgaaaacggaatcagaatcagtagcatctctttagaaacgacgatcaaccggtaattgattatatttaccattttaactactactaagtattgatattaatatgataaaaaagatattagaaaaaaataaaatgtaaaaataaaaaaaatgatatggttaaaaacggtacctaatataaaaaatagtgattgatcgatcgagaatttccgtagttcatccctatccacggatgaaccgtgaacgaaccaacttcgacgagacccaaagataccggggaaaaaagaacacatcagagcgtgcaaacgtgcacgtacccacccagccacccacggacccgcgcgccgtgtggccgtgtgtcgcatccacctcgagtcaatgccactgcaagacacgcacacgtacgtacgcgcgcatcacacgtacgcgcacgggtgcgtgcggatggtgcggtgcccggaatcgcgctgctccgcaattactccgaccccaatcagaaggcctcctcctcggtcgcccaccgcggaagggagggaagaagcaaacggacgcgcgtgcgtgcgtgcgtgagatccggcctggctacctccggttttccctcggctcgtatcgtaggccatcatttactctccctctccctctccctatgcagcgcaggtctgcagtttctgcacaccagctgcatccatgatcgattacaatactctactgcacccactgcgtatccgtcgaagtatgcattgcatctcgtcttcactggccggcctgcatgcccggcacttctcccggcctcccgttctccatatcgtcatacattatatatcccccacattgccatttaataccaacaagaaaccatcggatgatgactatgacggagactgagagaccgtgcgtgcaattgctgactcttgctgcgtgcgactgcgagaggaaacgggagtagtacgtggtagaatcctatcgatctcgatcgatcggtcggtctccgtctgctgctggaagggagagacgttgatcgatgtgctctctttcgcgtgtgcagctacgctgaattgaaggggagagggactaggagagagcatggtaagatgggatgggattgacgctgtacatgcacgttttgacctttcattggaaggtctacggtgagagaaggatatgcatatcagaagatggtgctgataagtgataaatctccaaattgttcgcagcagacttgatctatcgatcgggatctagggtgtgtttagttcacgtcaaaattaaaagtttggttaaaattaaaacgatgtgatagaaaagttagaattttacgtgtgtaggaaagttttgatgtgatgaaaaagttgaaagtttaaagaaaaagtttagaactaaacaatgcctagtcctatcattgcattatcagagagactcagaggaaatatatcaggtttttttttttgccgtaatactagttgctctctcttctttctttcttttatttttttgccaggccatatcaaaaaagcattctgattttccttttcagcttctaaccattactgcatttcgtttttttttttgcccccaactgattccatgtcaccttccgtcagttaaccgcggcgttgagagttcaacgaacagtgccagatgatggatggtacagaccgtgctaaaaacaaaatgaactgatgaacgctactgacagtctgacacagaaacaaaacacaacgtttcaaaacaaaatttagaaactccttgatccagtgatacagatacggtggtacgaatagtagttgcgattggggttaatctctagcacctcctgatattctcccatgcaaaagtactggtactaatagaaggccaggcagaaagtcatttgccttgtcttccttccttgacgatcgaactggacgaatcaatcacacctactagcgcgtacttccctacctgatatagccaccaagctatcaacagtgtaggcaggcaatgcatgtttgtatccatgatgggagtggattctaaactattagggcttcttcggttaatttatatgagggagagattggagaggagactaattccatacctattgtagtgtggaattattccccttcaatcgtcccctccatcttttcaatcccctctaaaccgaacaagacttaagaggatatcttttagttgtttacatgccatccaaatgattatgaaaatatttgaaaaaaattaacaagataaattaatatgtaataaatcattctatggagatgcaagttaaaatctaacttctacaagttgcaacgaaaaaaaattaaactacggttagtcagttaacatatatacgcaatcaaatttattttttgttgcaacttgtatgagttaaatttgactttacatgtttgtggagtgattcataacatattaatctgtcttgttgaattttttaaaaaaattataaccatctgtatgacacgtaaacaatgaggggatgtccttacgagagtttaaaatagttccccatccattattccacatatccacaaccatttttacgctgcaataatgtatcatttcaattactacaggactgtttgacggagagctctggagtctaagaagcagccgaagagaattcagcttgtgagaatggagaaaacgaaaaccatcttatggcttctcatgtattttttgagttctacaactacaatttctcataatctcgacgaaaagctgaacggttaggaacaacacatgattctcggagaagctctagctaccacaagcttcccaatagctttcactcttcatgtacttagtctatgcaacaagattcaacacctcccccatctcatcagccatcactgatctagctccccaaggtgcacatcaagtagtccaagggagcaaaacaaaaggaaggaggaagagtgatggcattaattaactgtgctgtgtaaccctgcacacatgtactggggtaggtgaggccattataagcttagcttcagcagagacaggaatactacacaggaagaaagccatagccagatccatagggttcttttcttccccctcactgttcttctacagacttcagagttcagagctgtagacgacgacacacaccggccggccggccccctactccctctctcatcatctcgccatcatccatccatctgatttgatcgttcgttcgttgcaaagcatatctcgatcgccagcagcagcagcatggcctcaccgaacaggcactggccgagcatgttcaggtccaatcttgcctgcaacatccagcagcagcagcagcctgacatgaacggcaacggcagctcgtcctcttccttcctcctctcgccacctactgctgcgaccaccggcaacggcaagccctccttgctctcctcaggtagtacatgcatgtcactgttcagttcttgcctaggttagggtttctttggggagttcttggttaatttgatcggtgtaatttgcagggtgtgaggaggggacgaggaatccggagccgaagccgcggtggaacccgaggccggagcagataaggatactggaggggatcttcaactccgggatggtgaacccgccgcgcgacgagatccgccgcatccgcctgcagctgcaggagtacggccaggtcggcgacgccaacgtcttctactggttccagaaccgcaagtcccgcaccaagaacaagctgcgcgccgccggccaccaccaccaccacggccgcgccgccgccctgccgcgcgcgtcggcgccgccgtcgacgaacatcgtactcccctctgcagcggcggcggcgcccttgacgccgccgcggcgccatctcctcgccgcgacctcctcctcgtcctcctcctccgaccgctcctccgggtccagcaagtcggtgaaaccagctgctgccgcgctgctgacgtcagccgccatcgaccttttctcgccggcgccggcgccgacgacccagctgcccgcgtgccagctctactaccatagccatcccacgccgctggcacgtgatgatcagctcatcacctcgccggagtcgtcgtcgctcctcctgcagtggccggcgagccagtacatgccggcgacggagctcggcggcgtcctcggctcgtcgtcccacacgcaaaccccggcagcgatcaccacccacccatcgacgatctcacccagcgtgctcctcggcctatgcaacgaggcactagggcagcatcagcaagagaccatggacgacatgatgatcacctgctccaacccctccaaggtgttcgaccaccattccatggacgacatgagctgcaccgacgcggtgagcgccgtgaacagggacgacgagaaggcgaggctggggttactgcactacggcatcggcgtcactgctgctgcaaatccggcaccacatcatcatcatcatcatcatcatcttgcctctcctgtgcatgatgctgtctcggctgcagatgctagtacggcggccatgatccttccattcaccaccactgctgctgcgacgccgagcaacgtcgtcgctacaagctctgcactcgctgatcagttgcaaggtatgtttaattattagtactatgttcatgcatgcacggatgcccctgcaaaacaaagttcaattggaacaactagccatgcatagcacattcatggtcatgttgcaagtcgtactactactgctactgcttccccgtcccaagatataatcattttttattctgacacgatcttcgagatgctactttgaccaacaacatctatataaaagtaagatgttttaaataaaatgagttgcatattatgataaattatttaatgataaatttaataatatcaattttacgtggttgatatttctattattttgctattaattaatagtcaaaattaaaaatatttgacttgaaaatatgctaaaaatatttatattttggatggatggagtactatactctggccatagctagtacaacttgtctcttcccttttttgttggttatcatatgcatggattggatgctagctcagcagtttgcattgttcatgtttgtaagcatgtgcatagaagtgtctcctcacggggggtcaccaccaagctcagctcagctcagctcagcttggtgtagtgcatgaaacgttgtgcatgcatggccatggccatggctagctatggcctgtctcgatctacctgcaaccttggctctagcaagccttggcataattggagaaagcagagagtactcttgccgccctgatgattcgagtaatggctagagacagtgcaacaacgtgtccttttgtgtgttagctttgaacagttgcagcattggattgtgttgcattgcgtgcagccacaacagtgggcgtttatatgtagtacacggttggctccaatctcgatcttgcgatcacatgggaatgccaacagctacatatgtacgcatgcatggttgcaggcaatgagacaaggttaggctatgtaaaaatctcctgttccatgcaccgatcttgtcatgctatatgcagcatatatgctagctgttgatgcaaagagggacatttccatgacagaagggtagagggggacttggcagcttgtatgtgtgttatatgcatatgcatgcacgcgtagatctaggctgttgaaactatagcatagaaagggccgataactgtgagctgttctagccccccaagagtggacaaatatggatggtttcactaagaaagagtaattatattggctgttcaatttcttgatgggaaagcatcacatagacggatagacatagaccatgcatgcacatatctatatatatggtactcctacattccacacacattttgggtgtattccaaatgaacacttttatgtcatgaaaacaacagcaaattaagcacagaacacgttatgcatcttgagcatctaggagtgtagtacagtagttgtaacttcgtcacacaaaagacttcgtaacctggataagtacagctagcttgttggttgttgccttgttcacagttcacatgcatagtagaaccataagctaaccgagagaacctagatattaactgagaaattaaagggtcatgcatgatcatgtattgtacaatatgaaagtgatttcatatccctcgagagttatcccatcgttttgtgtatgccatctaaatagtcataaaaaaatttggtaagatagattaatataaaatatatcactttataaatatgcaagttaaaattcaacttctacaagttgtaacaaaaataacaaatatagcttattttgtttttttggtaacttatagaagttgaatttggtctataaatctttttaaaaaagttttataactatttaaatgacatgtaaataatgaggacgtcccctcgaggatgaaaattcatatccattgtacagtatgagaagagattagatgctataaaatatttataaaaaacaaactgaaaaaataatagatggataaattaatcatgagacagaacaaagagtggagtatcgatcaacagtgtcgtagtccagcttaggtctgggacgtggatcgagatcataaatggcacccttgtatggtcatgtcgcagtgcttcttttcaagaggcgataccggggttggggtaaaaagatctatcgaaggcttttttgatcaatttgcatgcgtacgttgttgaaaggattgaaggcgacggtgctcaatcaaaatcctctcttcttggttgttgctgctcgatctccaagcaaacacttgacttgaaagctggtagctctatctttcagggcgtttgttccgagattggacgtgtgcatggcatccttcttctcaaaaagatgctttcaacatcgcctctctctctggcttggatttccgcatgcatagatatgctagctttttggcagtcataaacttgccagaggtttgaatagcagactgactttttgcatgcacagatcagattattggtttgaggtttggaataggagagttttatataggattgaagtatatgaatttttcccatatgccgccctttggtttgaagtttttgagcgaaaatttttatatccttgattttttttttgaggatttcaaatgtaagctcaatacaccatcgtctatcttcaatcttcatctctccttgcaactatattctaatagtaatattttttcctctaaaatttctctaaatttcatgcaaaggatctgaatgaccaattggactagttgttgtgttttcagttcgtgtaagcctatatatatatacatatgtcatgacatcccggagtcctaaagatgttaattaaatttggtttgaatatataggtttaattaaagtttggtttgaaaatacaattccttgcaagctgcagggctgttggatgctgggttgctgcagggaggggcggcgccgccgccgccctcggcgacggtggtggcggtgagccgcgacgacgagacgatgtgcaccaagaccacgagctacagcttcccggcgacgatgcacctcaacgtgaagatgttcggcgaggcggccgtgctggtgcgctacagcggcgagccggtgctcgtcgacgactccggcgtcaccgtcgagccgctgcagcagggcgcgacctactacgtgctggtaattaaacctcaatttgctcacattaactcatataatatgtcgtgctaataaataatcaaaaaattaactagcattttctcgagctaattaattgagtgactttacagtcgttataaagagaagttatcatattttctaatgtaaaatttagtaactctcgttatcttcagtattattaaaagatatcaaaatttgcattaaaaatattaatacctattaagtactataaaattactctaattaatatgtggcttaatttatttatcatttttatgtactttcttatgcatgcaggtatctgaggaagctgtgcattgaagccgtattaccttgattacatccacaattcggcactgatcatgcttgctgcatgcgatcgaatcatcgatcatctaagagattctaagttaattagtaattcgctcactagtttggtaatagctagctagcaaccttcatcgatctgttatttcattcagtacgtacatgtctacttaaaatcactgtcgtgtagtactgtacgtgttttgctcgtctgatcaaacagcaacatgcatgacggttttaattttgatgcaataaccagtggagtaaaccacataaatctatcattgcaagcactgaaacttttggactctctttgaagcctgaactctgaacatgtatacatgcacggcgtgcatggatggtctgctgaaaactgcacacgctgtgggattcagagagaggcaggaagggaaacgaaaacattggtatggtctgcagggcgcatgcatgcagattcagagccttttcgcgcacttgaatgcatatgcatgagttaatttgcacactgtggacgcaggggaacacaagaacaatggcatgcatgcatacgtttcgtgtagggcagctgctggctagcttctcccgtacagtgtgctcgtgcgtgtgtgctgctagctgggaaagtgaaatcatccctcgatatcttctcgtttggtgcatgtcacctaaatagtcaaaaaattattaaaaaattatcaacatatattaatatgaaatatattactccacaaacatgaaaatttgaattcaatttctacaagttgtaacaaaaataacaaatatagtcgaatgtgtgataactgttttcagtttaatttgttattattgtagcaacttgtagaagttgaatttggccttgcatgtttgtggagtgatatatttagtattaatctatgttgtcaatttttttcaaattttttagtaactatttagatgacatgaaaaaacgaggggatgtgtcctcgagggatgaaaatccacatccgtgctagcttagctttcaccggtgaggttagctagcaggcaggcagacaggcacagggcaacggcagccagagccagggctgggctacgcagaccaactctctgtacatgtttaacatcactcgctcgcttcctcagaattaaaagcgaagctttgtcgtcagtaaagtaaacagcgggaaagtctttttagaacctagctagccaccatatgcttacatcaagattcgggcgtagagctcaagtgaaaacaatgttgcgagtgagaaatatatagcacgtatcacgaaagagaatttaatagtttttctcttaaggtacctaaaatttacactacataattttataccttgatatacttaatgtttatgtaggtaacaaattttatataaaaaatatgatatattctggtatctttttaaagatgataaaattatccatatacaagcgcgctaggtgcatccagtaaacagctactagcacgagcatgagaggtgagtagctcgtatgaattgtgttaagggtataatcctatgcatgtgaatggttagctgcgttggtttttgatggaatataagccagtcgtcattgctaagaatttgatcgagttttcggtgctaaaaatatgtccttagaaaatgtccataaattaaagagtaaacttcactctagcttgtgtatactgatatatgttccgtaggtattactactcctttatttattgtattcatactagattattaattagctgattatggatgtaattcctccgttcaaagatgtacttctagcataataattttgtctcaaaacgaagctatttcttcactcactctttcctctcaaccaatcacaaccattccctatttaattttttcacctactttcttttctcaaccaattaattacgatcttccttcaattaattctatatacttttttaatatccgtgctaaccggatgtagtaaaaaaaaaggcaaattgacgacgatgattacgtgtacagtacaaatttaacctctccgatattcatttctaatggcctgcaaaaggcctcaaaatgaatactatatacatacatgttacataccttgaacaaatcccctaaataaatgcagaataagttcgccttgggtctctctatttgttgtccagtccaattttcgtcccttgaccgcaaaaccgggtaccttccgtccctcaacttagaaaaaccaggcaaactttgtcctatggcagtatggtaggcggttttgacctatgtggcgcattgaccatcccacgtgtcgcgctgaccacgtttctcctcttcttttaccgcgtcgctgcgtcggcgcttcaggatggtcctctcctgcgtcagcgcggcgggagcgggagcagcggaggacggcaaggacagcgggagcgggtgccgcggcgctcgcggcggaggacggcggagtgtggcccactccagcacgaagatggcggcgccgaggccaccgacgagcttaaggatgacctcgccgtcctcctcccggacgtaggaccgcagctcggcgaggaagtcgccggttcgtgtaaaggcgagcaacgtggcggcgccctggaagatggcggtgaggacggcgggagagggagcagcggaggatgacgaggacggcgggagctgccgccgcggcgcttgcggcggaggacggcgaggacgtagaagccgaagccctcgtgcgcgatggcggcggtgaggtcggtcccctcctcgaggggggtgcggcgcagatggaaaatttggtggtctggtaatcgatcacaccaagaagaagaagaaagccaaaggcaccgtcattggctcctcagctctggagcagctatcctctgtgccggaggtaggatcaggtgcactgtcaggatgggattagttgtaatgagctgcgagtctgatgattggcgattaatgctttatggaatgttggaactccttatttttcctttatttgcaaaccgagcttttgtatgcaccatctgcttgtttttgtcactttaaacgtgcaaactgactggaaattttgtagaagttcaggttagaagttttgtaaaagttcagatgatggggagcttaatttccctgaactcaacagtgttgctgcttttcatcctgttcagcaaagacgcaacatttcgtactagttttttctgaagatttgctttgcaatacattaagagaaacagaaaatatgctgggctttcaccagatacatgatgtttgaagatgatagcaaaaatctaatctcatcaagtgatgtgtataaagagggcaatttctaagataaggcccagatatagcgcgagaattggattatacaacatcgtaaacaaaatcccatcttcatgtccactacagatcattgtgtgtcggagcacttcaaaacctcttgcaaacaaattcatatggaggaactttatcaaccgcagaaggagcaagtcaataactccacggccgtgggcggcggcggcggtggggggaggcacggcggggtgcccgctcgccgcgacgctggccgatcctggcggcggccgcgtgctggtgctggagcggggcggcgcgcccgcggagttcccgccgctcgccaccgcgggcggattcgttaggacgctggccatggcggacccggcgcccgagttggacgcgcccgcgcagaccttcgtctccgaggacggcgtgccgaacgtccgcgcccgcgtcctcggcggcgccacctccgtcaacgcgcccatcctgttccacaaccacggcgagaagcgtcagaggcgcaacgaggaagaagagggagagccgagaccaccatatttatttttttatcgctgacatgtgagccccgctatttttaaattattcttttgtatgtggctgacaggtgggcccatggtttttattattttttcaagatataattgccacgtaagcgccacgtgggacggagacctagtcaaataagccacgtagacgccacgtcagccaaaaccgccttcaaaatcaccgagggaccatatttgcctggttttcataagttgggggatgggtcgtacccgaatcagcctggacgacaaatagagggacccaaaataaacttattcaaataaatgcatatacacgctaaagaacaaccaatcttacggcccatttgtaaagcccaaatccccccaataatccagcccaatccccaggaaattgatttaaactgacttgggctgtcatccccatagattgacccttccaattgggcctgtagtctgtagcagtatcttagacttcagcacttcggatagctacctagcctagctacttgaccatctagcttaccttgccatgaacacatcactagctaattaattgatcatcctcttaattatacaagaggcgggaacaaataatcccaatactcgccaccaatctcctcgaaatcgatcactcctgcgtcacttttcgagcattcttgcatcgaaacttgatctttttctgaagcgaacgacaccatgtgatcacagttcgtcgcggtctgcacgccggagaagacgacgcttcttgctgcggcatcggtggtggtgttcgctctcggcctcctcctgcggcgcgcgcgggtggaggtctgatcggaggaggagcggccgccggcgaggtcgcgctcgaggtgcttctgcacggtggcgagcgggaagttgaggtgggcgcggtggccgcgcatgcggagcgccgccatgtcgtacgccagcgcggcctcgtccgccgtcgcgaacgtcccgagccacacccgcgcgcccctcctccgcgtgtcgcgtatctccgcggcgaacttgccccacggccgccgcctcaccccgcggtagctcctccgcgccgcggccgtcgccgtcgtcctgtagttggcgccgccgccgccaccgacgacctggttgtgatcaccgggggaggcggcgacgagctgtagctcgccggaggattccgacgcgagcgccgccccgctgagcagcagctcgtcccactcctctgcgcccatggatatccacctccccaagctcggcaacctctgcaagatcgccgaattctcctcctgaccggtcaccgccgacgacgacaccgccaccgacgacgacaccgccggcgacgacgacgacgtcatgatgctggcccacacgttctcgagtatgttgctcgtgtcatgaggctgattggaagctggagccgctccgatcgccatgaccgatcgatcaagctctgaagattttttctcttcttcttctgaagattagcacagtccatttgcaccgtgcaatatatatctatcttgatcgaggtggctgtgtcatagctgagctgacaatggctggctggctgctttgccgatttctgacaaagcaagtcagcgcgtgtggctcgtttgtgaagccagctaaggaatttgcatgagagggagaattcggtggcctgaaaatgagtgaacccgaattaattcagtcgcggcgcaagatctctgcagaaatccagggatgttcacgcgtgcatggtatcttgaggtggttgattttgtgctctggaatgcattcttttctccagcttggttgaccagatgcatggctaccatgtaatgcttaggtcagctccagtgtttcggagttcagatatcaaagttgcaggtgttctcgttaaagaatttccagctcatattcagaatgtcctttaagaaaaaggcatgtattcagaaaatatgtacaaatacttctttgggcacaataaatgtatttgccatttcattcatactttcattcgtgaaattggtgcaattttgagggagatgagtcatgtgaattctgaagagaatttgacacattcatgcatggcaaagtattttattcttatgtcagccatgtaattgcactgttgcagtactagactattggttatgacatacgacatccccatcgattacacaaaagaactatattaaacactaaacattgatcaggagcaaagcatctccttaatcaaattccttaacgaacaagataatcacataatgattgcgtcatcacaatagcagaggagggtttctttcctgaatccagttgcttgatctgcttcacaagccatgcatgttcatgcgtaccgtaggcgccgcatgcattcaggcacaagacccacttgttcctatcattgcatccacttgttaaaatcattgcatctgaatcgatctgtgggtcttatctttgaacacgctctaatataaatttataataatccttacctgacaagtcaaccgagctgaaaatatcactcaatccgaacaccgttttcaattcttcaggctagcatgcaagtcgctttctgataaaactgaaacagcttagtttatctgaccgcttgatcttgaagctaaatactagctaactaggcaccgtttagtataatctggagtttggggctggaacatggaagcagtgtggttgaagcctgactttctggaggaaatcgcgtgtttcccatcgttgcattgctcgtacgttggagcaggagatgtcacaagtgataagatgcttctgggtgcaggaactgaccgtgatatgctgcgatctctgatggtggccattgctcgtccacaaagggcagatagcttgggcaggttggaacagaatgttttgtgatcttttgcctctgggtcaactcatgcagtaatgcatgtatgacgcgatggttagcttgctaattggaatcgagaaataaaatgagcatccattttcacaacaactttgcactaccaagtacaatcgtttccgcaatcttcccgaactgcaaatcagggtcttgaaatcagcccaaacccccaaaaccactcttcatcgtgcgtggtgagttttgacttgaaaggccacacatttgacagttcagattgatgaattatctgatttttcctcatagctatttgagagtataaacgagtgaattaactattatgaaatagaaaagttgctttagaaaaatatattccaatatttattttacacgaaaatgcgttgattaatagcttgggaaacatctataagaaaatctaaaatatagaataataaaagagaacagggcataagccagtcataataaaagagagcagtctaagtcaatggttgtgtttagttcacatcaaaattggtagtttggttgaaattagaacgatgtgacggaaaagttggaagtttatgtgtgtaaaaaatttttgagtgatggaaaagttgaaagtttgaagaattactttggaactgtccaatatctcttccatttttcagacgaaacgtgtagctttattttttgatttttttaggctaatctgaactctgaaggcagtcatatggttgaaccggcccatcaacacaaatacaccatgggctcgaaccataacaagtcaagccagaacaaggcccacactatcatgggccggatcacggcccatctaaacaagcctttccacaagtcagcgacgcagtctgctctttcctgtcttctcctccacctttttatacaacgcaaatcgcctcgtcactactccgtacaaattttcttctggatcccacctctgctctgcccattcgacggcaacgcgctgccgcgccatcgcgccacgtcgcctcgtcttgcctcgcctcgtccaaggtcaacgagagcatgggaggaggccgggaggaggaggcggcggcggcggcgagcaaggtggggtactcctccggcgacctcccgccgtcggcgccgccgcacctgcagggccaggacccgcagcagtaccagtacggcaccttccagccgccgccccatcaccatgccgcctcgggcgagctcgcccgcccccccgtcgggttcccccagcccgccccgcctccaggcttcgccggcgccagcggcggcggcggccactaccaccaccaccatcagcagcagccctacgcgccggcggagccctactacgcgcagggctaccagaccgggccaggtatggccggtctctctcacactgactcctgctttgcttgtgctgctttgattaggtttggtggggaaatatggggaattgcaaatcgcaattggaaatttggaggtcttcatgagcctcacagcatcgctatgctctcaatttctcatgtccaactacaaattttcgatgcttttgtgcttgtggatgattcagaagcctgaccaatatgcgtgatccgaattcctaaccctcttatttctcttcacggatgggaaaacctacttagatttttgacttgggaaggaagatgaactagtcatcagctcaactacgacctggtctgctaaaatgtaaataggaaagtataaaccaagtttatggtaggaaaagagacaggatagctgatttaaacaactagactttcacttcctgcacacacgacgcacctttgatgattgaagtgttgctcatgacattggagaaactttgaggcgtgcaaattcatctaatttggtgaatttgaagtcagctgaatcactgaccataaacagattcagctgaatcttattgtgattctctgcccccccccaacacacacacacacacaaaaaaaaaagataaaagaatatcgtctttaacctcttattgtcgcatacacaatgatcaccatatccttctctatttttccttttgagataatgtaacttcagatcagatttgcatttattacattgaaaaacaaacaagtgaacccctagcatggaagtagaaattgttatatgatcatatggttcgtggtttctcaggttatggtcctattgctgagggaaggccagtaagaatgcgccgccttccttgttgtggtcttgggttaggctggcttctgtgagtgtccatgctttcgttattcttgccatactactgaagttaagtccaactccttaccgagtttatcttttgttcaaaaaggtttattgctggatttttccttgctgccatcccatggtatgttggggctttcatactaatatgtgtccgagtacatgactacagagagaaaccaggatatgttgcctgcactgttgctgtaagtatatttctactgatgcgctgcaatcacattgttatattctccctccgtcacaaaatgtagctatttctggctaagaatctggatcagaaatagctacattttgggatggagggagtattatcacaaatttagaggtgaatatgcaccttttgtagatggaatttcagtttatcttggatttttttattgtgaaccacatagaagtagagaaatgcagtcgcatggttatattattgtcaataattcagaggtgaacttggaccttacgtaaatgaaatttcacttcaccttggaactttcatttaactacatataaactactaggtcatcttctagatcatcactattgctttaaatataaattgcccacctgattagttcttcatagtagatgtccagttttttttgttcataaacggttgtgcttataacatgaattgccttcttaatgcttgaattgacttcgttttgaattcttctgcatcacaaacaggctgtaattgccgcaattgtcatccccttggggttaaccaaaggagcacacgtatggtgagctgcctccgagtttctaaggagtcactgcatgtaaatggcctgttattatttgagaccctgcactgggtcatatgatcatatcacttgtatatgtgtatggatggtaatatagtgagcaacttcagtgtggtaatcttatatcgaaccattggaccctcggtgttcatatactttgtaataaaggatcaatcatacaagaaccttaataaggagtaatatactgcgtcatatcagatcttaccctcgatgctgaaacgacctgaatattttcgtgttcatggataataataaatcaggtgagatgcatactcatatctattatattattaaaggaatagaaaaaggagcctccacgttcgctctcatggcctagaaattctcacattaatcggagaaaaagaaaagacagagttcatatagaaatacaatttagaaatagctaaaattaaaggaatagaaaaaggagcctccacgttcgctctcatggtctagaaattctcacattaatcggagaaaaagaaaaagcagagttcatatagaaatacaatttataaatagctgaaatttggaattaaaaaataaggaatattagaagaggagacatagaaatacaatttagaaatagttgaaattcggaattaaaaaacaaggaatattagaagaggagactagagtccatatagaaatacaattaggaaataactgaaattcggaattaaaaataaggaatattagaactagagtccatatagaaatacaattaggaaataactgaaattcggaattaaaaataaggaattttagaagtagagtatagagtccatgtagaaatacaattaggaaataataaaaatttggaattaaaaacaaggaatattagaagtagagtatagagtccatatagaaatacaattaagaaaaaaatagaaattcggaattaaaaaataaggaatattagaagtagagtatagagtcgatataggaatttaaaactaactaaaatttggaataaacataataaaattaaaagtagagatataaagatacaatttacaaataactaaaattgcaaattaagaaaaacatgggaagaagagtttaaagtcaatataggaatacaatttagaagtaactgaaattcgaaattaaaaattaaagaatattgaaagatgagtttagagttcacatagaaatacaattagaaataataaaaatttaaaaataaaaataaataatattggaagaagagtatagagtctatctagaaatacaatttacagaaaattcggaattaaaaaaaggaaatattaaaagacaagtctagagtccatataagaatatatataatttataaataactaaaatttgatagtaaaaataattaataactaacacttaatattatataagatataatatgaatattacccattagtagttttgtaaagttattgcaaaatttaaaattatgttgtcattttaatatatttgaataatataatgaggaaacatatatgctattatatgagagaaaatataatgatgctagccgcgcaatctgcgcgggccactgtgctagttgtagctaatccgaagtaggaataagttcaccggaggtctctcaacttaacagcgagattttttgaggtaccttaaccataaaaccagaaatgtctacccctaaacttactcaaaccgttcaccggaggtccctcgacagtattttttgtccgattttgctgacgtggcatcctagtcagcaaaaaaagtttaaaaagtacgtggagcccacatgtcagctgcacatatttttttcttctcttttcttctccttctcttctcttttcttctctcccctctcttctccttcaggctggcggcgggcgcagacgtgatggccgagcgcggatgcgggcggcaggcgagcgcggcagcagagcggtggcgggcggtgggcggagcggacggcgggcgagcccggcggcggagcggaggctacgggaggagcagccgcgcaccgtggccgccgtcgtcgtcgccgtgggcgaggcggcacggcgcggccgttcagcggcatcggccaggcgtcgcagtggccgtgcataggtggctcgaagtgccggctgacgttgcaccccagtcgctcgcgctcctcctgtgccgcggcagcggcagtggtggcgacggcagcgtcgccggcctgatcccatggtcctcccggacgcccagctcgcgcagctgtagcaggagcgtgtccacgctcggcgtgccatcggcgtcgtggacggtggtcggcgcgggcgcggtgaccctcatcgtcttcaccgacgtcgcggtagcacttgacgtcgtaactcatacgcatatacgccgggtacaaacggccgcatgtacatgcgtcttcgtacgagcatatatatacatgcatggagacgaccagctatagcctagctagcttcttgttggtttgccgcccgataacatgcaaacgtatatattagccaagcatg

SEQ ID NO: 9462 - DNA, 54095 bp, Oryza sativa
ttctacaggaaatggaagaattgacgagtgtcattgatagaaagaagaagagagaaaagaagcgtcaatcaaagcgccgtgcaaaggtatatcagtcatgagatatagatgctgccattgccaaatgggtggttaatttgagttatgtgctaatacactggtcttttcgttccaggataaagcacgcaaagcaacaggaatgcaaatagatgctacaggagataattacggcgatcctgatttgttttctataagtgctatcaaggttcatgctgtttctgtagtcatatcctgtgtggttcttaagtatttagtactaatatttgtttaaaatcataggacaggtgttcatttgcatggctataattttcctgaatttgaaagtgtgcttcttttctttgcacttgaaatatgcaacgttcgtgctcctcagtaaagtttcacttttattgatctctccatgcgacaatttcttagtgtggtagcctttatcagtattcacaaacttagtaaattgattttcgttatgttacgctttctcaaagttactttccagtatgagctgtatagtctacacttgtcttgtgtaatacttactatcatctaaatagatagtttgtgtcatttttctgtagggcggaaaagaactccaagctattgaatcggctgagcttaatgtagaagatgcccaaggagatagtgagaatgaggatattcaaactcgtgaatactctgatgaggaaatggattctgacgaagaacagcagaggtaaatttcgaaattaacactcaataaaacatacaataagccggtcataaatttttacaggttttataattttaccgcaatcccaaaaatgtgtaacatggtaatcttcccaaccaggtatgatgcccaacttgaggaaatgcttgatgaagcttatgagcgttatgtaactaaaaagggtggtgaagtgaaacaagtacgcaagcgtgcaaaacgagtaaatactgatgctgatgaagaattattagaggtaatctctgacacatggatcttgtctcaaccaaatgacaattgcatctttcggtctctctgcatgcaattggggtagttaattatgccaatttacacactgccctttatataactagattgcatgggtggtaatagttgttatccttatggtctgaacttaatagggaggtgaagatgacggtgacgatgttgacatggatcaaggttctgatgaagagcaagatcaagagaccaatccccttttattatccctagatgcagagaaaccaacaaaagagcagatgatggagcagtggttcagccaggatgtattcacagaagcaggaacaggtgtggttgagcagagtgatagtgaagatgaaagagagcagctaactaggattgcaaaaaagaaggcggattctggaaagaaggaaaagtctgctaaagcaaaacacttgcaacaggacgattttgagattgtgccagcagaaccagtccgaactgaagatgactcatcttcatcttctgatgagtctgatgaactagatgaggacctcgacgatgacacaaaagctgaagtactagcctatgcaaggaagatgttgaggaagaaacagagagagcagatacttgacgacgcttacaacaagtacatgtttgacgacgagggtttacctaaatggtttgctgaggatgaaaagaggcataaccagcctatgaagcctgtaacaaaagaggaggtagctgccatgagggctcagttcaaggagatcgatgctcggccagccaagaaggtcgctgaggctaaggctcggaagaagcgcgtcgccatgaagaagctggataaggcgcgccagaaggcagatgccatcgcagatcaaaacgacataaacgagcagtcaaagaggaagatgatcgacaggatttacaagaaggcgattccaaagaagccccagaaggagtacgttgtcgcaaagaagggcgttcaggtgagggctggcaaagggaagatactggtggataagcgtatgaagaaggacaagagggccagcaaagtgaagggtggcaaaggagctaagggcaaggggaagaagggcggcggccagaaaggcggtatgcgagggaaagctgggaggaaagcccaaaactgagtagcaatagagcatgactgaattttctactgaatttttgttcagtggctctactgctcaatttttgtttacttataacttaccgaattcatatgtacggaatttttaaatgcgtgaattatcagttgtctcgtcagattatattttcagtcccatcgttttttaagcctacaactgattataacctgtaacgcttaaataatttctggggggaacttttatacgtgttcttaggaacttaaaatcacaatgctgaaattagcaacttaatccaactttgaaaaaacgatagaggtgtttgtgtcataaaatttgtgatccattcagttccactaatccattcagagcctgcactggcattgctgcatgttgtagcgtttgggaatcagcgggagtggaacccacgcgcgtttccttgtcaagggaaaagaaagaggagcggcgctttgcctttgaatcccggggcacggcgatgcagattcccattcctcaagttggcgccgatcgatcagccttaggatcgaatccgaatccccagctttgcgctgcaaagatttggaatccggccgtcgcagtgacggccactgagctgaatcccgagctgctacttgacgattagagcaagaataatactagtgagctgctacttgacgattaggatcaagtggctggcaggaatgatagtatgataccgactaatgatggctcacagctcagggaataataatgtctcaggtgtttgtttaatttggggattaaaatgcattttagttagcactatttggcagatactgaagatgctgcaatgtttaaggggtttaatactatgattaagggagaagttgaccgtgttattcaggctggtgcatcttctgaagtttcaacgtcaggcaaggaattccaagaaccaaacatctctgtagatcaaaagcagacggtacaggataatgtaatctgcgcagatatgccttcttttctgtcccttttcatctgaaggcaatactgtagtcaatccagaatctgcaattctgcttgatgctaataaacaatttcccaattgaaatgtttgttctttttctttttaaaagaaaaaactagatcagttgaattatttcaaccctcatgcgtgacagattgacaatgataagcacagtttggactttggaccaacatgaaaagcaaacgagaactcaggctgcaaatccaaaatcagcagaaatccttccagaatgcatgagaaaagctttgcacagcatgtcaattcactagccagcatctcccagaaagcatttgctcggatggttcaaaatatcagagggaatcctgcatctttccgatggctttatgcagatatgattcccagagagagatctccggtggcctggtccatgctgcaggaaggaatcaaagatgctgcttgcaagcacttgctgctctccaatggccatttgcatccgatggaccaggatcctacacgacacagttcatcacgagaaatgccatgccaggcctttggaaaggtcaatcaggcccaaatcagatcttcataaacagggggaaaagaaaaaaaaatacagaaatacgatgcaaattccatgaccctatgagcaaacggcaagccaggaacaagatggcatgtcgtcaaattcactttccagagtcattggagatggaaaagatacacacatagatatatattctttgggtccccaaagggtattttccacttcactggctgcttatcttcctttggaatatgttctttggatagtagcagtaaagtggatggctggctgggatcgcgcaaaacgcgtccattgtaaagaatggatgttcttagcccacatcctgctattctccaacgaattacatatccaaacagtgcatgcatgagcaattgtttctaataccttctgaaccacaattagaaattcggcaccatgttgagagagatttgtgaggtggattcatacaccagcagattcaccgcctagccaccatgggcggctgcccagcctcgtcagcgaatgttctactgaattttttgcatgtttttcaaggattgggataccatttccacagcaaatattagctatagttaggtatgtccgggctctaattttttctggatccaccactggatttataggctatcagcctatcatatcaaggattggaataacaggatcatagatctttcaaagaaaaaaaagaacactgaataatgggttcggtttgcgcacctttgcagttctgaattctgaagaagcacaccttcggcgcaccttgcagggcacaggcacagcctattggttgatgctcacacgttacaagctcactgctctgcatctgcagcctctgctctcatgcatcgatcgaacctgcactgcaccatgtcaggctgatggctgacacatcaccattcacagagatgctttcattcgtgatgtcagcagcatccatggattccatgctgccacgccagaattctgtatgcatgacataaccatgattcagaaatagggtttattaatgaaacaaagtgtttaaggacaagatagcatgcatgttttacatggaccatagaacatatgcagatgtagtactgtagtccccccctcttccttccaaggccatggcaacagcctacaggtaatagactgataatggcaactactaggtccaggggtgatgctcaagaaagcctttgctttggcacatattcttccgatctttcatgcatgcatgggccatgcctgtagcccagacaaaaacaacttcagctgcacaaaaggttaggctaaattgtttgcaaaccaagctgtcagtgtgcataaaacagaagttaaacactggaattagactagcttggtaggcaagctgctacttagaggggagacaaagcaagatatacaagatcactgaaggcttcataagcttatacttggagagcaaggccagctgcttgctaagcaggaaggaattcatggcaaagacgcatgtatccggatgactgtgcgatctctgcaggatgacaaaacagctacgtgataaaatcttgatggatccatagattcgttggcgctttaccttgatgttactatcctttagatctgatcactttgatgttaccccctttcttttctctgcctctttctgatgctgtttttagcttcaccgttgcttcagtgctccagttcgagcaaacacaggacaaaactggagaatggaagcttgatcagaaaacgaaccaaacatgggaatttatatctcacttttttcactgataggttgtggtaaagtctggccacctttaccttccattgaatgcaaacgcgcctgcgcgtgctcagcacaagatattgctttgtcttcttctcagaaagtgtaaagaacatgaggcaatttcaccatgctaatgcttgggggatactatgacaaaatggcacatccaagtgctgtgttgctgtcgaaagatgcactccatgccatgcgtgcatagtagtgatgaacagttgttagctctgcatgcagcatgatgcctcgatgactggaacgctcggcgcatggatccgagagaagcagctgcatgcaaaaaacaaaaacgatcggcgtttgtcagtataaggattgagacatcgggatgcccagctacatgccaggtcagctccttctcagctgagtgacacatatactgcagctccagaatatttaacttctatcttcagcaccagaaagttcaccacaaaaattttcaatgttcaggcatgccaatgtgcagccatgagccacactaacatcaagatgtaatctttaccagaagctcatcaaagttaccatgttaggcatcatgcaccatagtctcgatcgattaggctgctattttttttgccgggagattaggctgctatagaacacagccaatactatcaactgctgtaattggcattttccatcacacgctgtctgtgtccctttgctccaaaatctgcgaaccttattctcctcggccacctttaatgcacagccattattccatacagcttacagctcatacacacaacagcacccaaggccccaggccctataaatagccgaccttgcaacactgaaagcacaaaccaccagagcttctgaaagagcaagaacattcagagctaagacacagcaagatctttagcattagagctttcagtagttcagtgtcttaccaaggccactcttgaagatgtctgggtcccggagctcctcccccaactcgaagtctgagtggagcaggaaggagaacaagatgttcgaggaggcgctcgcctactacggcgaggacacgcccaaccggtgggacaaggtggccagcgccatgggaggcatcaagtccgctgaggagatccgctgccactacgaagacctcaccgatgacgtcaagacgatcgagtccgggcgagtgcagttccccaagtacaagacgcagggatactggacctgaggtaaaaaaaaaaaaaaaaaaaaaccatgcatgccacctctcaaccaaacctgagctgcaaaaaagaaaaaagataacttgcctccaataagttttcagaattacagtcgagtagaagcatggtagtcataactaagtcagtgattgtttacaagcttactaaatgcaatgatgaagaatagaccatgtatatttggctgtttatagatggttcatggtttaacttgaagatacaacatgcagggtttagtactttatattctttccatgttgccaccatgcatgactggcatcataagcatacttagacaaagagtcagtaatttatgagtgtctttgtaatctgacgccctctaatcacgtgggatctaatcctagcgctatcagaataataccttccaaaagaaaagctttggtcttagagaagtacagtctacctcgtgcttccagcttacagccgacatgcacttctcatagtcctttacaagtcacagctaagtgccaaaaggttgatctcccatgctttttgagagggtgctggtgggtatgctttgagtgggttcttgttcttgttgttttgttttctttttgagttggcaattttgcaatcgcaacactttacaaatataaaaggcagctggttgcaagctagagtttgcaatgagatcaacaaaagtacatcatacaagtttaaaaaaagcgaaagtactaggtctattttgctagtcttggttgagttccaaactctttccgtacctatcagcctaacttgatgtctagttgaacaaagcaaccaaaagagagaaaagaagcagctctctcctatcaggcatccaaaagcaatatatagttcatctgagtaaagttttttgagctccgataaacttacagtacattatatttttcctttttcccaggatgaaccattggaagctccgatagacagaagatgaagttgtataaactagatccctaagaaagacttgctctaggaggaaccaaattaagtaatccagcattgcttagagaataaaggaagagaaggggtgtgtatgcatatagtattgggttatgagcaaggttaagtccccatgctgttgtagattctcgtctacattcgtcaactgcagtattcattaactctgtgaactaaattatgaagtaacattgtgatgtaaactcatgtgtttgtccaattataaaatgttatgttcgattgcattctgttgccccaaatcactaaatttgatggacgctatgttcaatcttaaatttctgagctttaaaacgttaaagaaatacagaatcattgccaccactgctttcgttttcaaatgtcggtctcaaaaaggagaagtcactgaattgtcttcaagaacaacagaaagaacctaatgccagaatgatctacatccaagcccaccaatgttcactgttaagaatcactcattactgtagggtagaatcaagaacggtagttacaaactcacaggactagctagaaacaaacatttctgaaaacattcttgtcatgtttctgctgactgtatactcaactactataactactgaacaagggtttgcatccactggtctctgccgagacgacgatatctcataccatttctgaccacaaaatttgccatcttgatcacagtatcagcagacagcagtaccaatatcatttgtaattagtaacacaaaactggcctacaaatttaccagagctcacataccaaacgaagatacaataatgcaaaagtagtaacattcaatttgagcatattcagaattccgattgcaactttgcaagaaccatagtgtgagcatagtcacacacacacgcagcactacactaatccgggtaagtagaatctaacacactgccatctaaatttgacagcttggggacaacaattctgaggcacaccatcaacaaattacatggtacagtacatacctagcaactcgatggcaaagtggcaatggcattgctcttcgccttcttggccgcggcgcccttgctctccatgaggcgccacatgtaccacgcgcccaccgaccggtacggcctccaccgctcacacagcgccgccatctcctccggcttcggcagcgccggcagcccgtacagctcctgcacgcccttgcgcacgccgaggtcgccggatggcagcacatcggggcggtgcagcgagaagatcatgaacatgtggaccgtccactcgccgacgcccttcaccttggtgagctccgcgaggagcgccgcctcgtccattgcggccacggcggactccgagagctccccggccgcgaacctgccggcgaggtcgtggaggtaggccgccttgcgggcggagacgccgatggcgcggaggtcggcggcggagagggcgagcaccgcagcggggttgaccaccgcggcatcgggatcagcggcggcggggatgagcgcgaggaagcgagcgtagatggcggcggcggcggagggagcgagctgctggtggaggatggagtgcgcgagggagtggaaggcggggcgggaaggggacgagatgaaggccggggcgccggtggaggagatgacctcggagaggagcgggtccgcggtgcggaggtgcgagagcgccgccgcgagctcccccggcgaggacagcggcggtggcgatagtacggctgttgttgttgtggcgacggatttccctttggcgggtgtgctcttgacgatcttgcgggagcggaaggagatcttaccggcggtgatgtccgctgcgcctgcgccgccgccgccgccggaggggcggggagtcgccgccgctctggtcttgaccattgcaaaggttgggtgttggagacgagacggcgtggattactggaccgtggagggaagcagttggccgttttgtcgggtggtcccttgaggcccatttatcactcgcgtgggcccacccgtcctcctcgcgtgacgggccgtgatctgggcccataaaaaggctaagcaacggcccgtaactcggaacgggagtacgtaccaaaaaggttagccgtcagtgtcactgctaggtgggtcctaccatttgatggagaaatgcctaagcaaaatctttactccgattcgcatccgccgtttaggcttcatcgggcggcccccatctcgcgacgggattcagggaaacctgcgctagatgagatcggcggcgagatggtggcctcgccggtgaggcggtgacggagacagcggcgaatccactcgcatagttgcatgagcatatatttctactgttatctgatggtaacaagtgaaccttatcttatttaaaaatttgtttagaacatatttgacatttcgtcttattcaaaaacttttataaaatatgtaaaattatatgtatacatataagtatatttaacaatgaatcaaatggtagaaaaaaaatcaataattatttaatttttttaataagacgaacggtcaaacatattttaaaaaatcaataacgttaaatatttataaacagatggagtattcagtttcattctgctggttttctagtggcatctaaaatttactctggatgcagatctcagatgtgatcattgctttggtctttcattggcaaccagacagctgacaacttatgataaccgttctatgtttcagcaaggcgattttcggttttaccaactgattagtgattacactacacatgaaactgagaaaagcatccggattcaaattgaacatagtattcctgttgctcacttcggatctggcgacccttctgccacccatcggcagcttggtagtagtgaagctaaagtttgttggatttttgccacgctgagtgcatgtttcttgtcagcattacagctgcaagttgagacctcgtgttcgtccagctgggttccagtccaggagcagcatcgcagcatgctctcgccacagacaaccagaatgcatggaagcaactagccaacgaccacgaggcaaagcagcaagatatgatgatgatctgtacttacaacagcatatggtgtgcaactgtgcattccatgtttgtttatttcaagcccaaaaaaagagaatggtatagaagaaagtaatagctatatcaatctagaattggattagatatatctcgatattatgaatctggataaaaacctaatattagattggacacatcttattactatgaatctgaacaaaagcttatctagattcgtagttatgtccaatctaattataaattattagaaattaatgtgttcaaagataataatagaaaggtcatgagcttaactagaatgaactgattgtttgtacatatatgtagtacaggtggtcggatcagggtgaatgacaaaatggtccacatgcaacagttacagaaaaagaagaagcctatgttctatttctgtttcagttcagacaaaatcagagtagcctccttatgtgtcactgacagtgggccccacaggagaccaacgaacacggtcaggaactctccccccatttcaacggaaaaaagtttcctcttttctactccctctctctcatccatttctccggttgagcggcgccgcggcggagccgaggcgagcgagcgagcgggcgcgatgaacggcggcgggagcaggcggggaggtgcgtcgtgcgccgacgagagcggcagcgaccaggacggcggcagcggcggcggcttgcggaagccgctgctgaacacggggagctggtacaggatgggatcgcggtccagcctcgccgcctcctccatggccgccatccgggagtcccacgtctccgccttcctctgcacgctcatcgtcgcgctcggccccatccaattcggattcaccagcggcttctcctcacccacccaggacgccatcatccgcgacctcaagctctccatctccgaggtcccgtgcccgttccagctgcgatcttgcgtgcttttgctgcttcctcttgcttattgcgtttcttgtagtgtgaagttttatctttctgatgcagttctcggctttcggttcgctgtccaacgtcggcgccatggtcggagcgatcgccagtgggcagatggcggagtacattggccggaaaggggtgagaatttgtgcttcatttggtccttatctgttcttccactagaaggccatcctgtatctcgacgacgaacaattgatactttgatagttgacaaggtcaatacgtcactgttgtatgatttccggtaacaccaataatttgccattaaagaaagtgagtgggattagaaatgctggtcatttcctgtgaactgtagcttgtgaaaatatgaaacccaaaatttcaggttcagttagctatactattggggtttgaccttaatttcaaagttgacgagttctttagttgtgattgccattgatctggcaaaagaggagttagtatgacagaaaatgtgtagatgaagtttttgtgacattttctttggttcatacttcataatcacttaatcagatcagtagttaactacagtgaagctctattattttactctaatggtcttgctgattgaatctccagtcgttgataattgcggcggttcctaacatcattggttggcttgccatctcctttgcaaaagtacgtgtcacatatttctcaagcttatttttctctgtttgctctttttcactagtttcattcttgccgatctttgtttttcaggacgcgtcatttttatacatgggacgcttgcttgaaggttttggtgttggtgttatatcatatacggtctgtatttaccaacttcatttcatgtttatttgctgcttagaatgttctgtggcttcactgcttgagtacttatctgactgagactgagatgcctgtagaatgaggcagagcatcctttgctaatgaagcttttttacatttttgttgccagaagaactttggatcagttaatagttagtgcatgtataaacccttaatgtgtgaattatatcgtaccaggtgccagtatacatagcagagatatctcatcagaacacaagaggagcacttggctccgtgaaccaggtgtgcttatcgtcagaagcatcttatcttatgcgagggaaatttatggtttgtttatgttggacttaccatgcagtttttcattatgtagttgtccgttaccattggtatcttgttggcctatttgctaggcatgtttgttccttggaggctgcttgcagtgataggtacaaatcaatacctgatgtctgaatgttttctatttagggatatgtaataaataataatgaatttttaacttttgatatttgctagtaccttttggacttattgcaatttgtatgtgcgttaaatgtctggtacctctgattctgattcaaatatctgggttgccatgcttgtaggaagcatcccatgtacattgttaatacctggtctattcttcattccggaatccccaagatggctggtatgttatacacctaagttggatattgtatcacaaatctgaaatctgtagcaagcactttcctacatctatatgcaggcaaaaatgaaaatgatggatgattttgaggcttctctacaagttttgagggggtttgagactgatattactgcagaagtgaatgatataaaggcaagcaattttatttttcttgattaactgactacaagttatttgcggtttcgcgtgatttcatcttagtaagattttcactaacacaacacttgggagatatgtactttcatttttctggaagactaatatggttcaaatccctgttatgcagagagcagtagcatcggcaaacaaaagaaccacagtccgttttaaagagttgaaccaaaagaaataccgcactcccttactggtaacttacataccccttttgttcagtttataccaaagtcattaatcatgttttgtaatggtaactacgctttatgttgacagataggaactggccttcttgtacttcagaatctaagtggaataaatggtattctgttttatgcaagtagaatcttcagagatgcaggtaagttgtggatatctcttataggtccttagtactacagtcacgttgtagtaaattttggcttgtaatcttaacacgcaaagaacttcagggtttacaaacagtgacttggccacatgtgcactaggagcaattcaggtaagtgattaggaatatcctgatctcatctctgtaacttatatcaagttgcttacagaaatcgttggattacattaggttcttgccactggagttacaacatggttactggacagagctggtcgacggatgctccttattgtaatttcctcttcccaatgaaatcacctttttgttagttgtctgtaacaataacatagtgactcacttaaaattgcagatctctactgctgggatgactctaagccttcttgcagtatctgttgtattttttctggaggtacattcagattttttccagtataccattgtgataaaaaaaatcatatgttgcagtctctttgatagcctacattgtcgcatggactcttcccctttctcctcagttcactcaatatttcaatattactacaatgattatttgtttcagggtaatatttcacatgattctcattcgttctacatcttaagtatgatctccttggttgctcttgtggtatgtctgtcagttaaaccatttcttttgaaaattgctccaaaacctctgccggaaaatttacctcggtcacttacttcaggcttatatcatcaccttttccttcggcatgggtgccattccatgggtcatgatgtctgaggtataatgctttgccccatagctcacaatgatgttagtatttttagagcattgacacatccaccattttgttgcaagtatctcaggcatcagcttaagtaatctaaagatttcagttaaatctttgtttgttcttagatcctcccagttagcatcaagagtcttgggggaagctttgcgacacttgccaacatgcttacatcctgggcaataacaatgacagcaaatttgttactcagctggagtgctggaggtccgtatttctataaaaatcctctgttaccaagaataaaattctgaactgatttacctgataaaagttaaatattttattttaatttcaacaggaacatttttgtcctacatgattgtgagtgctttcactctcgtgttcgtcatattttgggtgccagagacaaagggaagaactctggaggagatacagttttcgttctgctaaattttgagtttctcgttgcatccagtggatactccagttgagtacaaggaaaggatttacttatacaattaggaaccttggcttttcttttaccaagtcgattactggttgaaggccaagcatttttattcagttcattttttttgtatattcttgtgtaattttaattcagttatgcccaattggcttgtaaatgccagtgcagtggctcaaatcaaattgcttcctacttgtcttcgacgttatataataaaaagatgcataaatgagcaatttgaatccctgactgttttggaaatacttctgttctgaagttcagctatctgccgatatttccacagttatttggcaccttcatcagaaattcagagttcagagacacttatttggtgataaatgaatatatttactccccttattccttaaagaaatgcagacattgctggttgaatatctgtcatgtactaagacagatttctgccgtttttggccggtgatgcatccctatcaaagctgtgattaggaattttgccatgatctgcacatgtccattggcatcatgtctgcaaactggaacatgtttgtttctttcagctgggagcatcattatattatagtgtccacgagaagcacgacagccagaaaatgttgccgtatgacgtggctttgagcaagcaagtagccagctaccacgccacgccatctatttccagcagactacgccttctgcgtgattaaattttagttcggtttccataaaattcgttcaaattttttttggagaaacggggtggtttgaaatctccggcccttttcaaatggtcgttgttcattcagcaagcaatcgctttcctcgtcatcacgatcttatccagcttagctcgtgaaaatgattgggatgatcctaatgagatcagaagaaattaaaaaagggacacggctagatcgcgcgcgctaatggcatatcactaaccagcgacgtccttctcttaaaaaaaaaacaacagttatacaagccttttttttccttcctagagaattttctcctaaattacttatccgatctataatccgattacaccattatggttgttgcaattaaatctttataacaagatcttacacgattatattctgataaaaaatatctatgttgcaaattacttttattatatatgtaagttacttttgtcctatacataaatcacttttagatttaagctctttaataacttatatcttttaaatcacgtattattttcatgatctatttatatcattgtactctacataaaatatgagacaaaacaatatccatattgaatatattcaaatattttattaatttaaaagtaatttatttaaattgtagtagtaacttagctatgcaatagatataacttagctatgcaatagaagtaagttagcacaaaatagaagtaagttgttacaacattagaagtaaattcgagagaaaaatattttgtatctaaaaattaaatttaaagtccataaattatagaattgactaaaaactataataaacataatcgacttaaagcattatgaatatataaaaagtaatttagtcaaatctaaaagtaacttatatatatgataaaagtaacttaagtatataataaaagtaatttacaagtataaatatttttttatcgtagtataatcatgtaagatcttgttttgaagatttaattgcaacgaacacaatggtataatcggattatagatcggataagtaatttgagagaaaactttgtaagaaggggaaaaacatgcatgtgtaatagaaaaaaaaggcatgcatgtgcgccggcttctccacggcttctatggttggcatcgcgggataacacaatatcgagaggcctcgccgattagtttttgcgttaaaaaaagcagtacacgtcgttgtctggacatgttgtgcacttgtgcacactagtacatctgagcacgaacttattaacgtttttagtatttatgccataaaacagtccaagaaatacaattttaattgattatgtatgatttctggatgattactcttttttggtagtttatggcaaagaaaaatgaggccccatttattacacacaggaataaaaacctagaaaaatagaacacaagaatgcttgtgttaaccagcgaaatgaaaaacacatgaaaaatataatatgggatgtttggaagaaaggattcattagtcaaactgcagctgctttaaaacgaacatacccgtaggcaagtttccaacaaaatttagcaaatatttgctttcctataaaattggggaaaaagtgcatggaaggaatcaaaaacctttaggaagactatccaccaaattctttgttcaaaccgtgaaaataatgaaatcccttaaaatttatcttttgcttatacttatgtttatagctaaattttgatttttcaactttaaatttaaagttaattttggagttttttcagcgtagtttatattttaacatttgcttttaaatcgttaagaatacgtatataaaagttttattcacaaattattttttatttccaaatattcctcctatcaaacagaggtgggcccctttttccatcccggaccaaacgaaatcttctcccgtcggtgactgacaggtgggccccacctgccaaccggtcaagccaagagacaggtagacacacacacgacgcgatccccccaactctcccccgcttcaacggaaaaaaaaaggggtcgcgtctcctcgtctcgtcgcctcttcctccttccaattcatctcgtcctctctctcgtaactcgtaaagagatctcgtctcgcctcgggaatccaaccattgccggcgaagtagagatcgggagggcggcgccatgaacaggggcggcggcgtcggcgtcggcgatgagagcggaagcgactacgagagcggcggcggcatgcggaagccgctgctgatgcacacggggagctggtacaggatggggtcgcggcaggggagcctcaccggcgcggggacctcgtccatggccatcctacgcgagtcccacgtctccgccttcctctgcacgctcatcgtcgcgctcggccccatccagttcggattcacggggggcttctcctccccgacgcaggacgccatcatccgagacctcgacctcaccctctccgaggttgctgcccgcttcttcttcttcttcttcggttcttcccattacccccccccccctttttttttgtcccgaatctgaacgacgcgctgctgctgcagttctcggtgttcggatcgctgtccaacgtcggcgccatggttggggcgattgccagtggtcagatggccgagtacattgggcgcaaaggggtgagaattttttttctttttttgggtacacatcgtatgcagttattagttgcgctttcgtagggttaccagtctctttctaaaggacaataatggtggtctcggtcaacgtcacctgctgtgctgggagagttttatgtaattagtacaaataaaaaattattattttagtttttaagtaatacaaatgtgggcaaaacggatggaactttctggaaataaatgttgatcattcttcagtagattattgagctaccgaattgctaggatggctttttgggggtttgacattatgtctgttcatgagtttggtagttgcatacttctgtttcatacagatatgaacatatggtactcaagaaatcggtatagacgaaaatgtatggatgaagtatttttcatgctcgtgttctggcatgacttacagtagataaacatactttagggtaattttatttaatgtcctgtttttggcatggttgcagtagtcagttgtacttcaatggtctactcttttaagctaactgaattgtttggtgaattttccagtcattgatgattgctgcaattccaaacatcattggttggcttgccatctcctttgcaaaagtatggcattacatggttcagaatcttactttcaccaccttgttgctttatacaatttaagctcgatgcctttgctttataggactcatcgtttctttatatgggacgattgctcgaggggtttggtgttggtgtcatctcttatacggtttgtatgagaaaacttccttcctcccttttttatgcgcacttatagtttgagtacttaacttctttgttcaagaaaaagaaaaaaaaggaataacggatatgtcaatattttggaggaaaaactctgcattgccagctatgttagagacttactattgatctgtgtattatgtgataacaggtgccagtttacatagcagaaatatcacctcaaaacatgagaggtgctcttggctcagtgaatcaggtaaccttacttcacaggaataatctttttgacacaaagacaattgcttttctatgtttttcttgtttattttaagcaccttatgtgattgtttgttacacagttatctgtaaccgttggtatattgttggcatatttgctcggcatgtttgttccttggaggcttcttgctgtaataggtaatataaccaagttctgattgtattgctaatgtgatctttttttcctttcatttttttatgtctgcgttctgatatttcagttcacaagttcattaacagcaaatgatactaatatgttgacaaacatagctaacatcctacaaacattgcatgcaaatattttcatttgaatcatagatggaatgttagtcattttcaatagccagcacatatttttttcacaagtattaaagtaatagtttggatgtcatatatgcgtctactaggagtaaatggtttttttattcaaatctgtgttttttttgcatgtaggaatcttgccttgcactgtgttgatacctggcctattcttcattccagaatccccaagatggttggtatgtattattgtatatgcaaaaaatcgatatgaaattacatcatctgaatcatttttttatagccatatttttatctctatatatctctaggcaaagatgaacatgatggatgattttgagacttctttacaagttctgaggggatttgagactgacatcagcgcggaagtgaatgatataaaggtaagcacttgttataacattgagcacactgatatatgcaccacaataccacatgcttctggaagtaacagcatcatctttatgcagagagcagtagcgtcagcaaacaaaaggacaacgatccgttttcaagaattaaaccagaagaaataccgcacacccctaatagtaatttccttaactttataattggtattgtacttttatgccataccaaatatagggactaaattttataattggaattgtacttttaactgtggcagctaggaattggcctacttgtactgcaacagctaagtggaatcaatggaatattgttttatgcaggtagcatcttcaaagcagcaggtaagttgtgtcgtgcttccttctttgctagtaaaccttttcattacactggttagggctttaggcatagtaaattgtatgcatatattgggatatcttgccaactttaacggtagtgtttgctaaattaccatcagtgtaatcatctgttcatcaaactttagcccagaaggaatagcatactagatttcaaactactaaatttgggaccgctgacctgataggacctctaataggtttatgcatatgtaatttccttcgtctctctgtatcatagtcatattttagccgatttggcttcgtgacacgcaaaatttcttcaggtctcacaaacagtgacttggctacatgtgcacttggtgctatccaggtgtgcaactataaataccgttcctgtctctatgcaatcacttaaaccacacactagacaagtaaacatgtccttaagttgctcacggcatttcttgtcaggttcttgctacaggagttacaacctggttattagacagagctggccgacggatcctccttatcgtaattctcttcctcctgaaactaaagcatgctaattttctgtattctgtgaccataataaagctctcgcttcaacttctagatctcttctgctgggatgactctaagcctccttgcagttgctgttgtatttttcctcaaggtaagttcctaccagtaaaaaagaaaagggaaaagtttcatctgttgcactatatgcaatattccatatatggcttatgaattttgcaatatatcacaggtctcttctgtcaatccactgaatattttcatattgttattgtgatttatttgtttcaggatagcatttcacaagattctcacatgtactacaccttaagtatgatctccttggttgctcttgtggtatgtccctcattatgttgttttctctaaaaatatgcatcacaaatatggaagctgtgacagaaaatgttgactcgtacacttcatttaggcttttgtaatcgccttctccttcggtatgggtgccattccatggatcataatgtcagaggtatagcttcatggctcataatcatacggccttggaatttagctgaagagcattcacatggccatgatttttggagcatttgtcagatggtctgaagactcacttccaacttgtatattttcagatcctcccggttagtatcaagagtctcgcaggaagctttgcgacgctcgccaactggcttacatcctttggaataacaatgacagcaaacttgatgcttagctggagtgctggaggtacatacttctacttctctgatctctctttcctgcagtggaattgttcttttcgttgagcgagactagagtagaattctgaatatccaacctgacgctcatgctatcttcttaaacatcaacagggacctttgtgtcctacatggtcgtgagtgctttcaccctcgtgttcgtcatcctttgggtgccagagacaaaaggaagaactctcgaagagatacaatggtccttccgctgagccttgtggtcttcgaaaatatggccattttttcaagtacaaagggaaggattgatttgcgcatttgcaaatcttgtgtattctatgttccgagtcaagtatactggacaaaaagcaaagtattctttctgttcatatattcttgtacaacattgtttcacgtattccagatcgacttgcaaaggcttttgtgcagtgacacactcgtgatctcatcctaattgcttttcctttttgtcttgagcggctgcatgagcatgatcaatgtaaaatatgagtatactctcaggcattcttgacgcctttgcttgccttcgaaaatatttttcttgtcaaatttcaatagtctgagaaatttctggagaaggtagccggcgatccatagcgcagaggcagagccttgatgaagaagaatttgatccgaggaagacgacgatggtgacgtcatcaatgccggtatgggccagaacaggaaagcagagtacgtgccattgggccgtaacgggatggcctcttacgtgagtgtactatatgggcctatcaatatactgtagtagctaattaggcccaatttcttaatggacattttgggctggtccatggtgcaccgctattgcggtggaatccggtcaggtacatatgttccttccagagttgaccggttgacccgctttttgcagttagctccctgtttggatctttttctaattttctaggcctgttcagtttgttgcaaaaaaaccttaccacatagttaccaaaattttgacaacttgccaaaattttagcaggatttcttatatagttaccaaattttggcagcaaactaaatgtagctatttttttaataactttattaaaatttggtaaagacccatagtttttgatagtaacggttcaaaatctcgatttgctatcaatggtagcaaacaaaatttgcctagtaagatacggagatacagatgctgtgatatagggatatgacattttctattaaaaaaatacatatacaaggtccatacatacagaaattaatgaactcttgccgggaaacaaaacaaggatgctagctagtttttcagtgttacgtggttcctggacaaaacaagcttcagattcccctctgggaagtctaaaataacaccaagtttttactgagattatgatttgaaccattctagtttgactctcactgcgtcatgctgagtaacgagttcagccaaggaatgaggtttctatcaattcatggtatggtagcaacttgttaccagtggtcctgaggtctccagaatataaacactactagttggcacagtgatctgatcgatggattagagcatttaaacatgtgaaagatccttggctctgtagttccatgtcttctactgatagtctgatactgctttggacaagcatttttcttcacttgtaacagtagaaatgttcccggtattttttttttagaactatgttcctggattcaaaggtaggtctccgaggaacgcagtgtcagtcagttctgccttggtgggcctctcattgcgagatgacatataattgggcccgataaggtttagacatttcaggacgatccacagaaacaaatctgatatggtttgggataccacatttcgcgtattattattaacccagttttggataatggatttctatagttatttgagatccagtatttttcactttggctcctgatccaacatttcattttttttcatatctacaacgttttctctataatcattgtttcccacccaacatttagccattgtcactctccttcctccagtcctccgtctgcatgtgtgattggttggttcgactgataaaccctagaaaaataaaaggagccaacggaaaatgattttacggtagaacttctgtatttctaactttagtcttatgtcttagtggtttaattaattagaagccaaggctgaaaacaaagggagtgttcgacaggccgactgcaatggctgtagctgcgaatgtgctaagtgagtacgggactattcgtgccggctgtggtgcagccatgaaagcagcagccgaacatgcccaaaataaaagaactcaataatttaaaattaacttcaataattcaaattttgtttggtagtactacttgtaaaccaacgaccaaacaacgagcatatcaaaggttcggtcaatttaattgcccaaaaaaagtggttcggtcaatttaaatagctaggcaacagctcaaacaagatcttgtaggcctctgatcaaaaggagaacccttatatgggtcccaagacatataaccgtgatgattgatcgatggtacctcacatctcaaaagcccaaacatatatccctccacatatatatccacttacctttttggatcaaacgatgacgatgattagtgcacagtggaaagtactgttagttaaatcacaaaagaaatataaagaacaaatttggcacgcgagcaataggaattatactgctgctagtaactaattaatggtggaactagttaattccaaacagtacaactctggtcatcgatcgatcgatctcattgcttaaactaaactaaactgatcaaaattagttcgtagtagtagtagtacactgatctagggtctctagctaagctaatagtattggaacaggccgggccgctcgccgacggcgaacgccggcgaggatggcatcatgttgagccgccacgacaggcagggcccgtcgtccgccgcgtcgaacatcgcgtacgacgccgacttcgccgcggcctggccgtagcatccccactgcggcgccggtggcggcggcggctgtcgcgagtagcagtacgcgtacccggcgccggtgtccagcgacggcggcggcgtcggcgccaccgccgccgcggcgcgcctctcctccttcttgtaccggatcccgcacgcgttgcacagcgactgcaaccaacgacagaagaatatttttcatgtgatgtgacgtttgtatagtagcacttgatttgcacgaaaggcgttcgtgcacgttgctgcctacctagatggcatggcacgcaggagtacgtacgtaccttgggtcccctgggaccatttcgccagagcggcgtcgacatcgtgtcgcagttggcgcagcggcgaggcaggcggccggcggcgggggcctccttgttgcaaggagccacgccggcgccgtcctgcttgccgccgccgccgccgccagggcgcgccgacgacggcacgtcccacggctgcagcccgccgccgtacgcgcccgcctccgcgcgccgcgtggacggcgtgccgagcgacagcgtgcagtccaccgccgcaccgccgccgccgtacggcgaccgactgtcctcctccgcgacgccgccgcactgcctgtagtagtactgcccgcccgccatggggaacagcagcgagaacgccgacgccgccgcggcggcgccaccgcacccgccgccgcagctgccgtacagcatcccgcacgtgcacggcgccagctcctgcagcattatctcaacctaacaatggtggatcgatcgatcgatcggcgagagatatcgagaggagggtactatcgtctgtctcgttggctgcgatcgcgagccgtggtcggcgaggcgaagcgggcgggggcatgtgagctagcgcaggcgcggcgtacgcggtggcaaatccgcttattataacgaggagactcgatcgctcagccgctcacctgtgtggggtttgggtttggttggcgttttgcgggagaagtggacgagattttgcgttgccggcgcggggagcgatgcgatgcgatgcgggtgggtgggtgtgtgtgcgcgcatgtctgcctccctgtccgtctcggcgtctcgcgtgtgttttgtgttcgtgcgtgtgcgtgtctgcacgcagcgctgcggtggcagaggcagcaggcggtcaagagagagagaagcggggcagctgcagcgagggggggtcaaaagaggagaggggcacgtgaaacggggaacagtctcccatgcaactcctggggacgtggtcgttagctaccctacccaccccagcccagagacactactcgctctcttgtgtgcagtgcagtagaatcgcacttccccgatcacgaggtgcacagtccgatctgttcctcctcccgtaccggatcgatcctgtatgatccgatcccctgtcactagctacacgcagtacatacagcccgtcatctactccactaccaatatactccttaaaaaaatactcaatttaaaaggaatctattacaatgaatctgaacaggacatgtgtttatagtttaggtcccgttcttttctccaataaaaattggatgaagattaagattttcgtggcacgtttttcaaactgctaaacggtgtgttttatgtaaaactttctatatgaaagctgctataaaatatcatattaatttaagagactgccaatcttcattttcgtcttaatgagaaaagaacaccacctcaatttgttcaaacggatagcggagtattttgcatgtaccagcaccagcagttctgcgattgcttgatcattcgctggaacggggaacagataaaaagactgctgctagctactccttgcattgccacagtggatattctcaaaacgtcatgtccttgctttcctttgcacaaatgaaaagcgtgtcgcaacccttgcctacattatcgaatccagcaagctgctgcatgcaaaaacttctatcaaaacaagaaagaaataaaggagtaggagtagtatagatcgaagagagaacaagggtgcaaaagaaaaaataaaggcgaaatgatcaaaagaagcaaaagggtaaagagtggcaaccagtaaccaccactagtttccatgcatgcatgcatgcaggataactcaagaaaagacgtggagatataattgcatggatatatggaatggatggacggatcatgagttggccacgccaatgatgagacctctagctcagccgtccgcccgttcacaaaagcaccccgggcaaaaccggccaaccggcccggccggtcgatcgactcgaactagatcatccctgcttgctatgttggcttcattttccctataattatatcttgagagtcgctttatattattaatgagtctgttcagcaggctgccatgtaacacggcacagccgtgaaatcagcaaccgaacatacctaatgtgatatcaaatatatgggtttatatgaaaatacgacaacatcgatcgataaaatcaaattagtttaccaaaatctaccataaaatatactactccatatgtcatattttgtatgaccgttggatgtcatatattaaagggtagatgtaatattttaatagtgtatttatttgttatattataaagatgttggactgttggcgtgtcttactctgagctctaggccttttttttcttttctctagagaagtttaacttatgataaaagttaaaacgatttagcatatataatggagtagagaattagctgcctgtcggttttaatgttttatagaccgattaaggaagaagcaagcttgcagatgtagggatcggtggcaatgtgtcatgcagagaaagccaagaagggagtggagcccatcattccatttgctgcagcccatcagtgccgacacgactgcatctgcacctgcgcgcgcgctgcatgcatgcgctgatgatgcgcgttgcgttgcgttgcagcagcatggcccccatgactctctgcacacgcacgtactcatccatgatccgtctgcaccagccgtagtagtacgtgcggtcgtctcagacacgcctgcagcgccagccgatcgattaatgctcgctcgtgcaagtggcagatcatagtactcctccaactccactgttgcaatcactcgtagtactgctggttattaccacctgcagatcgacctgctacagtgcctgcattttgcatcaaatctgtgtttagagatcagctttactccttccatccttaaaaatcaacctactaacagacgtgacacatcattgtacaataaatctagactactctttatccagattcgttattctaagagaggtaaggttaagttttttttagatggagggagtacatcaatccggatttatagtattaaaatgtgttatatctgattctatattcgttttttatgtgacatgaatatattattagaaacaagtggagcgatgaattaactatcggcagtcaaactggtagtgtgaatgttaaccggatactagatgattaattattggttgattatatgttactggtgcaagactgcatgcaaacacgtactggcgtgatttgtcgtgtggcctgttatttatcagcgtaatgctctacacgtatgacaggggattcagggattgtgtgccttgtgctccgtgctgatgaatcttcagtaaacaaagcgattaaattgtgccacatgcctgcagctagctagcagcatttctctgcataagatgagagcaagtataatagtaggctataagccggctaaatgctgagatggaggagagaagagaggagagagaggagaagcgggctataaacttatagccagcctggacacaagaaccaataaactttctaagagagacaagtggatcctatattaattgtaaagagctaactattatataggtagactaagagaaggctaaaaaaaaacttataaccaacatgttagctgtattattagccttgctttgagggggtgtgcagttctgtgtgtgttgcgtggtgaggggagtgcagccaatccggccgaggagatcgtcgttcaaaaagttgtcccgacacggccagagttaagcctagagattggtggcctcatgtcctttagtttttgatgactgatccatgagagagaacacggaggaagcaagcggccggccaggcaggtatcttttggaatttgcaagccttttctcgcttctccaagtttgaaccattcatccctcgatcagcactacgactagttgttgtttagttcagtgcaccaccttaaaattgcagttaagtgcatgtaatcctctcttatgtacaggtcgtaaacagtagaaaaatgaacagcagaagcaggttgagaggagaaatccaatgttttttacacgtacgcttctcaaaccactaaatagtatgtcttctcataacaaaaaaatctctacgaaagtttatttaaaactcatattaatctactagtatgtttcaagcttaaaataattaatactcaattaatcttatgctaatgattcaccttgtttggtgtatattctcaatattttctaatcctctcctcccaaacactccctaagcaatcaaaataatttacctaataaacttttatacctgtattaccgacaatttgagagctaagaaaccctccaaatcaacttaaaactaagttataaaatttaaatttaagatgcgggtaataagcaaacaagcacagtcgatcacattcacatgcatcgatctcgtggactcctgccgatgtggcacagcacagtcgaccagatggattagtactataggactagcaaaaatgcattcaaatgattaggtcgatatgaccatatcattagcaaaacattggtctcggccggaggatctactccgctaggatcgatgcggagaacgtacgccgccatcatatccaacccaacaacccatgccgggctttgcttgctttggcgcctaacggttggcgggcccacgtgacatgacccatcagtggtacttcctgcgccttttgaaaccccgcttccggggcccacgacccggcccacctaatagctggcctcgggctcgagattgactgacgcttttgtcccccctgctttcgagggcaaattaaacttgggagtagtgaaggagttcatccggaaagcccaattgcacatctaggagtagggaaggaaaaagggcccagctatgtgctgggccgaatctggtttcagctggattttattagcccatccttgaccagcctgaaacacttggtcaggccagcccatgacactctgagcccggtacagaacacacacacaacctggcctaatcgaggccctgaaacggaaagtaatgttgcagatggaatgcatttcacgacatgacagcatccgcttctctccgtgaaaataccgtgcaaacgcataggtacaactatgatcaccttaaaaaaagtagatcgatatattttggaattgataaagttatcactgtcttattatcgacaagtatatcgtctatcactaaaaatataattggccgcaaatacgagtatcttttttcttaacacatgaagacgcgcacacgcaaaacacaggtgtcactttcgatattggtggtcgttttcttcagcatcgatctatagcaaagcatgcagactggtcatgaatcatgatatttgtcacgaaacctttgacgccgttggtcgtttatgcacgtttctttgactcgacgcatgcgccgttgattagtgctgtgtgtttgtttgttaatctttcgatgaacatattggactagctagtatgctatcaacatatcaattaggcaattaccatcaaaggatggcagcacttggggccacattggcattatctcaatatctcggaatgatgtgaccgaatacaaggaacatgatgcggatcatgattcgctggatcttgttttctatagtaaagaacagtgcaacacatgcgcgcaaaagattagtgcaaaattgagatgattattgcacatggatgcatgatgcaggagggttcactgtctaatactatgactgcaatttttctctccgacgagacctgtgtgatttgatgattgatcaatctctctgtacacttaaggtccataaatatatctggcaaaaaaaaaaagggttcatgaataatatgcatagtgacagaacacctatcactttttttttctatagaaagcaattaagattcatctttttgtaccacacaaggtacaatggtagttcaagtaacatagatatcccaatcatcatttactcattcagtacgtcaacatcttaaagatgaactacatggcacaaaaaatcttgtcaggctgaagcagatgttgatttggagagcatgactcttttgaacagaagaccatgaactatagctgggggaggaaaaaaacaactgcttgattcttgaacttcctgtcactgaaatgaggaaattctttgttattgcacaacgtcgaacctacttgcgaagtttttcagcacatcatccaacgacatgtaaataactaacaagttgccttttcttgttattgaacttcagttggtataccagtgcactcttgcttacgataggttgaaagcacatggaaggaaagcattgaccagcttgattatcacataaaagaaaaattagataatccacccttagctgggatgtgtgaggtagacactgatgtcaaatataaggattgaaacaagacatgtgtgaatttaaaagaaacaacttccaggagcatcgatatcttgttgtatagtatctgatgaagtatacattgatgtcagctacaaggattggacggcatttgcgagaacttcaggatcacatccagctaaaaaccattaatacatcagggccagtggtaatagctaagcaaaaggaaacttccaattgaacatgacaaatacacagcacatcgatccgttcatcataggttggcaggatcaaaacgcccttgccactaacatcaatcccatgtgacaaaaaagaagggaaaaaaataaaagaaatagaagaagaaaagaaaaggaaaacaaaattcgacctttcctctggaccactatggcagtatctagtggagtaaatgacaatcggaagcaatggctaaagagacaacaaagtgtagtgtacataatacaacaataggaaggcctaccgatgacctcgtcagcaaagctctgctgctactctgtaaaacttacctgatgatccatgaagtacagaccagtgtgatcacagagtagagagcagagttggcagcagcaaagtctggagattcttccaatgcaatcatgtcctataaaagcaagtgccattatgtcattctcactaaccaatcttttgaggatttttggtttgatccatgatgataaacgtttgtgtttgttgcaccaatggaggagaaggatggatggatggatggatggtgttattgctgcgtgttgttgtgggtggcgaagccgtcgacgagctccaccgggtagcggtcaatgcaatcctcccaggggctctccggcgacggattgacgttgcggagagcgtgccagacggcgctgttgcacttgaacccgctgccgaacgcgatctgccagatgcggtggccgcggcggacccggcccttggcctccatgtaggcgagctcgtaccagatggagctgctcgacgtgttgccgaagcggtggagcgtcatgcgagaggcctcgacgtggaccggctgcagctggaggttcttctccagctcgtcgatcacggcgcggccaccggcgtggatgcagaagtgctcgaacgcgagcttgaagtccgggatgtagggcttgatcttggcgttgaagagcttcttggcaacgagcgtggcgaagaagaggagctgctcgctgaagggcaggacgagcgggccgagcgtggtgatgttggtcttgagcgcgccgccggcgatggccatgaggtccttggacagcgacacgccggtcttcccctcgtcgtcctgctcctggtacacgcagttgaaggccttgttgtccgcgcccttgtgcgtgcgcacgacgtgcttgagggcgtacttggcgcggcggcggtcggcgccgcggttggagagcagcaccgccgcgccgccgacgcggaacaggcagttggggatcagcatcgacttgcggttgccgaagtaccaattctgggtgatgttctccgtgctgaccaccacggcgtaggtgttgcggtgcacctgcagcatgtcgcgcgcgaggtcaacggcgatgacgccggcgctgcaccccatcccgccgaggttgaagctcttgatgttccccctcagcttgtacttgttcacgatcatggcggagagggacggcgtcgggttgaacaggctgcagttgacgacgagcacgccgacgtccttgggcttgacgccggtgaacttgaacagcttgtcgagcgccccgaacatgacagactccgcctcggcgcgggcattcgccatggttggttccggcgggatgaggtgcatggcctcggggacgtaggtctcctcgctgaggccagaccgctcgaggatcttgcgctggaactcgaggcagtcgtcggagaatccgcacagcttggagtggtggaggaactcgtcgaagcggaccttgagcttgtcgggcggcttgtagcaggcgaagtcgacgaggtagacggggcgtgggcgggtgaggacgtagacggtggcgccgaagacgaggacggcggagaggacgaggacggagacgaggttgtactggaggtggagccagagctggcggagatcgtcggggtcggtgcggccggcctcgaggacgatgacggccatgagcggcagcagcaagagcgtgaggaggtgggtgatgaggtagtggtaccccagcttcacgtacttgaggttcacgctctggaggaagtccggcagccgccggtggctcggcgtcgccgccgccgccgccgcgtcgccgccgttcatggctctcgcctagatctgatggcggaatcaatcacccgagtcaaagatgtgggtgctcgtccgagattgcgcgtggactggactgcctgcctggtggatgaacggattgttcgggggcggcgatgattggggggcagctggagaagagtgggagcggaggaggaaacggatgcgaggcgattccgccgccggcggatgcggatgcggcggcggcggaggaggaggaggaggcggaggcggacgcggacgcggttgtttggggctttgtgagaagggagaggtgagggatgggtggataaatagaagtagttaaccacaggcgaggcgaggtgtggtatagttaatttgaaggaattttttcagggaacccctcgaagtgttggagtattaaagaccgcaggttttttttccttttctggaacccctcgtagtgttggagtattattgcgatattaaaggccgccgggtctgcctgttcaagcgatcccattccctcccttgttaatgtgattgtatttaataataatgttgtttgcttagcaataatattgggcctacattgtttattagattttcacttatgtgctcgaatcctctaaaccagtagttttggatgttccactgcactattatacaattttttgtgaagtttaacagctgacatcagttttttttttaattctgttcatttttcgaagttgataatttgaaagtagcacagagctgatagtttcatatacagtcctaagtagactataacaacgaggaaagacaattaatatccaactattttcaaatagaccgctaattggtatttttggtaatgcacacatgcattgttaacttttactcatacaagaaaaacaaatactcgcatattttcatcttaaaacagtcagttcagattcctttcaaaagaaaccaaaagaaacaggctcaaaattttgcagacaggacgagatgcccaaacagaaatctctgttctcaccagggcgtggctgaaaagaaaggcatgaccagagtgaaaaaaaaaaagaaaagaaaaaaaaagggcaaaaactctcaaaagagtcagagagaaaggaaagccctaggctaggcatccggttcccaggctgtggccccacatgccagtacagccacgagacgcagcgtgtagccgacacgtgggcccccacgcgcgtcttctcgtcgcacctgcggttttgtcggccatcggatccagcggacggctccggctggttcgtcgccggtccagtggacggcggagattctcccaagtgagtgagtgacggatgaacagatcagaggaaaaagcggccggccgcgtcgtgcgatgagaagatgtgatgagcagttgatcgcgacagcggcgacgttgcgcggtcacgaagagggagatatatgggcggagtttagctccaaaatttttctttaaactattaactttttcatcacatcaaaattttcctatacataaactttcaattttttcgtcacatcgttccaattttaaccaaactttcaattttaacttgaaaacacacccacggtgtgaatttacgtacccctcctgttgcacccgtgtgccattgtcgtactcatccttgcaaagggggaaaaaaagaattccagctgaaaatagtagttgaacaaacgtaccaacatatactatccaaatatgacctgtttggttggagggagtttttaaaatggattggaagtttagagggatgaggctattaactattttgtttggttgtgggacatgggaattttagtgggatggagatatggaattgagaaataaactccctccttttcaatacctgggtaggggcagctaattaggagagaatttctcctttactttgcctaaacaaatctcagccatccgttttcattaatgatctaatctccaactaaactccctatcaatttccaccacctctaccaaataagagactgggataaaaaatcaaattcacatcttaatctcaccatcaattccctcgtgtaaacttccaatccccttccctcaagttgccaaacaagccaatagggtttgtttggctgcatgatacgaacaacactaaaagagtgcagccgaacatgcccatagacattttttccttatcaaagggtctgagcgagagtctgagcccttcattttcattaatagaaatgagactagaatatagaggtagcaacagagtcttaagagtctttagataccacaaaaacaaaaaataataataaaataataaaaaagacagagctaactacttaaggaagccgtttcgcttattcacggaataagcaaaacggtatctttgcaaacaaaaataatttgtgaataaaacttttatacacatgttctttgcaatataaaagtaaagcctgaaaaataaacttcaatgaaaaaccctcaaaatcaacaaattcaaattttggttgataagtataagtataagaaaaaagatgatgcagcagctatattacacagtaaagaaaatgtatagcactgatcttacaatgcattgttactgaacaagaccatagttgcgggtgaaattttgtaaaaaagattatgaatacaaatgtggtaagcctagacctataacattgctcatgactcacccccattggtttattttgtatgcctgcaaaaattccgaagtaggaatagtaggtgacattgtcaactccccaaagaaaaaaaaaggacgtttgctattagtttgatgaaatttgctcaacaaacttacctgctgggttggctgcagtctgcactctctcaacacatgattaatctggccattgacgcatggttggcatcgggaatttggaagtttgaaggagaagacgatcttttttgtgcaaaataatgttttgaggagaaaaaaatttcgaggagaagacaaagtcgctgcacctgtccaagcgtcctgtttgatgtgtagacgactttgcaagttagctagcggtggccactgccaagaaaattccgactttgcgacgactcgacaaaacgaaaggaagaaatcgcgaagttttccatggccatgcacgtccgatctttctagagggatgagtaaagtgtgacatgaggtttgtttgagagtttttttaattccgttgtactccgtagcttctctaattttttaaaactcttttaaataggacttcctactccaatagttcattctactaccctcgtagtatggttcagcttttttttttcatattatgtaggtgtaataaaatttatataaaataaattagaagatggttttctcagtttgtttagattctcatcaattagattttcactatctgctactcagaatttagaactcccaaaagaaacccataaaatttcatcagacgatgctgctcttttcaggaaatttccgagccaaatcggcaaccagacgagcagccgggagagcgagttggtgagatttggttaagtagctgcaacctgcaaatacgtagtcactgaacttgtctatccatccaaagtcatctgagagattgtaaaagagtcctgaatttttgtggcagtttgttgatctgatcacagagacagcaaaagtggattaaccactggaacatccattaaccaactggaccaaactttcacataaacaatcatgcatcttcttcgaatcagagaaagcaagagaaagacagcgaattcaattcatcccctcttcttcttggtacagaaagggacgtgaccaacttagcattaatgatctcacggcagcacagtgagaagttgacaggtactgagagaattgctgtgatcatgccatgcaagatcagacatcctacctgctccagcgtccaattccatcagagaacaacaggttagttaatactttcagagaacaacagtgtattggaatgttcttgaatctaatcacattgatgaagggatcaattgaacagcggtgattcgttagtatgtatcttgctctttgatgatgctgtccttgtctctttgagttcagctttgatggatgaactgataggttcatcatcgccagtcgccactgtacttctttttttgttgtgatatctaaagctaaccgaatacctggagtgcatctctgaattttgctaagatttggctagcagtttggaggcaacaaaattaaggttaggtctgcgaaacgaaaattgcatatgtggtgaccaaccaaaacccatccaagtttcgaaattgattgtttagcatgaagaagtcaactagctagctatttatacctccgttttttaatatacaacacacttaaccttttcttgtctcaaactttaaacatcattttttaagagaaacgaaaatagtaccgtcagaactttcatcaaaattactttaagcatatccatttgcttatctatttgcagaaatatttctaaaaacagaaatattcaaatgaattaaaaagcaacctatgtcgtactctccctgtttcacaaaaaataaaattctaataatgaatctcgaattttttgtgaaactgaggaagtagagtatactattaaaaagcggagggagtagtacggtagtaaagttaggtataaccaataggtgaggagtgaggaccattgagcaacacaggatatagtcattacattctcaattacaggcaagtacggcatgtctgtgactgcagtggtggaggaagctgactggtgagcagttggtagctttgacagactgtactgaatctggagatagcaatccgagagaccatgttcatgacacaaaaattccggcctggcaaattcagatgatttgctagaccagcttgggaccatgtgagacaatcagattaatttgccataatgcaatttggtttagaatgcaatggcaatttactggtacaacatgttttccaggtggcatgtgaaaagaggatataatgcaaacctgtcaaaaagctacgcacccttttactgtttcaggcctttcagaaaacacctcctttttgtaacagaaacaagcaggacaagcactgtaaactcaatgatgctgcaaactgaagaaaatactcaaaactgaagaagcatcagaaaacactgtatggctgtaagctttcatcattgtacgagtgacttttggacccactatctgaccatcttctcactccagttgctatacaacaaagagatgcacagataaattgaatagacaaggcaacttttgaaagagcaagataatatttagacagtttttccctaactatttgggactttttctagtgcatggtcttggaaatgtccccctgttaccaccagcatcaggcatccaggcatgtgcaaaaagattcaggcctacttcttggagacaatgcctcatcgatcttgcaaaggcatggcaactcaccttgcagacgctacatgccattgccctctaaaataaagtaactttaggtgtaagatgcaacttgtaacatgagctgttcctcttggacacataaaaaaatggaagggcagaaggtcatgcaatcttcagttaaatatatcacctacatctggagccttaaacaaaaaggtttacttgcatggatgtttgagagatatcataatcttcactgaaataacagagatgagcatagcaaaattgtttggtatagtagtgctatcacacatagcaatttgaattttcaaacttaaatttggagccgattttgaagttttctcatcgaagtttatttttcagtcttcgcttttagattgctaagaacacatataataaaagttttattcacaaattactttttgtttgcaaatatatcgacgatggctctggtaccccagaaaaaagttgttgcagcaactccaacgagaaagttcaagcactctactttggtcaaatcttcagatagaagaatgttcagtccagaagtgagcccggtcatctagaatctggctgtgtttagttcacatcaaaattgaaagtttgtttgaaattggaacgatgtgacgaaaaagttgaaagtttgtgtgtgtagaaaagttttaatgtgatagaaaagttagaagtttgaagaaatagtttcgaactaaactgggcttatgttttgaaacaacatcagttggcaaccttgcatagcgtcgtccacatcctttctccaatatcagaacacgatagtaatcttttacttgttatggcagcatccaatcagtaagatagtaagtgcaaggcttctgaaatggacatggcgatggatcgattctgaagttgacgttccaccaaaacctctagaaacggttaatgtaagttaacctcgcagctagcatggtgcatggggcatgccaaatcaacgattaggccaaaaatcgcaacaattaatcaacacagaaatatttgcaacgtcagacgtaagtgtggatgggatgtgtaatcatatctgattcactgatttgacaaatcgttaaacattgtaaggttagcttaaaaatagctaaccatgtactattttttttgttgaacaacatctgtatacccaaggcctctggaagacagcaatgtcaagttatataattcttgtcctggatggattggttatttgctgacgatagagagcagaaaggtcaagaggtcacggatgtacgtatcattaattatcttaatctagactctgcactttgaccagatggacaagctttcctaagaactttcatgagcagagtttagcagccataactcgttcctgtcttgcgtccgtagctggtgggttgagctaaggttgatatccaaagaaatgtgaaaagacaataaaaaatcatgcataatcttttatatcagataaataaggcaataaaatttgttgtttaaaagttaaatctgaaacatagaccataatatttcataaaatcaactctaaatttaaattttagctgtgtctaagccaacaagcagataacgaaagcgtgtgtaactggttactgtagccatgaaaacatggttgaattaagctagctcgatgatgctgttgtaacgtgcatcgtttgacatttagaatagatttactgatttagtccaagaaccatcgttctaacctcaattttccttttctcccgcagggaatggcacctcaattgtcatccatccaacaagaatttcaacacttaataccagcttggtgacgctgttgtaacgtcaattgtttgacattcagattagatttaatacaacaaccatatagtggagtttctaacctcaatttccatttttttaatggggaatttcaagatttcaacacttaagtaccagcgaagtgccgggcgatttctagttggatgtatacgaacagagggtacgaattgatgcaagcaaaccactgttttttctcggtctgatgctaatataaattcgtgcagatagtacaagaaccatatagtagaaatagatttctgagtgaattattatcatgggctatctacttgattataaagataaattaaatattttaaaaaataagttaacaaaacaggttagaaaaaaagtttaaccaatcagtagattttttaagtaaattacacccacagtgcaacaacttgagagcaataaatgtctaagtgcaacaacttgataaatgagtgtattatatagtgcaagaaatattctggggcaacaacttatgtaagtacgtgctattttggttaacaagtactaggcgagttattttcatgatattaatataacatcatatagcaattctatagatattgcctaatcttagcaattctatggatattacctaatcttaaatttaatatttaaaatttacatggcacatccaattcgcatcaccggtttgatttttttattcaccttctgaaatctcaattgaagtataatattttctacatagtaaagattaattgactttcaattattacaataaaaaaactaaatatgtttatgcaaatccgtacaagtatagtaacaaaataagtactaaaaaattaaatatgtatatcaaatgctcaaaataattaaattgtcatatcacttcttaacttattggactaaaatgaaaccgtcctcacaagttgttacactcgtacggtaattagaaagtttttgcgctaaattacaccctcctgccttgttgcaccgcaaatataatttactctttttttaagaaaacatttttgagaagaatggatcaaataaactataacaataatgtgaagaagcagccgagaagaacgggatctaagctagctcggtgtcgctgttgtaacgcgggttgtttgacattgagattagattcagtacaagagccatccggtggaatttcttgcctattttcccccctttcttttctcagggaatagtacctcaatattcatccattcaatttcaagtttgcactcactcaatatcgatgaagtaccgggcaatttttctagtttcgatgcagacggacaggggatatgaacagaataaagaaaacggctgttttttttttctcgaaccgattgccacaagaaattcgtgacagttacgtgctctagaaaatgaaatggacagggtgactacgagatgaagtcgagagtgacagagcacgtgtacacttggacatggacgtgtagaagaagcaggcaagcagcatatagccctgatctgatgacctcgaaagtgaggaggcccaggcccaaatatctgtcaagaaaatcacggcccaatactacaaggcccatatctctcgcacgctgaaccgaaccgccattctcccccgcggagtaagcccgcccacccacgtgggctccacgtgtcgcttctcccgaggcccacgaagccactccatatcttcgccatatttagcggagcacacgcgttcgtggcgagaagcagagagaggagagaaatccagagacgcctcgacccctccatcccgatcaaggcgagaattcgtcggcgacgatgctgcgcgcggcggggaagcgtctcctcggcgttgggctgcgcccggcgggcggcggcgctggagaggcggcggcggcggcggcggcttcggcggtggccgttgtgaggaggagggggtaccacgagcgggtggtggaccactacgacaacccgcggaacgtggggacgttcgacaaggacgaccccgacgtgggcacgggactcgtcggcgcgccggcgtgcggcgacgtcatgaagctgcagatccgcgtcgacgaggagtccggtaggatcgtggacgcctgcttcaagaccttcgggtgcggctccgccatcgcctcctcctccgtcggtgagtaaacctagatccccagtatcggtgtgcttgtgaaaatctggtgggtaattgtacgaatgatggaagtgactgatgtcgcacttgaatgtggcgatgaaatttgtaaaatagggaagttattgtaggttttggttccatttcaatcaaattctattattgcaaagcccttagtattgaatagtgccgtccccgctagttcaaaattacgaatatgcctacctgagcattgcaatattgtgaatctgagaattatagtagatggctgaaattgagtttgacttacttttttgtgatgctattggttctaatattctacgctgttgccttaatgtgttcatattagtttttatagggtatagatatatcgtgtgggcattgtatatttgtagatatcatatatcctaacacagaaattcccatttccacggctagtatccagattactttgtggatcctatgtcttatgttaggagacaaggccaacatgttaggagagcagtcactgaatcactcacaagttgttttgaggttgatcaaccaactgattcagtgactgctcttgcttactatgttaagatttgagatagtgataagcactcttatgttgaaaactgcaaatatctgtacattattccataaattcgcatttagcaattgaactctgttgaccttttaattgtttgcaagtgtcttttaggtaataacatgaggacgtgccgttatgtatccaattaattgctgtctccctaacatgttggacttgtctcctaacatgttgccattatgtagccaatctagctgtcattgcggtcacaataacatttgacacacttgatatgcatttagggtgcaccaaaaatatattgacttcaatgtttaagaagccgaaaaagttaattttgcatggagtgtcaatcagttaaacatacttgagatacaattttttttgggtttagaagtctcttttagatataatatgcgtgcttatgaagttataaagttgaaatggctattggctggctctctctagactgcatagatacaattcttactatcatgcatggcttttcctaatatcattattactatattacaattgaggttaaaaagtttgtctctctaatatagttttaatttcagccagtgagtgggtgaagggaaaacaaatggaggatgcagcttcaatcaagaacaggtaaataactgctgtacttgctgatctagtccttttttttgtggggtctttgttttcttgttgatgtagtcttttcattatatgttagttctcagcaataaaggttgttttctatgttagttctcagcaataagattcattagtttcttgtgagatacactagagtgtcctctagatggctcggtggtatgggcttcaggatatgggcttgattttttttgcagcattggtagtcataggatattttctgttcttatttgcttgatgatatctatttgcttttatagatttgagcacaatgcctgattgctgatttttcttggaagcattggctgactcatggtagtgactaccatgtccattgagtctgcaaattcattgaaaataccagggcaaatgttaaattcatgtatccttaagttttagcctgtcttttttactatagtttgcttggagttttaatggtttccaattgcatgcctgggacaacgaccggtttttctggtagtgcaccagcacatctacatttatttttacctcttgcgcagctgtaccctgcatctgaatgttaattgtcggaacttcatagtaatacttcaggactgcaaattttatctagtgtaaaatttagtacctcaatactgattggagaagaaggagaaaacaatagagcaaactgatataaaagagagaagttttaacagcaagctgaaccactttatcttctgcaaaacccaccccaaagtgtgttgtccaggcctgcagtaggcagtaggcccacattggtgttcatctcatatctgtgaatggttagatgcaagataaggcatctaatccaaaagaagaatggaggtggaaaacttaggtcttctaaatcccgtgaaattcccgaatgcttagttatctattaactaaataaagtcatctatttgatgttacaagttctctcttttatgtcagcttgctccattgtgccttggtattaggaggtaccaaattttttttataatagagaattattactttctgcattttgtaaatgtatgatactattaatataaatgtctatttgcacaaatatttatagaacatatgaagttcgaaatgaatttaaaaaagtcaacgatgtcatacatataaccagaggtagtacatctcagggatcgtaggctcatccctcatttttaggaaacatcctttaccatattattgtgagtttcacttacaatcctattgtcttccgcctgtggctagcattgcttgggcacaagctttattgtgctcattggagttctattgacttatcatgtcctgttttcagtgagatagcgaagcatctatcgcttccgcctgtaaagctccactgcagcatgcttgcagaggatgcaatcaaggccgccgtgaaggattatgaagcgaagaaggcaaagttggataaggggaacgagtagacatcctaaagagagaacaggggatagtccagtagcatagcatgtactagtatcataaaatgtgtgatgatgtttatattgccacggaaataaacgcatgcaacgttatagtttgtattaggcaaagcctgcccctggcagcggttcgtccagctatagtacaccacatgttgtcgaaggtgtacacgaaggtatgcaaaacttgccagtgtcgtttgtacccaagttctgtacatgaaaagtgcttgatactggtgagtctaatgtagaaaaggcgtttaaccaacctgtaaatgatacagtaccctagtattgtagtacttcgtccgtttcacaatgtaaaactttctagcaatacacacattcatatatatggtaatgaatctctacgtatattgtaggatcgaaacacaaagaactaaaccaaccagagggggatgaatggttggtatacccaaaaacccaaagtttttgcggaatcaaaagttacccttaaattcgacggatcacggtaaccagtttgaccgcctggaagtcgtcgtttgactgagatagtaacaccggtcgaaccgccgagatcagctcctgccgtctgtaatcgttgccggtctgacagcaggtactccgtcggtctaactaccgcgatgctgccagtctaaccaccgatgtctcgctggttgggccgccgcacccgagaaaacacaaatcgaagaactctcgaagtagatgtctcgccggttggaccgccgcacccgagaaaacacaaatcgaagaaatcttaaagtagataacactttattactcttatatgtgtttacaaagtgcaacaacagactactcaccaaaatctcgactaaattcgaaaccctaactaaatgctctcaaaagtgataccgggaagcctcacactccctctctatttatacacgaggtaggcagcctaaagccacgaaccaaactcatactagaagtcctaatccacctaggaaaccttctcgtaccagaaacaaactttacaaactccaatcataacaaatttggactccttccaaattcaactccgtatcccatgtgcacacaatacctccatcgtatgccatatggaatcttcaccaaccacgtacattgaactctagcctaagcatcccgcatgatatctgaccgtcacggacatcgccttatccccaagtcaactcccgatccatcaccggcaatactctcccgagacatcgagtcacctacacatgaagcaaataaagaaaccatattccaagaccaatctatctccaacttgactcattagtagcaaacaacagtattacatacacatagtatccttctagaaaacataaacataaaacaatcacggatatccaaacaaacaacccgaaaccaaaaccaacacagggtcggccgatcaaaccgcgagctggccggtctgaccgctcgataaccgccggtctgaccggcaacccatgcccggtctgatcggaccaaatccagcaatacatgtttaacacctgtaaatccaatcatctccaaaaccacttcgtcaataatcttcaaatatgaaaaccaataatcacatatgtcaattgttcatcacagaataataatcaaaaacacctttgattttacacatatatgtgtttagattcattaatatctatataaatatggataatgctaaaaagtcttacattgtgaaacggatggagtatatgttagaacatagtcaagggctcaaggctgctgcctgttgtgcaaccctgtcctgtttcttttatcggggctcttttatgattgaaacgcatatagacgtcgatagtccatttcacagaggcatgaaacatgtggcgtaatctgtggactttgggctgcttacggttaccagcagaaagctaatgggtttggcaaatgtggcttccagcagtagtggtgcatttgcacttcagctagcagctggaaatgaaacagtttggtacagacgttacgctcttcaggattcaggaacgtggtcttgtttgtagctatggaagttgggcactagagtacacggttttcattaactcgggttcactcgataagatacttgcagaattaaacacgagtaccctcactctcatgcaccacgcaaaagcttaagatccattgcaaccttcaagcctgcaagctgcttatccaagcaacaatagtttaaggaatagcaaccatatatctttgcctatactccatccgtcccataaaaaatgaatctaagatcagatgtgatatattatagtactacgaatctggacatatgtatgttcagattcataatactaggatgtgtcatatccggtactaggttggtctctgttcataaaaaaacgaatctagaaccgaatatgacatattatagtactacgaagacatatgtatgtctagattcatagtactaggatgtgtcatatccggtactagattggttttttatgggacggagggagtatgtagttagttgcctgcttacacacaccgttccacaattaattcgtagtgttgttccttagtacgatttgtctctgatgtgtcttgagctaatctttcacgcgattggtaataccacgatgtactactaactagcaggggaatttactatttgacatcctccaacaatcagtttttaaatatcactctcctaaatttctgttgtaatttactacccgatcttcactaattctctctcgtgtgtcactctttgcccaattcctaactacgtggctggtttttttattggcccgtggatgccctcataaaaagaccaaaataccctagggatcacctacaaggagcggcttaagaataggccacactattgcagtcactacggtcagccgcactgatgagcaggatggcaacggcaaaattgcccatggccgacgagtagtagaggatgagaccacctgaggaagccaccagcacacggcccccacgcatggtgcgagcgtggtagaggttccaggaacggtccatagcatcaaagacgagcagtgagtgaggacagttaaagagcatgagcaaccagtggtccaacgagacagggcacaccagttgtcgtggaggtccttgttgtaggtccttgttacaactacagaggttcgtaacagtcctcaaccctcgcggcgggcacaagtggtagggaatgaaagtttagaaaagtgacacttgaaactgtctttttggaaggacggtaaataataaaatctcccctaactagcaaattcagcttcatctccctgctaaaaattaatcagctacctagtcagagcatgattgacagattgagactgaactttgacgtggagatccaacctagctccacgtaaacatttccatggaattcgcacgtgcgaaataaccaatggagaggaaaaggtacatagatccaaaccaatggcaattgcacgtaactatgatacgatcagttgccgaagaagttaaaggcagtgcaaggccaaacgagacgatcgagcgcccgtttgatgcgacacgccaacccctgcagccgtttcgggggctcccggcgagcggctttccgagttaggcgtgccgaagttgctatccatccatcgtatcatcatcatcagccacctcgcgtcacgtcgtgccagcctcccccgcgcgcgcatgctgttcttcttgtacagtgcagtatataagcgtggccgtcgcgcggcgaggtgtgtacgccgccgccatcgtccgtacgtcgttgagccgccggtagccatgcagtatacggtggaagggagcggcggcggcggcgtgcagacggtggaggcggcggtgcgcaaggggccctggacgatggaggaggacctcagcctcgtcaactacatcgccgccaacggcgagggcgcgtggaacaccctcgcccgcgccgccggtacagtggctgtggcatggcatccatatgctccttgtcaactgattggtccttaaccattagtgatgataaaagacaattaccattataaccttctagcttttatacctggcccacactcttaagtacctttgcatctgtaccttctatcttagctctaatatataccaagcatagtagaaaatctctctctctctatatatatatatatatcttcacgccatcaagctgcagggcttaaccgtaccgggaagagctgccggctgcggtggctgaactacctgcgacccgacgtgcggcgcggcaacatcacgccggaggagcacacgctcatcgtcgagctacaggccagatggggcaacaggtaacgcacattaactcgatcgcctccatcgcaaaatattgctatgacatacagcatttatgattccgagatggtcttccgtttcgggctctggcggaatgacggttttcacgaaatccggtacaaagccggtagattccgaacaaatttcgtaaaccaaactttaaatacaacttccctgagtttaccgataagctcgcgaaaaccggtcagatttgttaaattccgagcaaaatcatcgaaatttcatcagtaactagaaaaagaggtaaactgagattgtttttctttttttaatttgttattcttttctttcgtactgtaaatttcagtaaatacatggaatacatcttttttttattttataaatatcatactatttataagattttatttaatttttttttccttttttatcaattcaaatttgaatttggatgaaactcatcaaaatctcagacatcttctattttggagcctcgtcgaaacctcgaaatttcgcgaaattcgaccggttttcgttggaattgtgaaccctaacgacacatgctaatattacgaatctacgtatatatatatccaaaattatagtattagtatgtctcatttagtactggctgacaaaattttggaagggatcatcgatagattgatcacttggattcttcaggtggtccaagattgcaaggtaccttcctggccggaccgacaacgaggtcaagaacttctggaggaccaagatacagaagaagcacaggaaaagcactgacggaatttacgcgacgacgacgagcgaaagcatcatgcctgcggctacagtgcaccagaacacggtggccgaggaccaaggcagcagcagcgtctccggccggaccaccaccgccaccgtcgccgtcacgcaggagtacgccactgaggcgccgccgccgagcggcatgagtagtggtagctacttggaccagctgcagccaggctacgcgagctcaatccatggaggacaagatggcggtgctgctgccgccgccgctggtgacgtcgtcgtctccgacgagttcttggcagcgtcgagcgacaacttctgggccctcgaggatttgtggcccacggtgcagtctctccacggcaattgctgaatggatcatgggtgattgtgttcgatcatgtaggccatagcaaatctatctattaacttatcaaagaaatagaaaaaatagccttcacattcgctctcacggcttaaaaattcccacattaatcggagaaaaagaaaaatagagtccatatagaaatacaatttagaaatagttgaaattcggaattaaaaaataagaaatattagaagataagactagagtacatatagaaatacaatttacaaatagttgaaattcggaattcaaaaataaggaatattagaagaggaaactggagtctatatagaaatacaattaagaaataatagaaattcagaattaaaaataaggaatattataagtagagtatagagtccatatagaaatacaattaagaaataatagaaattcggaattaaaaataaggaatattagaattagagtatagagtccatataagaatttaaaactaactaaaattcagaataaacataataaaattaaaagtagagtttagagttcgtataaaaatacaatttacaaataactaaaattcgaaattaaaaaaaaggaagaagagtataaagtcaatataagaatgcaatttagaagtaactaaaattcgaaattataaattaaagaatattgaaatatgagtttagagtccatatagaaatacaattaaaaataataaaattttagaattaaaaataaataatattagaagaagagcctagagtctatataggaatataatttacaaataactaaaatttgatattaaaaataattaataactaacacgtatataaaatacaatatgaatactatacattagtagtttcgtaaaggtagtacaaaatttaaaattatgttgtcattttaatatatttcaataatacattgagaaaacatatatgttattatgtgacaaaatataatgatgctagccacgcaatctgcgcgggccaccatgctagttagcaaagtatctgtatatgcacatcaattcttcaaaggaaatgtataaaccggaatgtatgatttggcaaatccagttattcaattcttgcagcgaaacaacgatgatacaaaatgtctcgaggtgtaatgcaacacaaaaaattgagcaagatttgggtgtcctagtagcctagtgcgtgtgttcgtcagggaggtcaggcgattgacaccttggcgccgacctcctcgagctgcttcttggcctcctcggcctcctccttgctcacggcctccttggccttcttggggagaccctcgatgaggtccttggcctccttgagcgccaggttcgtcagcgcgcgcaccaccttgatggtcgcgatgcgcgcgctgctcggcacctcctcgatcaccacgtcgaactccgtcttctcggcgggcgcgccgtcctcgccgccgcccgcggcgccgggcgccgcgacgaccgcggcgggcgcgaacgcggccgcggacacgccgaggcgctcctggaggtggtccacgaggcccctggcctcctccagggtgagccccgcgatggcgtccccgagctcgagcaccttgggggaagaagccgccgtggagttgcaggcgacggagtggcggccgccgccgcggccgcgggtggtgaaccggagcgccgcgggagcggaggaggcggtgcggacgtggaagaggggtagggtggaggagacggcggtggaagccatggccatggcgagctcgcgggttcctggatggcgcgctctgctctgcgacggggagaggagaaaaacgcgggaggagggcgcgcgcgataagataaggcgtagatgggttcgagtgcgatgtggccacacctcccgtgttctacagccgttggatctgagatggacggccaggaataactcagaaacttgcctatgcctgacgtggcatttcgagctgttcaaattattgtcaaaaataacatttccaaaatttagcaatggccaaattttagtacgctgataacatccccaacattaccaatagtattaaataacaaaataaatatttattaatttactaaaattatatagttcaaaataacatccatctaaacaggtcctcctgagagtggattttgatcccttgaggggtttgtatctcgctcaaatggttataaaaaaatataaaaaaaatttagaagatgtatcaacatgtgatatattactctagaaacataccagttcaaattgaatttctacatctcacaaaaaaaaaattaaactacagctagttaacatatattcacagtaaaatttatttttttgttatgagatttagaagttaaatttgaacttacatgtttgtggagtggtatatcacatgttaatatatcttcttaattttttttaatttttttcataaccatttgagtgacatgtaaccacaaggggacaaatagtctcccttccatcgtacttttgcactctctatctactgcctaatgacacacactgccaagcgatccttctttgttctgctcaagattcatgcagaaaaggaccagattagcattcagtaacaacttttcaacctctggcttgaacaaaaatccattctctgtcttttgctgtgcacaatgtgtcagaaaaaagtgctaggatccttggctttgtcatggccaaaaaggggaaatttggaaagtagcaaagttccaatcctccccttccacactaaccccagcctttaagctcactccaagcatatttacccaagtgatattaagtagcctccaaattgttcttagctctctctgcactaagcacaggtttgcgtgatgtcgatgtcctcgccggcgacgcctcttctggccggcggcgcgcacgccatgcggccgccgcggcaggacacgtcggcggcggcggcggccggggccaccggcgggggcgggtcgtacacgccggtgttcatcgtgctgggcgtcatcgcggcgctgctggtgatctcctgcatcgtggggcaggtctgcaccaagaagcac

SEQ ID NO: 9463 - DNA, 20960 bp, Oryza sativa
gtatgtacgaatacaaacttggtatttatacatcttgaaaaaaaaaggaaaaaaaagctgaacagaagagaaaccgaaaaataacaaaccaaacagaaacaaaaaaaccggaggaaaaaaccaaacagaaacgaaaaaaccgatgaaaaaaccaaccgaatataaacgaaaaaaagggagaaaaaaaccgaaaaactcgctcctccctccggcacatcgccgccccctctccgcgcgcgacacgtgtccagtcgcgcgaggaggaaggcgcgcgactgatcgccgaatagcaatctcgcagattaggttcctcggcggtttttagagcggttttggctgacgtggcgcctacgtggctaatttgacttgatattcatctgatgtgacattgacttggcgcttacgtggcaatttgatatagaaaaaaataataaatctcgtggaacccacatatcagtttcatgtaaaaaaattaaaaaaaaatagtgggacccacgtgagcctgacgtgtcagtccaactcattcctcctgttcttcctcctctctccgactctcccctctgttaatctctctctcctctcctctctccaggtgagagaggcagccggacctcggacgccatcaaggacgcagccactccggcggcgacctcggccgtcggcaagcaggcggccacaccggcgacctccgtggccggcaaggaaacgaccacaccggtgacctccgtggggaccgtggccagcaaggcagtggccagtgcgtcggctaggcatacgagagcccaacccacggaggagcatcaccagcaatcctgctagctcttgcctgttcatgttgcctccggccacggtgctagacagttgcatcgccgccgccaagccgaacgttgcagtggtggtttcgtatgctgtcgttaaactttcggaaccgcttgttgtatatagatgaaactgattgatgaccatctcaacaatctcgagacctcgcaggatccaaaacttgaatgttcattacattttcttttaacacagtaatatcataagcaaacacaatcaaaactgctttttttcctcgtgattcatgaaaagaaaccaaggctcggttcttcaatttctgaacttgaagcgatagtgctataggttactaggggctcagcgacggaactcaagcgcagtcgcatggaagacttctctgcggtggtgttcaggttcgtgtggtaaggtgcagtggcgccgttgcccggcatagtggccggaccaccggatggacagaaaagcgccaccatgaagcaccagagcgcggcggcgtccatgcggtcgcacatccaccagagcgcgccccggacgtcggcgggcggggactcaacaacggccgtggacagtgccgcctcgacctcggcaaggcgcgtggggagccggggacggcggccttgcgggcatcgagcgccgcgagggattcggaggtggaggcgttcgcgacgactagggccacctctctcgccgtcccttcctcttccgcccacagccaccgtgtagcgtccgttccgtcgtggcgtctagcgggaaaatttaaattctaaaaaccctaattgcgaaaattgtttctttgcttgtagtcagtctccgtgccaattccagatctcaaatccccaatccatcgtcgaattcaaatcccgaatccaattccttcccaaatcgaattcctccgcaaaagtttaatttgcctccctcgggtttggtgggccgattccctctcggcccatctttctctttctctctctctctctctccccccctctccctccctcgctctgcccgtgcaccgggcgcgcgtgcgcgtgagccgcgccgagccgagcgccctccctcttcgctctcgttgccgcttcccaccaccgccgctcaaatcgccgtgcaccgttgcttcccgcgcgcgcgctgtggtggccgaccgcctagtcgccgccgccgtcagcgcctaccgcgcctgcccgcgcctgccgcccgtgtcgccgttccgctccacaccgcccccgccgtcatcgccgtcatcacgacccggccccgccacctccgcgtaagcttccaagggatggaggcagagcccctcctcccactgccccgtcgtcctctctctccctcctccttttcccaaagtagcaaggggcaagccccccctttcttcccttctttttcccttttctcttgccgccggcgtcatgccctctgccgccattttggccgcaagcgtcggagcgccagctcactccttgaccacccaaggtcgggttccgaaccgacattgccatcctataaagcccaggcgccctcccttccttctcctcttgtttgtcccatcgcctccactccattctcgtcgcctcccgtgttctgttcgccgccgcctttcgttgccacgcatgccggaggagccggcgcgttcgtggatgcggaaggggactccgggagctcgtcttcttcctcttccccggcccgaggccggagagatcactcccgtgccgtcagcctctcgtcacagcgccccgtctcgtctcggtagagctctcctccgttctccctcttcgctcctcttcctccccttagattgtgtggtagcactcgtagtacccttagaagctcgcaggcgccgcacaagaccttcccaccgcccggcgcggcctcgccgccgttgccgctcgccgccgcaaaccgccgctcgtcgccagcttctctcggcgtagctccgcccaatccggtgctaggaatgcaatcccgaggtcgtgtagatgctctagttcgtcgtcgttcccctcttctctcgccgccagtggccgccgccgcaatcctccaccgacgaactccctccggcgaatccgagccgttgactcgtctcccctcgtctcgtacaaccacccggtgtgctcgctttcgcctgtatcgccgtggttcgcccgccgttcgcagccgccgtccgccgtccgttccggccgacgtagtcgtctacctctcgccggcccgcgtggctgccacgaaggcgccacgtcggcgccacctcggccacgaccgggtcaagccgaccccggtcagccgctctcctcggccccgctcgcgcgtgcggtccaccgcgagccgtgagactgcgtgtgggcccgccacatccgcgcccaccgcgagccgcgcgtgcaccgcgcctccccttcccaaaccctagcacgccccgcgtgcacctcgctcacggtgagccgagccgccgacaagcaggtcccacccgggaccacacaaggtggacccggcccaccggctccctctctcctcccctccccgcgagcccccttgggccgcccctcaggccggccggcccaatggcaaggccgagccgtgccaacccctctcgggccgcgctcaagccgcccgcgaagtccgttcctcctccctctttcttttctttttcaaaagggtttaattaaatcctttttcctttagataaaaaatccaataatcttagaaattcaatatcttcccaaccgtaagtccgtttgactccgttcaacttccaaaattcctcaaatctcgagatctatctaatagcacgcttagaggtcaataatagggctttatttttgccgtttgttgagttgtcccgtttcgcgtgtagtttcggagcccgaagacccgcagtgcgaggatttcgaggatcaagctcaaggtctcgagcaaggcaagtcacctttgatcatcttgcacctataatttaaatctaagtatttcttttccgcaaatattgcatgaataggattaacacgagtaattcggccgcggcttgcgagatagcctgtcggcccccatcctaattgctgcaattaccctccttgaattattgaacacttagacctcctttgttgactgttgtgcttcgatgcacgggccttcgggcacgcgcattggaacacctcccctcaaatttaaaacatccaacgatgggtaaaacttggggttttacaaaagacttggaaaacccgacacctgggtcggtgcttgcgaactaaatgaatttccaaaatcgcggaccggagaatgtaccgggagtacggtttcccgctcttgcacttaaggaccgtttccttggaatttcatccgagcataagacaagtgcgaccacatgggtagaatgggacacccctggctgagtaactagctaatcgagggaaccatgatgccaagagacatatggattcaacggggtggtgccggggagaacccccgggtttcctggcacagtatggtctgggacctaatctggtgttggtctgggacccctctcgttggcatatggtgaacctgtgtcggctttcaaaatgccctgtcatgaaagccttaaggtctctagacgtggccgttctgcacgggctggatgatccgggttagtaatgccgtgtgggtaaagtgtaccccctctgcagaggttattaaactgttcgaacagccgtgcccacggtcatgggcggatgtgaggtgattcctagcgtagttttgtttgactactgctttgtgaaattgctgctgtggaatgggttcgatatttggaaaatcggcggctgatgggatcagtcaggcccgtgtggccgtttgaaagttgttggctgggtgccaaccttgaatcaattcaaagactgatatattgcacatactccgaccgggcgtgatgcactgtctcatccgtgtcgtttgagaagcactcacttagtggtttcaaaaaggagtttaaataaaattaattgcaaaaacaacagtctttccttgaagcctgcattaaacacttaaattcccatggcttgctgagtactcctgtactcacccttgctctatataaataacccccccagttgctgaagaagatgatgtggatcccgctgatgagttcttccaggagcaagtcggttacgatgagttttagggtttcggcctagttcccaagtcgcgcctgtgatgattggtctaagtcttggcttccgctttctcttttgtaatgcagttgtgagctcgggatctgtccacagcccaacatgactgtactcctactctgtaataaagagaccactgttgctgtgatattctgtctttctgtgatactagcattgtttcctgggactggtatcgattaacaggttaatttggagcgtcacgggctagttccgttcggggctagttcggggcgtgacacaccggagccgtgcctacgccgccacgcgtcgctccctcctctgtcctctcccgccggccgccgcgcgccgctgcctctccattgtgagagaggagaggggagagagatgaactgatgagtgatgaagagaggggagagaggaggaagaagagggatgagttggactgacatgtagggttcacgtgggcttcgcaatttttttattaatttgtaaatgaaactgacatgtgggtcctatgaggtttatttttttccatatcaaattgccacgtaagcgccacgtcaatgccacatcagatggagaccaagtcaaattaactacgtaggcgccaagtcagccaaaaccgctctaaaaaccactgagggatctaatctgcactggttttgatagttgagggacccgttgcgtctggtttttcggttgagggtcgaaaatcgaattcgttgacaagtatagggacctcagatgaacttattccccacaaatatggtccttacgtagctcgcagtgccatcccggtccatgtaagtatgggccgcccggatctcgcatctcctcttaaccatgggctgtgagcgacgggctgacggctggtgagaagccacgtcagcatttaattcctcatggcccacatgcttacacacgcgctcccccactgacatgtgggaccagggagcccccgccgcattccggcacgtggcgtcgcgatcatttttcacacgtcggacgctagtccacatcaggcccacggcattcttaccggtcccacctgtctgtcaccctgggtaagttgaccccggtaactcatatggcggaaaactgaaaaaaattacagcaaggaagcaaacggttcaacctgaaaatccacaccacttagacaatggcatgtgggtccggaaaactgagtattgttgtgggtcccagatgtcagtgatgttgtagggtcagagggtaggttattgttgggtaggtgtggaattgggctctgcttagaactgccattaataaaaccaggctgcttccctccgctctcttggtgtctcctcctctactccgcttctctccacctcgccgcgacgagagagagagagagggaggggggagagagagagaagtatcgatccatccgcgtttatctccggtaagcgagaccttcgagtacctgttcgagttctagcaatggtttgattcgtgtgctttgcttcgggattggttgttgggagtagtagattgtattcgtggaggaaatgggttttagattaaaactcggagccctgtcgctcccgactccggggttgctaaatttcgagttctttggtcgtctctgcttggatggtatcgttcgtgatggcgtttgcgcgattcggtgccctcgcgttgtttggggggtggattcgaggattcgaatgggcgccttccgcggggttccgcgctccgtccattttcggcgaagcagggatcgaagaatacgatttgcgcgcggattatcccctttttgctcgcgttttgaatttgtgcggcacgttttgaacttcaaacacgtgattttctcaaaaatttaagtttttgttttcgtgtctatagtgcgggcgattttctgtgggcggcggtggtttaaatcattggtttcttttacttatcataggactaaggatttggctatgccccgtttctcgtagcttagtcgaaatatcggatatgttgcatcgaaattgttgatcctctttttttaaaaataaaatcaataagtgatagttcggggaattttactcttttaccgagttagcaaaaaaaaaaaaactttgctttactgtagcaacttagcattgctagatgtctacccgctgctctcatgattttgcacttgctgtacgtctaaatactgtggttttcttctctctttttttttaaaaaaatgatattgaattgtacttgctgtacgtctaaatactgaatctgagttagtatattttgtgtagaaactaaacatactaattgaaatcagcaccagcaaagtgtaaaaagactgttattaccatttgaaatagatttctatgctgttatggattgtgtgggcgaggatactttgttttttttttccaggaataggaatacatgattgtttgcccttattgtatgattatgatgaaccaagtaatgattaaatcttggcatggtttgtctccgaaagatgtttttaggtttctcctatccatttgtgtttacacatttattttttcattacatgaaaacttgtactggtttgttgcttttaagtgtattttatccacaaagaaatgatgatggcacgttcatttgtgttctattttgtattcattttgtttttagaatattattctagactcggtttgctttgtaatgaaaatattcttttgtcaaatatttgcagcgtatgtattatagttcatattgccgcagcattcattaatatgctaacattgatgatgaagaacaattgtaatgatgatgatattgggagtgagttttatgactcctttaatttagataataccatagagaatgtacattcacaaaacaataagttggagctggctaaaactggagagttcaatcaatatgagcaaacaaccggattttctttgccttgtggagatctgcagtatggtgagaaacttaactaacagtttctgaatgccctgtgtgtactatgttattagagaaactccactttaatgcatctataatctgtggctgttatttttcagatgtgtacctaaggactcagatagccgggcaggataataagagtggggaaggtgctgattttatggatgatggaacttttactttgcttaaggtaccagttctgctatttcttcctctcttttttttctcttcatgaaaatgttgtacttctttagtcatatgttaatatgatattgatatatgttgcatttattgattctacatttattatttaataattgctcttgatttatgttcttatttgcattcctttgaacttttattgatttgatggaggctatttcatgtacacaaatcaagtcattcaaaaagaatcagaaaaagtttatttgcttttttcaatcccgttggtaagatcactgccgaagtaagaaatgttcttggataacacatttttatttattgatgtatctgccatgtttttgcccatctatgattatctttggttcctttagtcaagttgcggaacaacatgtgagaatgactacttcctttagtcaagtgcaccatctagttcacttgatgtagtaaattattaataaaatgcttcaatcaagacttagcaaagttatactccctctagtcagcaatatttggtgtcgggagcattaatcttagtattcacaacataaaatattattagtccctccgagggactaactcatttgtagaaaatcatctatgttataatgatatatgcagtatgggattgttgaaaaacatgcatatgcacataccatgtttaccttcaatgagatgaggatgatcatgagatccagttgacaagtgaaaggaaaaaaaaatgcagagtggggtaataccattggtttgccatgcccccatccactgcagtctacactttcttctagccatagctctaggataaagaagatggttacgtgaaatctataaatacatgtaatctagaaaacaggtaaacccagacaggctgcactgttctactggtttggccaaatccaatgatgggacaaaattctaagatggtgattaaatgcacgtctcatgctttgattaacaactgttgatcttactcaaatttagacaaataaaagtttttaacctttgtaatattgcacatgataggtttgcttccaaaaatcatgtagcatttagaattgcagatactgtacatttgtttttttttattttgacaactttattaagtgtactctgtaccaacattccttttggttaacatgaactatgcattcgtctcaaaaaagatatgtacatgttatattatttccgttttcttttgaagttgtaactgcatcactctatcaggataattgtttttctctagattgaaggaattctcgcctctagtgctaactaagtggcatatacttgcaggatttggtaactgaatcaagaacttcgtcaccatattatgagaaggatcatcagttaaattcactaaattatgtcaatcaaggtaaggagttatgagttaccctttcccctgaacaagactacactgacctgcttgcgtatgtagaacacacctatttaaataatctgtttagaaacagaccattaaaatgctccttccaagaatctattttttatgggaatattgatttagttattactgtgttaatatgccactggtttactgcaatcgatgcagctaacataattgaggggttttcattgtcaacaatgatgaccattctggattcctgtatcaggctactacgggcatgctaataaccttgactgcatttaggttttcacttattgccaatgccaaagccttcttgcaaaatgtgaaatttgcatgtggttttgcattcccatccctgtcctcatctgatggttgcttcgccatcctcagccccattaggtagtatgttattggacatgggttagtgcaagaaagattgtggaattgttactccatatatctatcaacttaaacacactattacctatttttatcacttagtattaattgtttatctgccattgcatttaaattccatggtaaggtcaaagtcaaataacttttttctaatggagatacgggttttgggtattgtgtgtttctcagatggacatggcattcctacaacaacaaatcctacctgggacttgactcagagttgcaatccgttgaaccattccctgacagaggattctgttcctttcaatgttggtacttcagctggagtcctgactaatgccacctcaaatgattttattcccattgatgagctagcaatcacgagtgggagatatggagtactaccttccattgagaaaactgaagaaggcagtattgccatcgacgaagctaactcgtttggggcaactgcaaccatgtgctataatagcgttcatttctctcattggattgaccagaatttaactggtccattgcctgatttagctgatcttcctgacatatatccagacagtttcttaccaacacctagaaagaacatcactcttgttcttgatcttgatggtaagtaatgaatgacgacctttacacatgtgtttctttccttgcacttgagattaacgtcatattcgttttctttctgcacagaaactcttatccactcatcagcggttgaccgtgatggtgctgacttttcatttcctatgtaccatggcttaaaagagcacactgtgtacgtgaagaagaggccacatgtcgacaccttccttcagaaggtgtctgagatgtttaaggttgttatcttcacagctagcctaagctcctatgcaaatcggctgcttgatatgttggatcccaagaacatattttttaccaagcgttatttccgggattcatgcctgcctgtagatggtagctatcttaaggatctgactgttattgttgctgatctcgcaaaggttgtgataatcgacaattctccagaggtgagtcgtcgtgataatccatcttaaggtgccttttaattttgtccaatttttatggctatactaatgcttagggttttgaattgcttcagtggatcttggctttgagtttgaaacctgaatttatgagttcgggaagggtcctatatcatctggtgcctgaatatttttctgtcacatgtgctgtaggttttccggctacaggaggaaaatggtatacctatagagagttggaccagcgacccggctgacaaatcattggttgagctgatacccttcctggaagccattgctgttgcagatgacgtccgaccaattatcgcccaaatgttaggccgtccaagatcaattgcttagatgttgcgacaaatatcagaaactgctcatttgcttattttacaaagaattttttccccatagttgaacaggatacctgtgtggtacatcatcgaactagtttcccattgcttcttttaccgagtttgattcccaagattttgtgaattcttttggtgggaatgttaatttttgtacttgcagttctgtacgtagcgtctaccttaaactagcctatgtacaaacaaattcaatcataggagactaaagattatactccctccgttttttaatagatgacgccgttgactttttcttacatgtttgaccattcgtcttatttaaaaattttatgcaaatgtataagatataaatcacacttaaagtactatgagtgataaaacaactcataacaaaataaattataattacgtaaattttttgaataagacgaattgtcaaacatgtacgaaaaaatcaacggcgtcatctattaaaaaacggaggtagtatttcctttccaagttcatcctctgatttatctacatcatatggatgtggataagtggattgatgttgtccaggagtaaattatatcatcctgcttgatctgacaccccttcatcctagtccatgagtcgggcaagctttgaagatgaagaagagggaggttgaagatgatggacctgaaggcggagaaggaggtcatcgctggaaaagctgtggcgccggcggagaagccaacaccgaatccggtggaggtggagatatatccattatacatgtgtcatgtgtattcgacttctgtgctgcctgctcaagctggtatcatctgtgctgcttgataaataaatttgcttatggttagcactggataggaaaactttctgtctatcagtaatatcagtcaggattcatgagttttttggcccattgttgttgttccttccttggtgttaatttgcggttaatggagtaaacaaggatgtatttgtcagtgagaagttagggccttggtagcaatcaattttgcctgtctagtgactggaatttcagctggtattgatgggtagtagccatggttctttctttggtgcagactgcagaggctttaacttagctgacaattcagtaattccatagtaatatttgtcttgtcctacttctgatttctgaagctccgtaatatgtaacaaaaccacattcttttcaaacacaagaaacatgtcgaccaaatttgattacaattcggacataagcatgatatattttacatttgcatggacagaagaagtcaatttgatttgcttttgcatcttagtacaactttattccatgtaacaacttagcacttgacaagtgtagtatctagcatgcttcctttaaaacaaaaaaaattcaaaaacaaaatcacaaaatctgtaaaactcttttttttttctgaagatcctacaaaattattggaatcctgcaaaattactgggctcgcaaggattccaagaaggctgggccgatgaagaagctctcacgggccatggctaaaagcctaaaacccaaaaaaccctcctcctccctcccctatcctctcgctcgctctcctcttctccacgctcccagcgccaaatcccagcagcttccccgcacgccgcgaatggcgcctcccgccactgcctccgcctccgcctcggcaccggtctccctcctcttcctctccctcccgctctccccttcctcgtgtcgcggcctccccgcgccacacacccacctccccccgcgccgcctcgcgctcgcgccggcccgtcttggcgccgcgctgctctccagcctcggcgacgcgcaggaggaggaggagtacgatgacgaggaggaggaagagctagtggtggtgggatacgtgagcggcgcgcacggggttcgcggcgacgtcctcgtgtcgccccgcaccgacttcccccaactccgctttgccacggtacccatccctcgttctccatcatcccgctccccaatttcggagctaatatgtaatcgggcgttgttttttgttcggttgtttgatcatcacgatcatgccacgctgacagccggggaagagatggctgagggcccgtgccgctgggaagcagcaggtaaaggaatttgagcttgttcgaggaagagctcataccgggaagaagagttggatcgtcacctttgatggggtcgattccgtggatgaggtctggttttttactttgattgcattcctatacagtcatttgctcttaatttctaggactcgtagccttaaatcagcttgctatagttgatactagtttagaagtgcattggggtatttgtaggtcgtcggaaacaaactaagttgatgtttcatccatgctgtatttttgctccgcacatgcgcacatacaactttacaacaacaattatcggctgcattgagatatttataggtcgttggaaatgaactgatataatgtttcatctatgctgtacattttgttccatacatacaacatcaattgtcggcttctggcagatcaagtttacacaccatcactgagtataactgcatgattagttcagctcaacctagcgcacacgaattgtatattatggtcggcatgtgtctagatcagaatccttttatgaatagcattcagtatgtaatgtgtaactaatgcttactataagttggcatatatacctagcttctggtgtaattcgtttattactctattttcaggccaggcaaatagttggttcagctatacttgtgaaagttggggatagaccaaaaatggaggaagatgaaatctattcacttgatcttgttggcatgagagttattgtcaaggtacatattttccttttcaagttcgtgatttagttgttggtttaaataacaaaatgaatctacaacgttagcaaaggcatgatcctactatttggtgcctaggcagtaaaactgaaatatagtggtagctggatgacgtgtacatgtaatacattactggctctctggctgtttgtcttcgaccctgcctttggatactcaataaatgtgccatgtccaacagactaataattgtggcattcttttattattgagcgtatgcattcctgaaaataaaactatcttacaaaaacgctgccttatatggggttttttccctaatgctggaactaggaacttttactcttcaattgctctgtccagcttaaataagtttttttcccacctactaaaagtaaacaacactggcaaaatgtgcactggcatggacataagaacacagtattgatgcaatgatgcttgttttctcattgggcagttcttcatccaatttctaataattaattaaagttgttttgataattagttaaagttgctctgttttcatcataggacacgggcaagcttgttggaacagttggtcaggttttcaactttggagctggtgatcttctacaggttatggttggtggcactgaggatactgtttctcagccaaattcagaaaatcaaggttccaccccatctggtgagcatgtgtggattccatttgctgaggatattgtacctgatattgatatggagagtagagaaatgtggattacacctccaaaggggcttcttgagctcaacgcgcgttctgataagagatcaaagaaagaaaggcgtgctatggttaggtctgcatcatccttttcttgcatgttatgttccatgtataaagcattctttcgcacataaaagtaaagaatatgtcaggtctaaagaatttcacgtcattatagaagggggccacccctgtttcagaaaataaaaggttctaaaaaactcaaacgtttatttcagcagctgcacagcttttgcaaatattgaatgcacatgtcacattttttttaatgaatagatgcagtaaacacattgaactctcttgcttgtggtgctaaccaagaacgatgcaatcatatgaaccacctgatattttgcaaataaagcgtgaccagatgtgaaatatcacaggaatggaaggaaaagaagaggttacagcgtcgtgtaattgcagcaaagaagatactatctgaaatggaccagggtcatgttctggaaggtttgctatctggggacaaggttcagaaggcttcacttgcagaacagattgggtccattgactttcagttgttccgacatgcaatgcatagtgttagcagaccaattggcaggtgcagacttctgacaaccttttctgttctgcctaaatccttttcaagagaagctgacttgtgctgcaatttttcactaaatagatgtcagtaatttgcctctagttcttaatctagcttccttttttcgaacatgttactatttgcagcttgtcaaaagatgtctttgtcaaatcctcttcatcgaggaaaaaattgatgagaataccttacgaaaccctcttgaaccatgaagagaatgcgaacttcgctagtgaactcaatgaaggcgctgggatcattcagaagtcgaaagcagccaccatacttattacaaatgactctgataccctggatgctgagtttcagggattgcttaattcttttaataagttaatgaaggtatgcatttcatgattgtttattgcagttctttctgtatgggaactaaatatgcatgcccaatttgcagttttatgttctctctgattgttccagtaataaatttatatatgccatgctgccataaggagagagagattgaagatcgatttagtctcagtctctctcatcgttcatagtactaatctatttagctacaacaaacattaaaattatgactggttggtttgtgcttgtttgcttcatgtgctttgttgttaagagctttaggctgtgttcttctcccattttcctaacccacctctctcgttttccgcgcgcacacttttcaaactgctaaacggtgtgatttatgcaaaaactttctatatgaaagttgttataaaaaatcatattaatccatttttcaaaaaaaagttaatacttaattaatcatgcaataatatgagcttcgttttgtgtgccggggaggaggggttcccaacacctcctgaacacagccttagactctatttcattatgaatgtttggagaaaattgatatatcttttgcttgatacaggttgaagaaacccgaggctctatcccttttgttattgtttgtcctgctggtcatgtggggtcagttcagaattgtttggtagagaatgactattttggtttagacactcagaaggtaaatgttgtcttaaaatggtcctcacgtggttctatgttttgtgtagtgcgtagaaagaagtttcagccaagatgactagttgtttctttttttatatattatattagatcagttgaaacttaatcttgttattatttttcacccattgaacacaactcagtacaaagaaatagttgttttgtgttccaatttgtaaaatgtatggagaacctcgaattcgttatggtggggacaagcttacttgcaatatacagttgtacacgtactttttttcatgcctgccttctccagagttggcgtatcttttcccccctttgcagatcctaatagtgccttattctttttcctgaaaaataaatggtttcatcatggattctttgatatttttagtgattatttctttatttataacttggaatctggatattaccgattctccttttgttttttcaatttttttgtggaatccatttgcaggtatgggttctggaagaaatgaaacttccgattgtcagtatgtcctctaagctaaacagcaggaagattctgttgaagtctccatgggagatactacagaagccagcaggaactggggtgattttcagcttgctatcatcaaataaaattttagatactctaaatgaaatgggtgtggagtatgtacaggtaagatccagtgcagttcaccttcttgtcctggcactcatttggcattcagtcatttactttgttttttctaataattctgttcattatgaactgggaactccgtacacaatagtcaagaatgaagaggaacactgtgttatataaagccatgatataattgttacattttcatttcgattacctctttagaaacttgaagcacaccctttttatgtagcttaccatttgttactaccgctgcctgaaaacatatagtctaccaaatgccagactgccagtgaggcagtgatgagtgtagtatactaataaaacaaacgagatttggagggagacgtctctccaaacatttttttaagaagaaattgtgagcgtgttgggggttaaaaccacacacccccttgacactgcactgtgaaacacatctctgagtgtagtatactaatgtttcaaatccttctttcttttgagttttgaccatgcaagctggaaggttgcacttcttcctctttattttatccaagttatttcttgattctattccttcataaaccggtacctgaaatgtatcttacctgtacggcagatatgcagcttatccaataagccaaaccttgggcatccgttgctgtttggggctgtcagctcctttggcgcggatgctggcctcatgcttcgcaagagcagcaaggaaacagaagatgattttgatctgattctttccatgaaccacgtaaacaagatgtgcagagatgttactaagctcaggttctctgcgcagcaggagcaacatgtgcacgtcgagcatgtcgatggccaatgggtcgatgtccaaccagaggcaacgaactgtcatcgcttgcatgcagaggtcactagtgtcttgaactactgctctcctgacaaggtgtgtgtcatagagattgtccagcaataggttctacctgacaaggtgtatcatagaaatacagtaagcacaaggtagtagttttgtttttgagaagtgttggatggtagatttaacaccagttgacccattcatgtgcggcctacttgtatgttcttcggcaaatgccacagagaaagatggcccgctagaatatgggtcgtgaataatatttgtggcttgatccacttaggagtttggacatcaaaattcaacgaatgatatttttgcaatccaatttgtccgtcagaatatggatcctgcgtgagatgcgagcagaggaaaccaggcgcccaagcctgaaactgaaacaaaggtacatcaaataaattgctctttctattgacttttgtttgcttgtttaactgggctggaggctcaaatatcactagcatattttgcttcctcatttcaacaagattaaactttggatagctagcataacattctaccaaataatccgccgtctcaattttttggcgaatgattcattttcggagtatgcttttgcaggtttacacaagaagcaacagcttctagcaagaaaacaagaaaaaaaaatcaagggttgcaggtatgtacacaagcccagcctagtgctgttattcacattttctccttttctccacaacaaataaagtgcgagaaattccaccatgaactttctctccctcttttcctctttcaccatcgcgagctcactgccatttcaaatggacaatggccgcctgagatggaataggagtttcccttctcctttcttcaaccttcgcctgcatccatgaccagatgcgaccaattcccttgccagccttatatctgggtggatgggcacaacacaaagccatgctccggcattcccatcttgctcatctatggagcaattccacaactgcctgactaaaactctagtacatccttgaaacaccatattgaacggcaccaaccttgctgtatccaccagcaactgctgcgatgccgttgaacggagcaatgccgtatagcatgctcccctggagtgcagccctgtctgttagatcagttctgggagcactcctcgtaaagtagtattgtgaagaccgtatgtccggggctgtatctggagcaactttagcatccatcaagtgttgtgcaggcctgtactgcacacgatctttctcaagctcttcctgatgttgcctatcagagtagtctgactttaggttgtagctgtatcctgacttgttggcagctgctggaggaaccatcggattcctcaccaccctccgtgcgctgtgcggatctgcggcgcctggattctcgaatggtaataccggaccaaccgttcttcctggtctagctgtgagtgacaaagatgaaatatatgagatcaatgctctttgaattcaaaattaaaatgtacactggattaagtcacaaatggtaaagataaacagatacctgttgggatcctttgagtaacttgggatgttgcatctaggccttcatttggaggaattgatgtagagtgaactgttgtagccctgcaaagagccgatcaaaggtcagctgcaaagttcaagcacaatatctaggatctgacagccaagataacccaatactaatggtaaaacattttttcttcccttgtgtattaattttaacagatgcaatagatggcagcacaaatcactgaattggcaattatgatcacattggaaagaactgtaacgatgtaagttaccttgaaagagaaacatgcttcctatctagtgcaccactctttcctccgttttcctctaagatggcaaattgcctccggaaattatcaacagcgctacataacaaaaataaaggttgtgaatatagccatataaacagggaaataatttataagatgtgtcaagataaaaaccttggatatagaaagctcttgttttcggagccattcatgtaatccttcagaagctgaggatgatactctaatatctcacggaatataagttccttgatatcatctttggtaacctttcttcgctcaaactcaaactccatttttgaaattgggtggcatgatggttctctctccacttttgcaaggcctttaaaatatggatcagccaacgcctgattatacacaaaatagattgttagaataacatctaaagtaggcatatataactatgtttagtagcacagatgacaatgcaaaacagtagcatgaaaactaatctaattcaagtagagcttgcatgcctcttctgcagtaggtcgatccttcggatcaaatgctagaagcctttgtaagagcttgagtgccaaaggatctacatttgggaacttttctgaaaaaggtactggctgcttcctcctcatgctgctcagatacctccttgccttgtcattccgaatctgaagcagtcaaaacatggaaaaatcagacctggaataatttgtgctggagaattaaacatgtcaatgtttctgataataataataagtcatacccttgaaatagcatccattgatggtgtacccaagagatcagtcatcaagtccaattgatgaaccacatttttaccagggaacaaaggttttccagtcaaaatctccgcaaaaatgcaaccaatactccatgtatctatagctggtgaatactgcagaaaagaatcaatttagtatcaccaacttagcataggaatggaggtaaaaatgaaggtagggataacaaaaaacaactacagcagattttacaggagtacctgcaacattaagcagtgtattttggcttggcaaaaatatgttcctgaacaagccacctgctattaatatgctgctacactactctaaaactaac

SEQ ID NO: 9464 - DNA, 16102 bp, Oryza sativa
cctccacgcgctttcctttttcgcatctgcgcgcttcctcctgtttccggtttccctttcgcgcttcctccacgcgggccggttgttgggccttgcagtttatattcatgggccttctcccgtttcactttcgcgcgcgattccctttcgggacgcgggccgacggtccaacatcctccgttgggccttccagttttagcccatcaaattacatatttttccctattatctttctgggatgtggtaagtagggataagtatagggtggggagatcaatgaaagtaacttttaaatgataaaaactgtagctttcttcgtcaattatactgattttctgggatgtggtaagtagggataagtatagggtggggagatcgatgaaagtaactttcaaatgataaaaactgtagctttcttcatcaattatactaactttctgggatgtggtacgtagggataagtggagggtggggagatcaatgaaagtaactttcaaatgataaaaattgtagctttcttcgtcaattatactgattttctgggatgtggtaagtagggataagtatagggtggggagatcaattaaagtaactttgaaatgacaaaagctgtagctttcttaatcatttgtactgaattgaaaaaaaaacaatgcaagatataaaaaacatatagttaaagtaaaatgtgacacgctagatttcaggtttgcactatggagttgatcagctcgtcatttttgtatatggcaaattgacaggttgaaaaaatgttgataaaaatagttgaattgcacaataaaaacatgatgcgggaaaaaaagagaacattgtgtttcttttttaaaaaaaaggagattgccaagttgcacttcactagcagaacattaggatcgttgaaaatggcattgaactcaaacctgtgatgagaaaaaaaaataaaattgttacaacttaaatgagagaaaaaagttgggcaaaagcaacatgataagttgtgagatgtagaaatattcaatttaatactactgagttttgtggaaacaaagagccattccagcacatgaatatatgacagttgtgatgtacataaagttgctaaaattgggtcacatgaaatccatgatgaacaaaacataacaaaaaaaaaaaggggaagaaatgacaatgtgcgacttaggcatcgttcgtttaggggtgataggggagattggctctcgttttccgcgcgtacgcttttcaaactactaaacggtgcgttttttgcaaaaaatttctatatgaaagttgctttaaaaaatcatattaatccatttttaaaatttaaaatagttaatactcaattaatcatgagctaatggctcacctcgttttgcgtatcttaccaatctcctcaatccccttctcctcaaacactcccttagtgatccgaaactacactacatagaaaagttcatacatgggaagaacagcctagcagtttaaaacaaatgctacatggatatagcaatctaacagttctagtagtctaaaagtgtaatgacatggaagcatataaaagaagtaatggagcaaaaaaaaaatggtgttaaaaagaggaaataaaaaggaaatctggaacagtaccatttcccttgtgaataaaaattatattgtcacaccctacatatgaaaagaaagagagagaatgtcaaacctaaaagtagtaaccaaaaaaaagttatatataaaaatatagaaagaaaaaagaacttcattttgcaagaactcacatattttttccgatggttctaattttagggttgtgcttttcatgatgatcattagccaccaggaattatgtgagcttctcacggagtgttttagcatcatcctgttttgatgatcttatgttttaaaatatcaaataaatgaatgagtgcattaattagtttgttcatcatgctgctttaaacactttatacttcgaaaatattataaacacaagaaattagcgggggatgaaaacaaagacatgtgtattccaaaaaaaacctatcggacgaatagtaagtttatacacctaaagtttgtgcacctcgggtttacacatctgaagtttatacacctaaagtttgtacacctaaagtttatagacctaaagtttatatacccgatttaaattacaattcggattcaaatatttttttatatagaaactttatacttgtaaactttacactaataaaaaattcaaaatccaaaagtttatagttgcagaaactttatgctaataaccattatgcctatgaactttatacttataaagtttatagttgcagaaactagaaactttatacttacaaacatgctgctttaaacactttatacttcgaaaatattataagcacaagaaattagcgggagatgaaaacaaagacatgtgtattccaaaaaaaaccatatcgggcgaacagtaagtttatacaccttgagtttacacatctgaagtttatacatctaaagtttgtagacctaaagtttataagtcaaaagtttatatacccgattcaaattacaattcggattcaaatattttttatatagaaactttatacttgtaaactttacactaataaaaaattcaacatccaaaagtttataattgcagaaactttatacttacaaacattctgctttaaacactttatacttcgaaacattataaacacaagaaattagcaggggatggaaacaaaacatgttaattaaaaaaaaaacctatcgggcgattagtaagtttatacaccttgcttggtttaattgatccatggtatcggatagaataccagttaaagagaaacagggaaatagactagtaaaatcattatcacaaaaaaaagtataccttcattttgtttattgcagaatctgaagactgttgtacttcaactctgttactttcagattctgccgagctgttatctttgcctgcagagtgctcaccagtggcatccttgcttggaacataatttgaaattgaacaatttgccttgctacagtccgaatcttcacgagaactaataccatgttcctcaaaatcatccatactgcccgagtcacgtaatggaattttttatctgcgcaacagttacatagacaccttgagctcctgaccaactgatttattagaaatcattgatacaagcagatagtggcaaaggaaatcaaaaaggttatgcaaaaaagcgaaacaatggaattcagaaaagcgcaaaaaaaagatactattcatccaggagattttattctgtccaagatgtctgttctctatgtgatgaaggtactctctctaccccttggttttcagacacatgtatgagcatttttggtgacttggtgtactgagaattttttatatgttgtatattatcaaagacatagtagcaaaaacactagatcaaaaaaattgtttatatgtatggactagtcatgttagtcaccatgtcaagcaccccctgctatgtacttaccacgcatcacatatactttaatactttatatttaccagcacacagtttagccaaatcacccattgtcccataaaaaacagagcaaaatcctgaaacttaattgaacatctaatcctataaatatgagagcaaaattagttgatgaggacaccagtcactactagtcacaaaatatgagaatcaactgaaatgtgagtcaaaatcagttgatccaagaatcaactgaaattgaatcagaaaaataaaattcactagcagtcactaccggttcccccaaaaaattatctagaacaaagaaaaatctgcctaagttgattgcttatgagtgctcatgaggtggcaaacatatgcatatccacaataacaaaaaaaaaatagttaagctaacatgaacccacaaaatggcaaatagtgagggcgtatatgacaataagccatgtcagttataactgcatttgtattgatgttactggcctgatagatgggaatggtagactacaaccaaaactaaggcaaaaagattaccatttagtgctagtggccagaaatgccaaaaagtgcagatgggccagtcaatcacaaatatatatgctcatgaaaattttaacaaaaaatcatcaaaacttcgtgactaactacaaccagactgaacttaactcagtataagaggattatgagttgatgactgcaggaatacaaacttagaaatgcagaggtgtataaatctgcagtatataattaaacacaacacaagcggctgctaggttttctcagttctggatggttcgtttatatttaccagcacacagtttagacaaaaagtgcacccattgcactataaaaaacagagcgaaacactgaaactttactgaatatctaatcctacaaatacaagaacaaaatcagttgatgaggacacctagaatcaactgaaaaaatcgagtctaaaacaaaattcaaaaccagcccctatttgtgttctcccaaaaatttgtctagaacaaagcaaatctgtgcacaatcgtttcaggggaaaaaaactaactgcatagggaggaacgcaaaatagtacatttctgacaaaaaaaactcagtacaccaagttaatgcacaaagatgtttttgctcctattaaatcctttgtagttttttctctgaaaatctgactcaagtatgaatgttattagaaagcaacaactatatgatgacacctacaaaatcagattgcagctatccatgcatcatgtgaaagcctcatgataataccaggtcaagcagggcatggagatagaaaaatttctccgtgaataacttgaatcatgctagcaaaatttgctgaaagatggcaaaatatactcaagctggcaaaataacttgagatatgtagtatttcaggagccaaatatgctccaagattgcagctggatattgcactggattgaaaatcacattgcaaaaaatgcagtcatcaattgtgcagcaatatgtagtcaaaaatagcattcatttacagcaatctgcccaaatattctagctatatcaatgcattgattcagcaatatgcagcaatctacccaaattgtccattcactccaggatacacatggaaaatatccagcaatatgcagccacaaatattcccatttgcaatactcctgcttacagtagttcattgcaatactagagcttacaagattcaagcaatggcgttttgggtttagatccatgattttgctagggttagaccctaaccctagcagcgacgggcggcggtgaaggtgtcggcggcggcagcgtcaaccgcggcggcgacggcgtctacagtgtggtgcatgtgtaatccatggtgttttccctttcagtttaacggcatgattttgtgacggagaaacccaaaactccatggatctaaacccaaaaaaccaaggaactaaaacaaaaaatcgccaatcaaatcaagctagctcgagggaacagaaaatcacttccaaaaattaaaccctaactacaataaccgagaaataacaggaggaatcgcttccaaggatgctcgaggagatcaggagacgcaccacgttgcgttggagaaaaatcgtcggagaatcacaagagaaatcgaaatcgccaggagaggaagaagagggtactgttcaaaattgcaacggcatccgcttccgcttctcataagggcgataaaaaaaaaaagccaaaaacgatgccgtgctgcggatgggctctcgtgggccaagcccaataggaaagaggctgagaaagccagaaaaggcaagtggcggacgcacgtgtttggactagaaagaaaagggaaatcgatcgccactcctgtagcccagcgattgatcgcccattaggagtttcggctttgtcccgcgttgtgaggtgtgcgggtgagtggggtcgctcggtctcttgctccgatatatgtacacggatcgggagaattttggtgtcctgctcggattcggagccactaatccgtacgggaaacgaagccgaatcgttcatcgttgtccatcgtattggcgcttccgcctacgtcggcagcggcagaaaacggtcgccgtgtgcaacaactgaatcgaaggcacagcagttgcagttcgtctcagcaactaatcctctccttttcttttcagttttccttttgtttttccccctacaacgctaccgtacatgtttcatttattcccttaaaatttccgatcggcatagttcccagttgatcacaacatcgtcgccttttctttcttcagactttatgagaacatcctaaacagtaaaacagaaaagcagaggctgcagcagatcgagccaggctccgctcaaccgccgacatgcttgataatctagtgctacttaaaatgatcagagtttagtaagcttaatctgtgccccatgctgtggctggagcgtggggattgggaacggtgcgtgcgtgtaggacggagacagcccgaacgagaaccgttgcaggatcatgctcagcgccatcttggcctccagcaacgcgaagttctggccgacacagatccgtggcccccaactgaagggaaccaacgccggtgagtccttggacgccctggagacgccctccgcgaacctctccggcttgaactcgccgacgtcttctccccacacgtctggatcgtggtggatgcccgcgatcggcaacgcgaatgtcacccccggtggatacgtgacccctccgagctcggtctcttcgtatgcctctcggccaagcagcaggatcggtggatacagcctaagaacctcgtgtaatatcatggtcacctgtgacagagaacgggaactaactaaaaacagaacctgaacattttcttcatcttggtatatatgttgcactcacgactttgagatggtttatgccctcgaaatctggactgttctttccgaaaacgcgcagcacctcctccctggcacggtcctgccactcggggtgcatgcttaggaggaccattgtccatgtgagcaacaccgcggttgtatccgatcctgcaaagtagagcagcttcagctcctcgatgatgtccttcgtggtcatggttggcttggagcttccagcttcttggctctccttgatgttggtctccaatagcaatccaagcagatcatcgttaaccgcatggccatccttcatcgcgctctccctcttggtgattatgcctttcagaagctctctgacctcgcgtgcgtttgctttcgtccttctgttgagctctgtaggcagaaaccttcccaataagcaaaaaaaacaataagcaaaaaaatcgcatctcagatgtaatcaagtaatacctaacctctttaattcgggtttaattttgctattagtcaatcacctgtaacctgggaaatacaaagcttttgccatcttcataacgtttcgtgcctgctctgactgcaactggaagatcctcctcccttcactgaagctgctgccgaacgccgaccgggagatgacatcccccgtgagattctggaactccggccagacatcgatctcctgcgcaccatcagctcccacagaatcctgccatctgcttatcagctcgctggaacatgctgcaaacgccggcaacatcctctgcacaaagcatcaagcaatcctttcactgtaagaaattttacgatcctcaagaagtaaatacagacatctagactgacaaagccagaaaggatgtaaaaaaaaaatcggttatggacatgtggttgtgtcgtgtgtgcaggatggtggtgtctcaccttcagcttctcgagatggaaggcgtggttcattatcctccggtgagcgacccatttctcgccttggtggctcgtcagcccatctgccaacaaattctggacccaaagaatggacttctgcttcccgaaccgcccgttcttgttcgctaaaatctctcggaaaagtttaggatcactcacgatcactcgcacctccgggccgaaccaagtcacgcaaacattgcctgcattccatgcaacttccgtttgatctctcacgtttgcaggggcgtgtgtgtaagctgctgattaaaaggagagagccagtactacgcaccgtgctgcttgatggcggcgagttcgaacggaagcgctcgcgaggcgacgtcgtgcgacagcggcggcatgggcgcggcgagggcggcggcgagcagccgcgcgaactccttcaggtagccggacgggaagcggtagtcggtgccgcggaggccctgggaccgcagcgcccggcccagccgccgcgggcggagccagaaccggtcgagagcccgccacgcccaccacagcgccgccaatgcgccgagcgcgtagagcagcaagctccatggatgcaacggcggtgaagcgccatcgacaatctccatggtttcgatctcgtcgtatgtgtgtacatacctgcgtgttgacgtgatatactactaagtagcgtcaacaggaaatgcatggccaagaactatgttcggttgtccatgttcccaacccctcctcctcattttctacacgcatgcttttcaaactgctaaacggtgtgtttttttttgcaaaatgtttatatacgaaagttgtttaagaaatcatagtgatccattttaaaaaaaattagctaaaacttaattaatcgcatgctaaatgctgcttcgttttacgtgtaggggcactcccgaacacagccaaaagagactaagagtgaaacgtaacaaaaggagctttgtcacaagcgtccatggccaggcagatgcggtgatacaagttagctttgatttttctttggttgctgtatgcatgaagtacacaggtgtcgtttgtgtcattgctccaccgctcacatcgtcaaggaaaacaagagaactcttaactttaccgttgatttttctgcatctctatcggaggagttgctttggttggtctcccagtctcccagaccgtcacatcatctaagtcttggcctgggaacgacgccatacgcgactcgaaggctcaaaacaaggcacggctaaggattagatttagaatgcgctctcggcacggtaggagtgttgggttgttggcacattccgaccatggaagcatgatgggccgcacggactaaacatggtccaagaatcaccagcccaaagaaccttgtaccacagtggaattgtgaagttattctggagcaactcattagaacttagcggacatatacatttctctacagacatatagcaacggtgaggtggaagagaagcaggacaatagcaacgatgagcttctagatctgaaatcctcctttctccttccttcaacctcagatcctcctccctcctagccagcaagatatcggtgccgtcagaggtggcgcggcgagcttgggacatccgacggctgctcgttgtagccattgaagagatgagatgagggggaggggctccaatggctgacgggttccatgaggcgatggagatggcgacgaacaagacaacgcttgaaagagcaaatgggggtgagggaggtgaagggagcgcgaccccctatcgccccttgcacgcgcttgcccccacgcctgcacccacgcaaccccaagcctgcacccgtgcagccaggatgagcagcgaagctcgccgctagcgtttccagcgggcctggctcggaagaccgatttgcacgagcagagccaggccccgatggccatgcaggcaaccaaacatggctggcctgcacccacgcatgcgggccaggcatggtgcgagcaaccaaacacacccacactagacacaagtacacaacattagttgtcatcttcttaaatgtacataggtccactcttcatgagagcacacgtgactgacacattttgtacaaccatccgagcgaatcaaaagcacttaacaaacatcacaaaaaactaaaataaaaaaaaagttcacaaccgctcctagttcaggtaatttgacttgttctgaacacattgtccatgcaccaattatgctgtacattcagactagaaaaaagatagaccgaccgagcacgcagttctcgtctaggacaggacccaggaggtgtttgtcatcagtttagcctcgtgagcctgacctgcgcgccgtgctccggctgaagcaggccgacggggaacggcgcgtgggtgtaggacggtgagaggtcgaaggagaagcgctgcaggatcatggagaggcccatcttggcctcgagcagcgcgaagttctggccgatgcagatcctcggcccccacccgaacgggaagaaggccggcgcctccctggacgccttggagatcccctccgcaaacctctccggcctgaactcgtcggcgtccgcgccccacacgtccttgtcgtggtgcacgcacagcagcggcagcgtcagcaccacgcccgccgggtacctcaccccgccgagctccatcggcttgtacgtcttcctctgcagcgccgtcagcggcgtgtacagccgcagcacctcgtacaacaccatggtcacctgcaaaacccaaaacccaaaacccaaattagacttttatatctttaatttcgtgaatcatcagttaatcgtgtcgaagtgcttacgattcttaggcggcttaagccgtcgtaatccggggcgcggctgccgaagacgtggaggacctcctcccgggcgcggtcctgccactccgggtgcatggagagcacgaccatcgtccaggtgagcagcaccgacgtggtctccatgccggcgaagtagaacagcttgcactccccgatcacgtcgtcgatcgagatgccggagctcgcggcgccgccgttgcccttgctgtggtccaggttggactccagcaggaggccgaggagatcgtcgtcgctgcttgcctcgccggccttcaaggcgctctctctcttcgcgatgatgcgtttcagcatcccttcgatctccgcagcgatctgcttcatcctccggttggatttggtcggcaggtgtctgcatcgcaaacacgtcagatcattcattttgtcgcgtggaattcattgcactaccgtttgctactatcagcaggaggaaaacatatgaactttgcaggggaaatgggccgaacgagagatgatgaaagtgagaagggagctcacatgtaaccagggatatgtatcttattcatggtggcgacgatgagctcgatctgctcaccctggagctggaaaatcctcttgccttcaaggtagctgctgccgaatgcggcgcgtgagatgacatcccctgtcaggctctgcatctccggccaaacatcaacttcgtacggctcatcacctcctttggctaaaccttcccacttgtccaccagctcggtgcaacatgcagcgaacgctggcaacatgcgctgattattgagaagaaaaaattagtccgaaacaacggcgcctaggcccgatcactgttgccatgtccgtgacagaaatatctctctcaccttgagcttctcgagatggaaggccgggttgatgatcctcctgtgcttggcccatttctcgccctcgtggctgcccaatccgttgtgcagcaacctctggaaacgtccaaacttgagcttctcgaagtggccgaacttgttggacagcacttctcgcaccagctcaggcttggtgatggtcaccctgggcactggcccgaaccaggtgatcgacactttacctgccaacaaatatcacataattacgacaagacttcattttcgctctgaatttgtgattacatggatcccttcattcaaatgtatcatcgctttcacaaatatcgtatgataagttgcagttattttagtttataattcatgattatatatgataattgaacatgcttattcaagaaaaataaaaacgatagttttcactaaaagaaaataaaaagatatttctcacaaaaataaaaaagaaatccttgcaaaaagaaaaaaaataaaatttgtagtaacgactaaaaatagggggaaagggagataaggaagcatatcactcctctatattattgacttaataagagacctcgagtgctcatatattagattgtggaggatagaaaattatgcgaaataatggtgcatcccaaatagccaaatgggcatgttggggttcaaatgatagaaatctattattgacaggtatgcgtgaactccaaggtgccacaagattaaatccatatgtaaatccttggccttaataaatcaactgcagataatctgtcaccatcatgcaggaaatctggtttcatctctacgtgtatacctttacataccatgtggtaggacttctccgtattggaaatgtcgttggactgatttgagagaagtaatatatattcccctgcctcaaaatataagggattttaggtggatatgacttactactgcaacaaatctaaacagaaaaagatttgttggactaaaaagtgtcacatccgttcaaaatcacttatattagggacggagggagtgcacacacacacacacacacacacacacatatatatatatatatatatatatatatatatatatatatatatatatatatatatatatacacacacacacacacacacacacacacacacacacacacacacacacacacacacacacactaggaaagagcccttagatgctaaatggaaattttctgctacactcttttaagtattagcaggttgtatacacaagttcatctctttaagacaggagcccttctacagaatctagtgaagtaagaggctacaataaatcctatattcatgtattttgccactaaaaattaaaaatatgatagatttggcagcctaagctgattcttatggagacatgcatgcaagccactttaatttccaaatatgtaatatgtgaaaccacactcaaatataatccagagcataacaagatttccactgttgcttttatttcaattgcggcgtttagcgtctacatattttagtgttatcaatcagattcaaatgttgtttgagattttacattcaaggtatgaaatataattggcatattgtattttaaatttgtatagagcaatatatgtggcatcattttactaattacgtactccactcaccttattaacagtgttaattctaatggtatattaaaaaaaccatttccttccttattatgaggtcttccctctaacaaggttaataggttatataaccaatggatcaaggtctaaaagctagattagtccataaaaacttggagcgccaaaaaagatccaatagttagcttctggacattcatttgttccagatctgttgtactgtatgaaaacaatgattaattatctcaacagtgcttcaaattttatagcttaaacaggtggagcctgaaactatttgccagtgaggcacgcctttttctttttttaaaaacgaaagcaagagcactaacagatcattgatagtaggaaagtagaaaggtcaagccatttacagttacagagatcaggtgttcggccatgtctcgccctgattaaaatctcaaaaatttatggctatgatcaaacgagagagagagagaggagagtagaacatgtcgtaccgtgctccttcatggcctggtggaacagcggcatcgcgcgcggcacgacgtcgtggcagccgagcggcatggtccgcgccctcgcctcggcgctgagctgcacgttgagcggcgcgtcgcccgccggggagcggtacggcgtgccgcggaggccctgggcacggagcgcccgctccaggcgccgcggcctccaccacgcccactccatcgcccgcacggcgcaccacgcgagcaccgcgcccgcgaccgccgcccacacaagcatcagcggccgctcgtcacctgcggcgaagacgaccatccccatcgatcgtcccactcgctagcttatcgcagcagctaccctcgctcgcagagcagcttacttcccgcaacagctataacaaggagtgcagcagtgcgcagcagaaagagaaggggggaattgatcggtggtatgctcacgaccggttgtctgctactctgcctctcggctcaccaccccgctgttatatatatatatataaatcctatgtacaaacacggcgcgtgcgtggtttgttccccggcccgtattattgtttattctgcctttggaacatatgctccggattgctacttccgcgacggttctacagtctatggctggcatgcatgtcgttcactggggaaacttggaaatgtgggagcggtacggaaaggggaaaaaaaagaagaagcgaaaataagacttgtgttaattcgctgaccatcgatgttggtcgttgcatacacatctccgtccaattgggggtcaaatgatttaatttgtagcagctccctgggtctcgaagatcacacacacggtcagaagtcaaaggccagaacatgcccgcgaaccgtttcccctcgcccggtcttctcagaacggacgcccttttagattatgttgatatacatgttgtttctaaagtatattaataaagagattagcaaggagtcattggtaccgtaagacaccaatattgcattacatatggtggatccgctccaagcgatatgggtgcataatgatgattcggcagcctggtggggaagcccttatcttaacgagatactagccttttctttttttctaaaggactcattaacgagctactagctctccccgtaaaagctttatttttagctataaacttataaaaaaaacttgtctagatgcataagtataaataaaagtcttttccgagcaaacatagaaggtttttataaggactcattaacaactcaagtcgatttggcttattcatactaacaagttataaaacccacactctgctcgacgagttggcacgcttagctatttagcttgcttcaaaatatgtgtccaagaatagagcaaagatgtgatctctgagcgttagaagtggtcggatggtggataacagcatcaggtgacgctcatttcaaaagttatcaacaaagataatataatgcaattatgcaaatgaaaatgtcaagctctaggagccattccagccaaaaggttcgggagaatgggatgccaactaaaacatcaccagttggtagatctatgtatctaaatgtaacgtcccgcctcccccaggccgggcccacttacatctgatagctttcataggtcatagactgccctcacagaccaacacatgtcttcacgtccatgtgtccagtgccagttgcgctgtgtaaccactacactttgtcctcactcgtgtgcacccgggaagaatttcccggtcggtcacccatcccaaattgctctaggccaagcacgcttaaccctagagttctttggagattggcttccggaaaagaagttgcaacttgttgatatgagtattctattaatcctattaagccctaagccgggatattacactaaacctttcaatatgaaataaccacataagttcttacaaaaaaaggaggaagtcgacctgtggccacaataagggagaaggtgtggcatagctactgacggagcgtggggctcctcaccgggaggccgcgcaggcccccctttgccggttcggccggggccgctaggtgaggttctttgccctcgatctgtggaatattcacgagagagcaaatgcacaagacacgggcgatgtagacaggttcgggccgctgagaagcgtaataccctactcctgtgttctagtggatctgtgtgtgaaggaactacagaaagttggagagctaaagagttcaggtattctcagtgtcgcctgagagttcccctccttcggtgggcaaggtcctccttttatatctcaaggggataccacatgcaccacttctacctacttttcttttgggtggggacccaccctatcttgaccaaaacttggctcgcgccttcgcctggaagctaaatcacagcttgtccttgagtgaggcccagcgtcatcactcgcctgacacaggggatctccctgtcattccttcataaatgggtgaagaattgcaatggctgttgccc

SEQ ID NO: 9465 - DNA, 17861 bp, Oryza sativa
  unsure (1)..(17861): unsure at all n locations
tgccacctaacccgcgatctgaccggtcacacactgcgaccggtcacggaccggataagcgtgcgctgcgctgcatcaaatgcgtcgtggcgcgctcgtctaaaccgcaataaatgcggttaggtgagccccgctgtgctcacctaacctacacacgtggcgccaaaatcacagggggtcggggcgccccanccctcggggccgaaatgggagcggcccgacccctcggggagacagagggaggggtggccacgtcaccctcgggcccgacccccccgagggggtcaggccatgtgggtgaccgcggctacccaagcctctagtcacgataccctcggccccatgtcaccgacagtagcccccggcgttacgccagggcgattgcccccttcgagggaagcgctcgggcgtgacgccactccttaggcccggtgacaggtggggccggtccctacaggcgggcagaaacccagcggtcgcaaatcgcgcgcatcggcaagggaaaaccgactgacaataatgagtggcctcttcgagaccgctacattactcgagcagcgcgcgaatcgggacgagccggttcatttcgcctgtagacatgatgatggcgcttttctcggtcggcgagcgtatttaacgcgcgctcgatctgtcccatctcaaccgccacggccgcacatctgccgcgcgcgccgcaaacgggcaagtggggttagtggaggcgcgggcgcaagaaacgagggggcgaggtagtgggcgcgggaaacgaggagccgggaatagcgttggcaagggtataaagacgccgaggaagagattcgtttccttcctctcgccattcttccccttgccttcgccacttgagctctaactcttcgtttcctgcgccctacccttgccgcactcactcgctctcaagctcctcctccgccggcgtcatggcacggggctccgctccgctcgacggtagcgtgctgccgccttcccgcatcgtgagcgagaggcaggccgggctgccgcgccgattcatgccggaatctgccaccggcgggaggtggttgcgcggggcgagggacgcccggcgccacactacccggggcggtccgtcttcttcctttctttcgcaatggcagggctggtcccgccattctctaatttcttcatggatattctggagttttatgatctccagatggcgcacctcacgcccaacgcggtaatgacgttggccatcttcgcgcatctgtgcgagatgttcatcggggtgcgcccatctctccggctgttccgatggttgttcaccgtacagccggtatcgccgccgtcggtagtcggtggctgctacttccagccgcgggggcaggtgctgcaccgctacattccctgcgtcctccataagaagtgggacgactggaagagcgattggttctacacccccctcaccgacgaagcgagcctccgacttccgagccagcccccagcacaggcctccagctggcgggcgacggtagatctgggagacgactacgacgccgttcttgaccgcctggcgggtctgcgatcccagggactcacgggggccatggtgttcggcgactacgttcgtcgccggatcgcgccgctccaacggcgcgcccggggcgcctgggagtacaccgggcccgaggactccatgaggacccaccaggggtgcacatgggactgggaccctgaggacttcaggatggtggtccaacgggtgctgaatctcagctccgtggaggcatccctcatcccccaaggtgttctccccctctgcagcgatccagatcgcgccaacatcctgaccatcatgcaggcggtcggggcgtcgggggagcgggccctccgaggccacgatggcgcgggcgggagccgcagaggggaacaatctaccccgggagggggtcgtgcttctgggccctgcgacgggggcccggggggcagccgccctgccgacgcccgggggaagaggaagcaggagggtaccccttccccatctcctccccgagggggcggggcggtgcgtgccagcagcaggcgcccggagggtgccgtgccgacatcgcagcccgagggggagcggaagaagaaacggctccgcaagatgggggggaccgagccatgtcgggggaacctcatctcgcccccgaggtggtcgtttagccgacctcctcgcaggttcgtctccgcgcccatcgcggccgtattcattcccccatctcccaaggcgagttttcactcacccgtttctttttgtcttctggtttttcttctgcctcagcgagatcccgtcgcgccccctccgccattccaagtccggccggtccgaggccgaggagacagcgaccgcgaaggcccggagacgggaagctgaccggcgagaagccgcggaccgcctccgggaagccgaggaagccgcccaggaggccgtccgggttcgccaggctgaggaagccgctcgggaggaggccagactccgccgggccgaggagtccgtccgggaggcggaggcagggcacgcacgccaggcggcctgccaagcccccgacctgactccgcccgaggcgacgacgacttccgaggccacccacgacgaggccgcgggcgcaccgctcgggcccgaccccttgggtgacgctcaggacgagccagcttcgggggacgcccccgagtccggcacgtcgatcagcgggccgagccgcgcggcaccctcaccgaggcggctctctcctctgccttccgctgccccaccgagcgcggagcccctcttgcaggccttggccgccgcgaacaccacggtgttggacgggttaagcgcccagatggaggtcctgcaggcagagcgggcggagctcgacgcggcgtgggcgcgcgtcgaagaggggcggcgctcggtggaggccatggtggaggcgggccgcaaggcacaccgctggcacacctcagagctcgaggcccatcgtagggacctggcggagatcgccagggaggtggaggaggagcgggagactgccctcatcgccaccgccgtgttcaacgcggcgcgggacgacctccgcctccaatacgggagccgggcggcggagctagagaagaagctcgacgccgcccggggaatccttgatgctgccgctgcccgggaacggcgggcggcggagatcgaggcggcgtcccggcagcgtgaagaggcccttgaggctcgcgccacggtgctggaggagcgcgcccgcgcgaaggagagggacctggcggaccgcgaggccgccgtcgccgtccaggaggcaacactggcggcgcacgaggccgcctgcgctgaagaggagtccgcactccgcctccgcgaggacgcgctcaccgagcgggaacgagctctcgaggaggccgaggccgcggcgcagcggctggcggacagcctgttcctccgcgaggcagcgcgggaggagcaggcgtgccgcaatctggaaggcgcccgcgccgagagggccgcactggatcagcgggccgctgagcttgaggcgcgggtgaaggagctggacgcgagagcgcatagcggcggggcggccgcgggcaacggcgacctagccgcccgtctcgcagccgccgaacacaccatcgccgagctgcagggcgcgctggactcgtccgccggggaggtcgaggccctccgcttggcgggcgaggtagggcccggcatgcttcgggacgccgtctcccgtctagaccgcgccgggcggtaggcgggcctctggggtgggcggaccgcgaagtacgccgccaaccaggggggcctcgcccagcgcctctcagagatggccgggaccctccagcggctccccgaggagctcgaggagacgatcaagtcatcctcgagggacctcgcccggggggcggtggagctcgtactggccagctacaaggccagggaccctgacttctctccgtgggcagcgctggacgagttccctcccggaaccgaggacggcgcgcgcgcgcaggttcgggacgccgccaaccacatcgtccacaacttcgagggtacagcccctcggctcgcgttcgccctcgactccgacgaggagggcggtgacggtggtgcggacgacagcgaggacgaggccggcgacccgggcgcgtcggagtgagcccccaggcccccgccaatcttaaatagcttttccttcttcttccgaggccttcgggcccccttcttgtatagactgatttaatctgtaatcaaataaaaaggaaatttctatgttaattctatttgttgtgtgtatgagacggggatggtctgtgccgcggtccttctgtgtcttggcttgaacaagggctcgtgcccaggtcccagcctcaaacggcgcgggtcggggctagtgcctggggagatccacgtgtcgagactggccaggccgggagcgtggtgaccgagggttatggatgacccgattgtgggcctttgccgattcccccccggagttcaccacgccccggggcacggctcggttctgggccccttttgtcgattttagccggcccgggccaccgagggcaggatcgagcacgagcgtgctaattcaagccaagattcttcaaaaggaaacaatggcacagacacagtccttaggaaatcgaaaatgcttttattgaaatacgtaagataaaaaagataagtatatgcatgtggtagcccccggccaaccctgcacgcccggggggggggtgcggggttggcccgagcccgagacctgacacccgacccccattaggggtagaagcgacgaaggtgttcgatgttccacgggttaggcagctctgtgccgtcgcccgtggccagccgaacggagcccggccgggggacaccgatcactcgatacagaccctcccacattagtgagagcttgctcagtccagcacgtgtttggacacggcgtaggacgaggtcgtcgacgcagagtgatcgggcccggacgtggcgctgatggtagcgccacaggctctgctggtagcgtgcggctcggagggccgcgcgcctccttcgctcttccaagtagtcgaggtcatctctgcgaagctgatcttgatcagcctcgcagtacatggtggcccgaggggacctcagggtgagctcagatgggaggaccgcctccgcgccgtagacgaggaagaaaggcgtttccccgattgctcggcttggcgtggttcagttcgcccagagcaccgctggcagctcctcgatccacgagtcgccgtgcttcttgaggatgttgaaggtcttggttttaaggcccttgaggatttccgcgttggcgcgctccacttagccattgcttctggggtgggcgggggaggcgaagcagagcttgatgcccatgtcttcgcagtagtcaccgaagagctcactagtgaactgggtgccgttatccgtaatgatacggttaggcaccccaaaccgagcagtgatgcccctgatgaatttaagcgcggagtgcttatcgatcttgatgaccggataagcctcgggccacttagtgaacttgtcgacagcgacatacagatactcgaacccgcccggggcccgcctaaacggacccaggatatcgagcccccagacagcaaatggccacaaaagaggtatggtctgcagggcctgggccggctgatgggtttgcctggcgtggaactggcatgccctgcaccgccagaccaggtcgaccgcatcgttgagagccgtcggccaatagaaaccctggcgaaaggctttgccaaccaaggtgcgtgaggcggagtgggctccgcactcgccttcatggatatcggcaagaagctcgacgccttgttcccgaggaatgcacttcaggaggactccgttagccgcgcgccgatagagggtcccttccaccagcacgtagcgcttggagatgcgctggacgcgttcactcccttcgcggtcctcgggtagagtcttatctgcaaggtacgcctggatctcagcgatccaagcaatcaatctaagggagctgggaacgcttccctcgggtcccaaggcctggactccgacgggcctcgggggccgttcaggcgcgtccgtctcccctagggggtcgggtcgcgccgacggctgggcaagcctttcttcaaaggcgcccggtggggtctgggctcgcgaggaagcgagccttgagagttcgtcggcgaccgcgttatcccgtctgggcacgtgccgaagctctatcccgtcgaaatggcgctccatacgccgcacctggcgcacgtaagcgtccatctgcgggtcagagcaccggtactccttacagacctggttaacgaccagctgggagtcgcctaataccaggaggcggcggatccccagtccagctgccaccctgagtcccgcaaggagtccctcgtactccgccatattattggtcgcccgaaagtcgaggcgaaccaggtatctgaggacgtctccgctcggcgaggtcaacgtgacccccgcaccggcgccctgaagagacagggagccgtcgaactgcatcacccagtaggcggtgtgaggcagctccgaggggcccgagctggcctcggggacggagacgggctcgggagctggggtccactctgccacaaagtcggcgagggcctggctcttgatcgcgtggcgtggttcaaagtgcaaatcgaattcagagagttcgattgcccatttcaccacccgtccagtaccctctcggttatgcaagatttggccgagggggtaagacgtaaccaccgtgacccgatgcgcctggaaataatagcgcaatttcctcgaggccatcagaatagcgtaaagcatcttctgggcctgagggtatcgggtcttggcgtcccggagggcctcgctaacaaagtagacgggccgctgcacctttcggcggggccgatcctcttcgctaggggccgcatctccagggcgctcttcgtccgagaggccgcgcggggcgcactcggcttctatgccgacgacctcggggtcagagggcgacaggcgcggccttcccgcagtggccccgaggccatcctgggggtcgagggcgcctggcaccgtcggacaagcgggcggagggccagctccggccgtcgggggcctcgggccaccgttcggctcgggggcctcttctccctgctctctcccgggtcgagtcgacacagggtggggatgcgcggagtgagggctgtcctcgtcgcgctccacgaccaatgccgcgctgaccacctgcggggttgccgccaggtagagtagcaacggctcatctggctccggggcgactaggaccgggggagaactgaggtacgccttcaactgagtgagggcccgctcagcctcctccgtccaggtaaacggcccgaagcgtttgaggagcttaaataggggtagcgccttctctcccagcctcgatatgaaccgacttagggcggccatgcagccggtgacgcattgcacatccctaagcttgctggggggcgcatccgctctatagctcgtatcttctcggggttggcctcgatgcctcgggcagagaccaagaacccgagaagcttgcccgcaggcacgccgaacacgcacttgtcggggttcagctttatgcgagcggagcggagactttcgaaagtttccgctagatccgagagtaaggtctcttggttgcgcgtcttcacaaccaagtcatcaacataggcctcaacattacgtcctatttggctacccaaagaaattcgagtagtacgttgaaaagtaggacctgcattctttaacccgaaaggcattgtcgtataacaataagttcctatgggggtaataaatgcagttttttcctcatcctccctagccatgcgaatctgatgataaccagagtatgcatctagaaaacacaaaaggtcgcaccccgcggtggagtcgacaatctgatctatgcgaggcagggggtaagggtccttaggacatgccttgttaaggtcggtgtagtcgatgcacatccgaagcttgccgttcgccttgggaacgacgaccgggttcgccagccactccggatggatgacctctcggatgaatccggcctccagaagtcgcgccacctcctcgcggatgaaggcttgacgttccagggcctgccgccgcactttctgccggactggccttgcgcccggccgcacggcgagacggtgctcaatcacctccctggggaccccgggcatgtccgccggtctccaggcgaagacgtcggcgtttgcccgcaggaaggagacgagcgcgtcttcctatttgtcgtccagaagaccaccgattcgtgtggtcttggacgggccgacgcccagggcaacctccttgaccgggacctcgtcgcacgtgatcatccgctgcctcggggcggctgggacggaggtgctgagcctctcgtcgccacccgcgggcttggacgccgcggcgaggtggtccgcgcgctgctccatacaagcaagcgtgactttgaggtcgccatggatggtgatggggccaccggggcccggcatcttcatctggagataggcgtagtggaccgccgccatgaacttcaccaacgcgggcctccccaggaccacgttgtagggcagactgaggtccgccacatcgaagttcacccgctccgtgcggaagttggcggaaccatcgaaggtgaccgggaggtcgatatgacctagtggccaagtgtgccccggcgtcacaccgatgatcggctgggacggccggagcaccatccccggggccttgatgtcgtcaaaggctgcgggggaaaggatgttgagggctgcacccccgtctatgaggacacgccccaacttcacattgcaaacggtgggggaaaccaccatcgcgatctgtcccccccgggcaacgcacggcgggtgatcggtctggtcgaaggtgagggcaacctccgaccaccgcgcccgccgcgtcgcctcatgggtaggggccgcggccaaaagctctcgcttcatggccttgaggctccagcgagaagcgtgagcgcacgctcccccatcgacggtggcgatggtggcctcaggctcctggaaccccaggccatcgtcgccatcgtcgatgtcctcggcgggggccttctgcttggcctcacttcgccggttgccggcgggagccgccggggccttgccctcacggcgctcctacctcctctcctcccacttccttgtccgctcagccaaacttttgaccgcgcggcagtccgcgaggtcgtggagggaggtgttgtgcacggaacaccacttgccagtcgggcgctccctgctgggagcgccggcctccttctttttgtcgctcgcaggcctcccctttcgggtggcccgcgaagcgccctcgaccgcgaggacatgaccctcgtcgtcggaatgggccgacctcttcttcctcctcctgtcccgccgccctgaccgagcggcggacccgggggcggccgaagctgccacaccggaaccggaggagttccaggtccaggcctcctccttgcgagccacacggtccgcgagctgaaaaagctccgcggtggtctggggctccttggaggcgatcttctcgagcatgcggttgtgccgcacgccccccctgaacgcgtagatcaccgcgtgtgcggggatgcatggtatggtgttgcggacttgacagaaccgctgaatgtacgagcgaagagactcatcgtcccttcgctgtaccgcatgcaagtccgcttcttcacctgggcgcggatatgtgccctggaagttcatggtgaactgctggcacaaatcctcccaagagtggaccgacgcgggtggcaagttcattagccaaccccgcgcctgacctttcagggccatggggaagaaattcgccatgaccctgtcgtcacccccggcggcctcgatcccggtcgtgtagatctggagaaactcggcggggttgacgcttccgtcgtatttttcggtgatggtgggccggaaccttgggggccaacggacgttccgaaggctcgccacaaatgctcgacagccggcaccgccaaccggggacacggggggctggcccccgtgcccggaccaaagtggcgctccggacgaggaagcgccctctgttgcgtgggcagcacgacgaccattgcgccggcgctcgacattgaggcgggcatccggccccccacgcacgtcttcttgggttggaggcgttgacgagggaatggcggacgaacggcgggtaacggccgctgctcgccgcgctctccgcctcgacgatgcggagccggtggtagcagcgccagaggccttggtgacggaggaccgcctgccggcgcctaggcgctgctgtgctgtcatgaccaagtcggccacatcatccagccaacgtcgggctggagtctctggatcggggacgacgggcgggtgacgcaggaacgcgcccgcagcctggagcgcgccctggggcgtgctgccatcgccatagacgaggaggcgacgctccccgtctcgccgtccttctccatcgcccgcaagcggcgaagtcgcggatctttcgaccctctcgagcgcctcctcccgctcaagacttcggcgagagggggacggtggagtacgagcccgacggcgcgggttctgctccccgtcgtcaccgctagcactcggagagaggttatgcgccatcgcccgttcggccattgggctgagcgggtgaagcttggcgcacacgaaagaggacgagggcttagaaagacacacgcgccccctacctggcgcgccagatgatggagcgtggggctcctcaccgggaggccgcgcaggcccccctttgccggttcggccgggggcgctaggtgaggttctttaccctcgatctgtggaatgttcgcgagagagcaaatgcacaagacacgggcgatgtagacaggttcgggccgctgagaagcataataccctactcctgtgttctagtggatctgtgtgtgaaggaactacagaaagttggagagctaaagagttcaggtattctcagtgtcgcctgagagttcccctccttcggtgggcaaggtcctccttttatatctcaaggggataccacatgcaccacttctacctactcttcttttgggtggggacccaccctatcttgaccaaaacttggctcgcgccttcgcctggaagctaaatcacagcttgtccttgagtgaggcccagcgtcatcactcgcctgacacaggggatctccctgtcattccttcattaatgggtgaagatttgcaatggctgctgtccgaatgaccctccgatgggatgggtcatatctacctccactccgccggaagcagatgcaacgtgggagctcggttgtctgccgatgacgtgaccggcgtcagaccagtcacagaccggtcattcttgtccaccacgtgtcagtttagcacgccgcacgtctgcccttcttcatacaatgacttccttgcaatggttgcgatgaagcctggaatgtatctggccgggactgacgtgccaactccaggagttaacacgccggctccggctagggacgagagcatggaggctctcatcatttcgacgggacggggcgaggcgtgtgacaggccgcctgttgccacctaacccgcgatctgaccggtctgtgaccggtcacacactgcgaccggtcacgaaccggataagcgtgcgctgcgctgcatcaaatgcgtcgtggcgcgctcgtctaaaccgcaataaatgcggttaggtgagccccgctgtgctcacctaacctacacacgtggcgccaaaatcacagggggtcggggcgccccagccctcggggccgaaatgggagcggcccgacccctcggggagacagagggaggggtggccacgtcaccctcgggcccgacccccccgagggggtcaggccatgtgggtgaccgcggctacccaagcctctagtcacgataccctcggccccatgtcaccgacagctaccatcaagatggcaattatattgcacatgcagatatgtcatttgaattgcgcagacattataaaaactagttgagcggcccgcgcatttgcgtggctagcattaatttaaaattatctatttttaccacatgattttatttaaattatcattaccgtgattctaataattttatagtttttaaaagcaacgtcagtcgctacccttactcctttgtcacctttttatttgcttacttgatctaccattacttatatttattctctttagaaatttaaaaattagaccttatagtttttagatttcattgccttagtgggtttcgttttcataatttttagaagtattgtcaaacatgccaatttattattctacggcccatctgctgccacatctttttattgtcattgggattttaaaaatcgaacataattattgtttgtgttctttttttactttctataagtcttgtcaatcgttagtggcttcaccactatactcttctacagccagcccgctgcctccctccttggtgtcattggaattttaaaaatcaaacataattaccattggggtttatttttactctccataagtcccgcaaaccgttgtgactatgctgcttaacggtatggccatcgccactccttttaatcatcattgggattctattggggttttgtttatagttttcagatatcccatcaaccaccagcactctactcctttataggcctactgcttctcccctctttattatcatttgtcatcgctgtgttttagatggaattttttttttgaaaattgcatatttttcattccgataatttttattcataaattatattgagtaaattacacccatggtacaacaacttggcaggtgtgtgcgatatagtgaaaaacttgagaattgaacgtccgagtacaacaacttgacaagtaggtgcattctagtaaaaaaaacatgaaaaatactgataatttagtattttggtgcatcaacttggctaagcatatgctaggtgggttttgttcacgatgtcaatatgccattatagtattcctacggatattaccttatagtattgaatttaatctttaagaattatactacacttacaatttacatctaattacctttaatttttttttgttttcttcaccttctcaaatatcaaccgaaatataataatttctacatctagttttattgactttcagttattaattattaggatacaaatataaatatgcttatacaaatccacgctagtatattttcaaaataaatacttaaaaaatgaaattatataaaaaaaatgctccaaataattaagttgtcacataaatttttaatttagtgtatgaaaattgtgcctatcttgcaagttgttgtatttatacgatcactcttatactaaattacacattcttaccaagttgttctattataacgctcatttctgaagttattgtaccaaattgcactcacctaccaagttgttgcaccgtgggtgcaatttactcaattattatattcctacttgaactcttataattatttttatatttctaaaacttattttatgtgttatttaaaactttaattaatctcgttatgtgttctacattgtcccatatttcaatagtctttattttttattacacattttagttattaataaattttattctagttgagctgttatttgtatttgtctattttctgaatatattttattttttatttcgagttttaattagtctcgtattgtgttatatatcgactattttttaatatatttttttttcaaatttcaatttttcaaaattatactcctacttgaactacattttttattttttatgattttggattttatttgattttttgttttgaattttaattaatatcatactggtttcttatatggactcttctttcaatattgcttattttaaatttcgaattttagttattttcaaattgtattcctatgtgaacttttcttttatttctattctagttgtggattttattttatttttattctgaattttaattaatctcatattggcttcttatatgtactcttctatcaatatttcttgtttttaattccgaatttcagttacattcctataatagatagatagatttcattgtggtattgaaaatggtaaacgctaatttggttagttagtgtcacgccccgaactagtaccgaccggaactagcccgtgacgctccaaattaacctgttaatcgatactagtcccaggaaacagtgctggtatcacaggaagacagattatcacagcaacagaggtctctttattatagagtagaggtacagtcatattgggctacggacagaccccgagctcacaactgcattacaaaaggaaagcggaagccaggactaggaccaaacatcacaggcgcgacttgggaactaggccgaaaccctaaaactcatcgtaaccggcttgctcctggaagaactcctcatcagcgggatctgcttcgtcttcttcagcaactggggggggattatttatatagagcaagggtgagtacgggagtactcagcaagccatgggaaattaagtgtttaatgcaggcttcaaggagaggctgttgtttttgcagttgattttatttgaattcttttctaaaaacaactaagtgagtgcttctcaaacgacacggatgagacagtgcgtctcgtccggtcggagtatgtgcaatgtatcagtctttagaattgaatcaaggttggcacccggccaacagcttttcaaacggccacctgggccaacaactttcaaacggccacccgggcctagctgattccatcagctacatatttttcaaacatcgaacccctttccacaacagcaatttcataagcagtagtcaaacaaaactacgctaggaatcacctcacatccgcccatgactgtgggcacggctgttcgaacaatttgttaacctctgtagagggggtacactttacccacacgacattactaacccggatcacctagcccgtggggatcagccacgtcgggagacctccaagctttcatgacaaggcatttccaaagccgacacaggtttaccatatgccgacgagaggggtcccagaccaacaacaggttaggtcccagaccatactgtgccaggaagcccaggggtcctccctgacaccaccccggcgaatccacatgtctctcggcatcaaggctcccctgataagctagttactcagccaggggtgttccattccacccatgtggtcgtacttgtcttatgtttggatgaaattccaaggaaacggtccttaagtgcaagagcgggaaaccgtacacccgatacgttccccggtccgctgttttggaaattcatttagttcgcaagcaccgacccaggtgtcgggttttccaagtctttcgtaaaacccaagttttacccaagaagttttttagattttaagtttgaaggcgtccgtcgatactcgcacagggtgcacgaatatcaagacgcaactagatggttacaaggggacacgatataacaattatcaaaggaaggatcaaatgcaacaaattaggtaggtccgccaatctgccttgcaggcgagacaacagattaagtgcgatcctatcaatgcataatatttttaaaaaaacataattaatttcaaatataggctcaagatgttcaaaggtggcttgccttgctcgagatctggagcttgatcctcgaaatcctcgcactgcgggtcttcgggctccgaaactacacgcgaaacgggagaactcaacaaacggcgaaaataaagccctattaatgacctctaagcatgccattagatagatctcgagatttgaggaattttggaagttgaacggagtcaaacggatttacggttgggaagatattgaatttctaagattattgaatttttggtctaaaggaaaaggatttcattaaatcctttttgaaaaagaaaagaaaagaaaagagggagggaaaatagacttttcctcgggcggctagtgcgcggcccgagagaaacggagcggttcggccggcccaaggcggcccaagcgcgcgcgcgggagggaggagagagagagccggtggaccgggctcaccacgcgtggtcccgggtgggacccgcttgtcggtgacacggttcaccgtgcggagcgagcacgcggcgcacgcgcgtgggcggggaagggatgcggtgcactcgcgtggttcgcggaggaacggatgcggcgggcccacgcgcagcctcacggctcgcggtggaacgcgcgcacgggaggggctgaccggggtcggcccgacccgatctcggccgagctggcgccgacgtggcgcctacgtggctgccacgcgggctggcgggaggaagacgaaggcgtcggccacgaatggacggcgggcggcggcggcttctccggggcgccttgcgacgatgaggggcgacggggcgtacaccgggatgacgagggagaatgagagggagcgagccaacggcttggattcgccggagggtgtccgtcggcggcggattgcggcggcagcacccggcggagagaaaagggggaaacggcgacgaggtcacgagggaccgattcccggcggcgagagcatctacgcggctacgggaatccgttgctagcgtcggattgggcggagctacgccgagcgaggctggcgacgagcgggtgctacggagctcgggcggcgacggcggcgagcacatggcgagcggcgacaacggtcggggcggcgccggctagctacggggaggctactcgtgctaccaccgaaaactaagggggggagatggagcgaggaggaagaacggagggaggcactaccgagatgaggtggggcgctgtgacgagaggccgacggcgcgggagtaatctctccggccttgggccggggaagaggaggaagacgagcgcccgtagtccccttccgcgtccacgaacgcaccggctctcccggcgcttggcgatgaacggcggaggcgagacagagctcggaaagcagcggcaacgatggagtggaggcgaatgggagaggaagggaaagggggaggcttgggttttaagggcggcaatgtcggtttggaaaccgactttgggcggtcaaggcgcgagctggcgctcggcgctcgcgtccaatcggcgacagggcggagggaggatgatgccggcgggaggaaaaagggaaaaggagggagagaaagggggctcgcccctttcttctttggaaaaaggaggaggggagcgggggcgtcgcggcagagggaggagggctctgcctccgtcccttggcgacttgagcgcggagtggcggggccgaggcgatgacgacggcgatgacggcggggcggtgtggagcggagcggcgacacgggcgacaggcgcgggcaggcgctgacgacggcggcgaccaggcggtcggccactcggcacgcgcgcgcggcttgcaacgggaggcgcggcagattgagtggcgcggctcgggcacgcgcgctggctgcggggccgagcggctgcaggcgcggcagagcagcggggccgggcggcgcagacgcgacgcgtgcgacgaccacgcgagcgcgcgcacgaacgacgcgcggggagcggcagcgagggagcgaagaggagggctcggctcggtgcgggcggctcatgcgcacgcacgcgcagcgcgcgggcggagcggaggggggagagggagagagagagcgcgccgggggaggggaggagaggggga

SEQ ID NO: 9466 - DNA, 38921 bp, Oryza sativa
atatagacagactctagtctcctcttctaatattcctttttttaattctgaatttcaactatttctaaattgtatttctatatggactctagtctcctcttctaatattccttattttttaattccgaatttcagctatatttaaattgtatttctatatggactctgtcttttctttttctccgattaatgtgagaatttctaggccatgagagcgaacttggaggttcctttttctattcctttaattatatatttaattccaaatttctttctaaattgtatttctatatggactctagtctcctcttctaatatttcttatttttaattccgaatttcagctatttttaaattgtatttctatatggactctgtattttctttttctccgattaatgtgagaatttctaggccatgagagcgaacgtggaggctcctttttctattccttaaattatatatttaattctgaatttctattttttcctaattgtatttctatatggactatatagtctacttctaatattccttatttttaattccgaatttcagttatttcctaattgtatttctatatggagtctatactctacttctaatatttcttatttttaattccgaatttcaggtattttctaattgtatttctatatggactctagtcccctcttctaatattccttattttttaatttcgaatttcaactatttctaaattgtatttctatatgtactctgtttttctttttctccgattaatatgagaatttctaggccgtgagagcgaacgtggaggctcatttttctattcctttcataagttaatagatagattccacacaaaaataccatattcagccattgacagatattgagccatattctatgaatgttatcaaactttcttccaagttgttggattgacagtgagagcatctaatcgacagatattgattggaaccatattctacggatgttatcaaactttctgtaacacacagggagctataactcttacgcaacgtaccttgatcatggcttcgtccccaaattgcgcacatgtacttgcatttattctttggacatgttatgtgccataatgtggaacaatattctattgcatgaatatgatccgcgtcattatcacaagaattgcgcacatgcctttgacacctcagcgaaattgtcacgatctttggacaagcatatagcagagcagcagtctagcagacaaaataattgagcattagtttaatttgtcttgtcataaaaaactggagctattgtcgcatatacccgtctttgtctacgtgtggttcgcctttcatcggcactatatgatgatatgaatagggggtgttattagtggactaattgtttattgatatttcattaaattggtgggccagttcctacttaattaatcgattgtgctgttcagatgctgtagcctgtagccctgtagccaatatccagtccagtggccgtatatgtatccaggccaggacccaactagcctccaacgtaggatggaaatgattttgcagagatgagagggggcgagatggaggagtgcggggttaagcaacaaaaagctgtttcggataatatattaaatgaaaaaacttgaattatagctaagactattgtggccgtacaaattacctctctcaataaaaaaaccaaatatcctttaccctcaactttttatatcggacaaattaccacctgacaaactccggagcggttttaatcgtacgtgacgacacgtgctgtctaaccaacaacaaaaaaaaaaggtaggactcacatgtcgtgaccgagagaagtgatggaactgacaataggccctcactattttttttattttcttatgatgactgggctgctacgtatgcgccacgtatgaccaaaaccgctccggagtcggacatgggagtaattcatctggtataaaaagttgagggtgaaaaacgtctggttttttaattgacgagggtagttcgtattgccacaataggtggggggaggtaatttggactttttcctatattaaaaaatctattttcagcctaaattttttttcatgttttgatgaggacatcacttcgtcggatacacacataattcacacgttctaatgataattccaagtccaagtccagttcagccttaagagacatcactgacttcaaacggacctagcgtcttcatgccaactctgatttgggtgatcttggacttcatggaaagattatctcgccacctttcaaatacatttggtctcatatccaaattcattccgagtcaacaggaatcatcaaaacaagacagtgttgttcctgaaaccgaatttgggccttgggctttgtaatagactaggcctatctcggaaatgtctccctccacctccacgaattaacactaaaccctagatctattttcctctttaaatgtctatgtacaccctctagaacaattgggttttgtttagttgaattttgccaagtgtcattcaccttgtctctaatcctcgctcgattagtcggtgactatagattcagagcccccaatagatggtgtgttgatttgccaggttgattagatctaccacttcaatcggaactattcatttgtacttaattacctattcgcattatttagattgcatcttatcttgttcttgcagtgttctctcgtttgcattgcagggatcatcaaccgcatgtcacggttggtacgacatcatttgtgctgtagcgattacacgacgtcctgggcttgttccggtaggtagccacatcgtaaacgtcgcactctatctaagcgagagttatcatctcaccagaagatcgagccacaagagagagtgtcatcatgtttaggtcctctttgaaataaacaaaaacatagtaattccaaaggatctataccctatgggaaataatcctatgaagccctttgaaatgatggatgatttctattaatttttctgaaattcctatggaatagagtattctataggaattatagagaaaaaaataagcatgggtcttacctcatgttttcttcttctcgtgtttacgtagggatggcaatttcccacatggggccggggacccgcaggggacctgcccctacgggggcgggggcgggggcgggtgtggattttaacccgcggggagtcaggtccggggccccggtcatgagcgggggcggggacgggtgaggacatccacccgcgggtccccggaggatgtatattggactatgaaatagtagcatattacgagcccaaaagacccatcaagtctaaccctaattcctcatctattcccttccctaaccttatcctcatttcccttcccaccccacctagccgtcacgcggatagcggaagacggcagcggcaccagccacacgcgggcagcgagccggtgacggcggccccgcgcgggcggcgacggcggccacgcgtggacagcggaagcagcagccatgcgcgggcggcgtcggcggcctcttgcgggcggcggcgtcgacgaccaggggcgcagccatctgcgtcggcgtcagcgacgcatccgcgacggcgacggcaagggctagcatcgcatccacggcggcggcggcggctagggagggcacatccgtggtggcggcggccagggaggcgcatccgcggcggtggcggcagtgacgcccagtccctagccacctgtctgtagctgtccctcgtcggcgtcgccgctgctatgcggctcctctcttgtcagtactcaatcgtcagtcgttagccgggtggtgtgggccccgctcacccatgggtcccctgcgggggcggggacgggtgatggttttcacccgaccatctctgcggggccggggtgtcgaagcccgaaactaatcaatgaattaatgtatcaatccctggatcagtaaatattgatacatacaatatacctggtttttcattgcatatgttaaagttttacaatactaagggttttacaataataggtactcatctaattgagtaactagaattaatacacagcggaagtttctatacattctgactagggaggtataacctttagaggttttctaaattatgggggtcatcgtagtaatagttataagggtcctcctcttgaccgaaatctgaaaaggggttataagagcaaggatgagtatttacaatgctcagcaagttatcatggaaatatgttatgcattagcatataggagggttctttgcaaaaagcaataataaacaatctggaagaattatatcaagaattcataaatatatagactttaaatttctaaccagggtaccatatgagtcccggtactcaactccatgagtacggctattcgaatagtttcaaagatattttattgcagcagatgtacgctttacccgcagtccacgacttgctgataatcgtcggctttagtcatggcctagtattaagtcattaacaattgtggcacctgttccatgaacttatatccttatatgctctgaacgtattgttaacagcagcaagaggagttctggcgttcccgagatatttaaggggaactgatcgtatgacaccacgtcatctcgatcagggtttagaaatataccatatagtttatactcgagtatcacaaaccatttacctgtacatggtaatggttaaagttgcccttcgcggctatagttgcctcttgcgcgaggacttaaaaataagaaccactatacagaggtgccatattgctaattaacataataactaggtttgtccccattctagaaactgcggtcgtacctgttcgttcgacataagtacctggtaaaacttatatcgatcgagacagtactagccacccggaaatcatccaaatcttacgtactgtgccaatctaagtataaggtattttaaccagattgtaagcaaagtaggcaatactaaaattatctgggtttctatgattgatttatgcatataaaatagaatattgaatagaaggctataaataaataatttgtaaaatataggtctaaatgatcaaaagttatatggtaacttgccttgctcgatgtcctgagattcattgatattatctattgagtcagaagaatcctcaagacctagggttagacatataaaaattcaaatttaaaagaaattcaaataaaatccaaaaataagaaaaatggagaaaatgaaataaaatgcaaaaatagaaaaaaggggctcaaaagatagagaatgattttagaagaatattcgtccaaatttcactggaattggatctatattttaaaagatatgggcttctaaagttttgaaaatcaaataaatgtgaaatagcactgtgtgcggatcccacctgtcagtctctctctctctctcttctcttcttctacctccggccattccccaaatcgggcgatggagggggaaagtggttgcggccgaggaggggagggagctagggttctccggcgacggcgagcggcggcggaggggttaatttggtttgtggttgagctaacggctaggacggcagtggcatagttaagccgtgaaggtgatcggggtgatgtgagtgagacatggctaggggagggctcctagagcatctacgaggtacttagatggattccagcagcttgccgatctttggcaaggtacggagaatacttgctgacgagcgcctccattggcagcggtcgtgctcacgtcggcagcccagagggcgacatgatagtgcaaagtgatgctaaaatagaatctagggagtatgtagatggttaaaacggaagaactcaccgagatcggttgaaacggaggattgcggccggaaaaacttctcgggggcgaagaacagagcagtgcgagggcggcggtgcttggcttggcgcggcgaggtaaaactcgacgcagggcttgggttagggtctaatatactataacatagttgatataaggtgttctaaggggtatttagggcggaagatggatggagggatgtggagtcgatcgcgcacaaggtgttcgaccgacgggcgattggtgaatcaaagcttcggggttgtggggctatggttgttgatgatcgatgatggacaaggaagggattggggtcctatttatagggctaggaggaacggatgagctcggacaccgtcatcgccatggatgagctcaaggattggatatggctggggcggcagaggctgtgagaggacgggcaagatcaatttgagtggcgggaggccacgtttgaatacttaccagcgaaggattggcttgaccgcgtgcgaaatcggctggcgacgtgttggcgccaatccgggcgcgatgcgcagtggcggcgagggtgaaaacggccgactcgggggtgaatggtttgaattgtgagaggggataccaccgtctatcttcaatccaaccgtgcggcaagaattggcgtgattcaccatgggtagaatcaaaatcggactcggcggcggctttggacgggcgcgcatggcgtcgagcggcgatttcttgcggctgtcgtcgtcctggctttgtcgtcgtcaagatttgtgcggcggcggcggtctgagggcgtcggacgggcgacgacgcgccaaggcggtcgggcacgcgcaagcggccccgaggccgatgcgcggcgacacggcgcgcggctaagtcggatgcccgggcggcgcgccaaggggaggagaaggccaactaaaccacagtttttgagtgggatgtgggccccaaggattcaacatagactttgcaaaggattggacagggattgggctgagttagttgggctaggcattctgccgaacaccttgaaggcaatgaacagtgaaattcagtaaatttgagtatttttttctagaaaagattgaatttgaactatgaatttggaagagttttactagggtttggagtgtagtgaatcctcactaatgttaaggtaaacttaaggaaataatctaaagtttgaaatttgagagaatttgctcaaatttactaaggtttggaataaagggaatatttagggtaaattagtagggttataaggaagtaacacttgaaccaattaagaaatcaaataaatttttaaacacactaatttaatcaaaagtcagcatgatgcagtcaaattttagtttaaaatttgaggatgttacacggggccgggaggagaagtcggggagcgggggcgggggcgttctggcccaacccgtacctgacccgccccgttgccaaccctatgtctacgtgagtgttcagtgcttcctttacggcccaattatggataatgggatatggtccatcattaatcatgttaactagttgggccgagatggaaaatgtgtctttggtctttcgtgggggataagtccactaaccatctctcatctttacgttatgtttaaccgacatacttaattgtaaaactagaaaggttcgttcaatcttggcaaaacagtctaaattagatctcatggaaatataaatagttggttttcattgatgtggcatcctagtaaaaaaagatagataaacaaagcatgtggggccacatgtcagtgtacaattctttcttctatctttttccccaactacacacgcagttcaagggtggcagctatggacgcagagacggtcggtgagcctgtcctagaaaagaagggaggtgaggggccgacaagcttatactcctcctctgcagtgcgcatagcgcgcaagcctgaccttagtgaccttgggtgtcactgtggcaccaacacgggagggccatgtcctgtgacacgcacagccgagaggaggatgccgaaaagtacgccaaggccaacgcccacaaggcctcccgcatcagcgcccaaggtcaccaaagttgagctcgcatgccggctccctcgcctccctcttctccttcacagtcgcccttggccagcgaagataggggggtagccagcgagctcgtccgcgggaggtgacaactgtggtgggaggttggcgatatgggggcttcaatggtccgtgatggggggcctccctggcaacgatgaggtagcaacacgccacgtcatctggttggcaggacgatggcttggagggtgaaccagtggagcatgaagaagtcgtcgaggtggcgcttgtggaggaacgtggtgtggacagtggcacatgtgatggaggagggggtggcagttggagtggagcgcgtggtacatgaggtcagcctcccgtccttggagggggacatgaatgcaaggatgttgttgtggagcacagagcgcgagtgacgggaggggctccacaaggtacaccgtgctagggggcggcgacgatgtggggtgcactgcggcaccgcgcttggtgggaggctatcgccaaggcggcgtcggctgttgaatagtcccacattggtcgtggaagggcaaatgacctaacatataagtgagggagccccttacctcaatggctagcttttggggtggaaaagactctttacgatcctacaattttggcatcagagcctagctagtttaacatctttggtccgatagacatagtgtgtgcaggcctgatggaccgtgggtgcctgcggggcccgtatacctaagggaccgtggtgaaacggtgaaggggcggtgaagggttgagggacaccaatatgtgaagggggagattgttgaatagttccacattgatcgtggaagggtaaaggacctaacatataagtgggggagcccctcacctcaatggctagcttttggggtgggaaaagccctttacaatcctacatcggcatgcacgagcgggaggagtgctggcacaagatggcgtgctgagagtggcttggacaacggcatctctcgtggcatgagccacttaaatatgtgctcccacatagtacttttttattttctccttgatgactaggatgccacatcaatgaaaccagccatccatattatcataggacgtaatttttgcaagttaggggatcaagatttctggtattacagtctaggcaacgattttaaactcgatgaaaatgagggacataaagtggacttgttccttctgtgggtagatttcattgttcaatgagtaaatacttgggccaatcaaaagcccatatctccttgaatttttatttccaacatccatacaagtgaagaaagcatcatttcatagggcatttcataggtacaccgtacgcaagtcacaagaaacaataagtatgttacgtgaccgaatatcacgaccagattagatcatcctaagcttcatctgcgcgccgtgcatgggatgcaacgtcatgacggtgtgcggtgcgtgggtgtaggacgcagcgagctcgaactcgaagcgctggaggatcatgcacaaggccatcttagcctcgagcagcgcgaagttctggccgatgcagacccgcggcccccagccaaacgggaggaacgcgccgcggtcgttggacgccctggagatcccctcggcgaacctctccggcctgaactcgtgcacgtctctgccccagatttcgcggtcgtggtggataaacagcacaggcagttcgaggatcacgcctctggggtacacgacgcccccgatctccatctccttgtacgtcttccggctgaagacgatcgccggcgggtacaaccgaagaacctcgtataaaaccatggtgacctgaaagcataaatgcagagaccgataaatcgatgtctgaattaattgtcgacactgacaacatgaaaggaaatacgatattcagtgtagtgttattgtttctccgagtacttaccgtcttgagtcggctgaggccttcgtactcaggtttgtccctcccaaacagaccaagaacctcctcccttgcacggtcttgccattccgggtgcatgctcagaacaaccatggtccatgtgagcagcactgacgttgtctccattcctgcgaagtagaacagcttgcactcctcgataacatcttcagttgtcatccctgggctggatcgtccattctcgtctgcgtgcctcatattggactcgagcagcaggcccagcagatcatcgttggtgctttcgccttccgcgatggcctgcatcctttttccaattattcctcgcagaatggattcaacctcactgttgatcctccgcatccttctgttctttttggtaggcaagtacctgcagtatagaaaatcattcaacttgacattaacaagttcgatttaagaagggaatagtcagtgaccaaaatgtagcctgctgtaacagcagagttaaacagagtatgcccgaggggaccatggaatttgttgctcacatgtaacccggaatgacgaacttctgaatggctcctatgaagagctcagcttgctcagtctgcagctggaagatcctccttccttcactgtagctgctgccgaatgccgtgcgagagatgacatctccggtgagactctgcatctccggccaaacatccagctcgcacgaaccgtcgggaccaagggaatccatccatttcccgacaagctcttcacagcacgtagaaaacgccggcagcatgagctacaaatcaacccataccgcattactatacaatcctacgatcaacctagcgtacgtacgtctgtacgagtgagacgctttcacgtgatgtaccttgagcttctcgagatggaacgcagggttcatgatcctcctgtgcttgacccacttctcaccgtcgtggctggtgaggccgtcggcgagaagcttggtaagtgccgggagcttgggcttctcgaagtggccgagcttgttggacagcacgtccctgacctgggcggggtcggtgatggtgacgctggggatggggccgaaccaggagaagcagcacggcctgccgttatcccgcacgttgcggtgcacgaacggggtgacccggggcacgatgtcgtggcagcccagcggcagcggcgccgacgaccacgcctcctcgttgagccggccgaactccctgaggtcgccgaggaggaaccggtacgcggtgccgcggagcccctgcgcgcgcagcgcgcgctccagccgccgcggccgccaccacagccggtcgagcaggcggccggcctgccacagaagcaccggcccgacgaggccgtacgccaggaggctccatggtggtggcagtgaggctcggctgaacaactctccaaaaaccattgctgtggactctgaatagcaagaagctgatgcaactggactagtacttaatttgaccggagaagtggggatggatgaggtacggatttcgcgccatgttatatagagttgtcactgggttgcattagtctcctgtgctaatttgtttatggtttcttggagtgtaaacaagactaacgaacatttgggccagctatgcccaaatgaacttggtggagaagaaattccaacccagaaatgccacgatcgggacgaccatgaggtgctgtgagcctgtgactactaataaaataaaagaactcatttacacacctcagaaatgttgaaattcagaaaaaaaatatttatgagttgaaaagaagatttgtatcagaactaaagtccatagcaccacaagaatgaaatttgaaataaaaaataacagaaatggaaacttcaattaatgggaactcagtccaattacgacggtatatttatttataagaaaaaaaataaaatgatcgatggggaaattataattgaatcagaatatactatattttttgaaaactcttttttcacatacaagttggtaactattattccgtatgaataattacattttaaaaaatattaattatataatagaaaaattgatttggacaaaaaaaatgtatttctgcttatataaattaaaaaaataactcaaataaatacatgtgtaaaactatgtattttaaagtgaaaattatgaaagaaaaactattagaataatctgttttttaaagctaaaacgattttggccaatacacatttaaaaatataaaagaacaataatgaaattttacgtgcttcttttaagatataaaagaagttcttgagcttgaattagattttttttttgttggacttaataagccgatcgaattggcttcttagttaggcttaacaagctaagccatctttgttgtcaaaacctaagcatgtattaggttcgtatagtttccgacaaaaataaacaattaataacctaattcttatgtattctcgacaaaaaggcctatcctatacaaataggattgtacaatcttttaccaactttgtatacaccagaataatctagactaatataaaaagcaccagttttctttttagtacacccacctattcttaatcgttagatcctctcatccaacgatccacatcgtgagttggattaacacaggaattagaactcaaactagaattagattaacgctcccacgcctcttcccgtcgcaaaatccccgcccacgtcgtcaaatcccacgccgcgcccttccctctcgctccaaaccgccaccgggcggcacccaccctcccgagtggccgactcccgacgcacctcctcgccggcgccccaccctcccgacgcccctccccgccgccgccgccgccgccgccagcggcgcctcccgctcggccccggccggcgagtcgcgtaggagggaagcgccaccggcggcggccggggcgagatgagcggcaggggaggtggcggcggcggggagcaggggacaacgccatcctctgctccacgactgagcaggggacgccgatgcccaatgccctcgcacgtcgctgacgaacgcccaaacttttaatctcctgctttcaacaggtaaacctgctaattaacaatgtggttcattaatatatgcatgcttgctatgtctttgacggaatgcttgcctaccagtctaccactgccaactttgaggtcaatttatgagccttgccatatgtatgctgtgctatctagatatcgtacattgaggttcccacgtgcagtgccaaataataattgttcttctaattcattaataatggttcttctaattcagtgcttaataggattcttataataatgttgcaaatttggaaggcaagaaatgatcttaaatttcagggggaaaaaatggagcctcctcaagtctgcatggcagctgaagctatgatcaacacttaaaataaaattctcttcttataattcaatacaagagaatttgcaggaagaacaaagggggaggggacctggaagactgccagacggaaccagatgttacatagatgcagcatgggaaaatggaatcacaggaatggaaattttctttcatatgccatctactcataatgccatttttcttaaagcctcctccgaggttccttgctcttccttgcaggctgagttaatggcgcttcaacttgctttggaggtgactgtcttcttaacattgaaggagtgactctcctctctgataattctaccattgtggaaacccttagaaaaggaagatttcaaacggagccaggtcattggagcttaagacctatttggagtcagatcgttgccacaattcctgaatctcttttgcaggtcatgtggattcctaggggcataaacaagttagctgaccaactagcaaaagaaaccaaatccagtgttaatacagcccctgtctatgtttgtcaaaatatatcgcatttggcttatcctaccagaagatgtcatgctaatgacattagagacaatttcaattccaggaactttgtaatccggcatgttctatgcttctaaataaagtgtttaaggttttttaaaaaaaaggatagattaaatcactttccttcacctgatttgcttataccatggccaactgaaagcactgctatttttcacctgatttgtactgaggtcacagcaaactagcaggcagcaggcttgttttgttggtaacattttgcttctatgaattatcatgtatgcatgaagtatttagatctaattatatgtttttgcctactgttattaatttattatgcttctgctgatgcggtttctgaggaggttgctctggcatccttcatgaattctccctgttgaattgtctgtacaatgcacatatgtattccacttttactaccgtgtattcccacaatttgtagcaaccttacgaaaataaagggcaaaaaagattaaatatggatgcagattttataaaagctaaatcatatctaaatattaatggccagttcgccaggccagcaagccatacatgcacagcaaactaaagcttttttataaagcaccatcactaatctctctcaatgcacagccaaaatgaaatctactcccttacagctagaataaactaagcattaatattttgttcatgacttaagtgttattccattcgatatatgcatttcctgaaggttttcatacagtaacatcactaatctttctcaatgtacggtcttttatacggtaacatcactaatctttctcaatgcacagccaacataaaatctactccattacaactggaataaacaaagcaccaatattttgttcatgacttagtgtcactccattcgatatatgtcgacatgtcttgcacctgcacgctaactagtacaataaaacagaggactgttatacatctcttatctgttgtccagttgatgtttgtgttcattaatccaaagatcagcagcgcagccactcatagcacttctgacccccccccccttttttttttgaaagtaatccaatgtgttaaaattcttatgctcgacaagaaatcatttataatagatagcttctagttttatttcaaaggtacaaatatcacaactcatatacaatagttgtactataatgaatacatgctgaaacgatcatacaactaccagaaaaaaactatcatatagctctaagcttaatctgtgcaccatgcgtagggcgcaaagttattatactttgtggtgcatgagtgtatgacagagcgagctcaagctccaagtgttgaagaatcatacacaacgccatcttggtctcaagcaatgcgaagttttggccaatacagattctcgggccccaactaaatggtaggaacgcgcctggatccttggatgccttggaaatcccctcagcgaacctctctggattaaacttgtgcacatcacttccccatatgtctgggtcactgtggatgagcagcaaggggagctcgatgatcacgccagcggggtaagtgacgcctccaatctcaatctgcttatatgtttgccgagtcaaggtcacggccggtggatacagccgaagaacctcgtagaggatcattgtcacctgcaccatatacgtacagatcaacgagttttaatttgtagtagttttacacagctacgaaattgttgacgtcaacctcatggtattatcgaatcccacaagatactcatgattttgaggcggctcagaccttcgtattcaggtttgtttttcccaaatagtcctaggatttcttcccttgcatggtcttgccactctgggtgcatgcttagcagcagcatggtccatgtgagtagcactgatgttgtctccattcctgcgaagtagaacagcttgcattcctcgatgacctcctcgatcgtcaacccttggcttgactgaccatgctctgccgtgtgtctcatgtttgactcgagcaacaggcccagtagatcatccttggtgctttcaccttctctcatagcttgcattcttttcccaattagaccccgtagaatcgaatcaatctctttctttatttgatgcatcttccggttgtttttagtaggtaaggacctgaaatgaaaaatccattcacatttttacaatgcgaactgattaaacaaggaggtgatatttcttaatgtcatacagtcatagataaattaacagttattttcttgtttgcaaatgtcatttgtaagtagtaaactcacatgtaacccggaataataatcttctgaacgcatttcaagaggcgctcagcttgctctgcctgcagctggaagatccttctcccttcaaggtagctgcttccgaatgcggtgcgagaaatgacatctccggtcaggctctgcatctccggccagacatccacctcgtacgagccttcagaaccaagggactccatccacctgctgatcagctcttcgcagcacgtggaaaacgccggcagcatgcgctgcagagtctcgcacgttccaatattcagacacagaaaacagcagagagagagagagagagagagagagagagagagagagagagagagaagaagcaagagtttactagtgcagtgttgtgtggttctgtacttctgtgttgtgtggttcaccttgagcttctcgagatggaaagccgggttgaggatcctcctgtgcttaacccacttctcgccctcgtggctggcgacgccgtcggagagcagcttcgtcagaccctggaacttgtgcttctccaagtgaccgaatttgttggacagcacgtccttggccaggtccgggttggcgatggtcaccttggggatcgggccgaaccatgagaagcacgccttgccatgctccctgacgctgctgtggaggaacggcgcgacgcgcggcgcgatgtcgtggcaccgcagcggcagcggcctcgcccaggcctccctgttcagccgcccgtgctccccgaggtcgccggtgaggaagcggtagcgcgtgccgcggaggccctgcgcgcgcagcgccagctccagccgccgcggccgccaccacagccggtgcagcagccggccgccctgccacaggagcaccaggcccaggagaccgtacgccagcgagctccatggcacggaggctggacacctcaacccggctccaagaaccattgctggggtcagtccacgagtgcaagtgtgcagatgagtggtgtgaaaagaagcttttgactactggagatggatatggtacggtgttgggcgaggttaacaaaaattttgacaatttggtcctttacaaaaactatttttataaataaaccaccgccaaaatttattttaaaaatgacccttctatttagtgtcacatcgtgtggcgctgaacttagacacctcagcgccaaatagcgtggcgctgaatgtgcgttgccacgctgacttagcctcccatttgcggtggcacggcattcagcgccaattgacgtggcgctgaggtgtctaaggtcagcgctagatgatttggcgtggaaaaaaaattatttttaaagtaagttttagcggcggttcatttataaaattagtttttccaaagggttaaattgtcaaaatttgtgttaaatagaggtgctacttggttgcattagtcacttgtgttgatctgttcaagccgatccgagttgctagcattggtaggtagtactccctccctctttatagggacattttaattgcactatttgaccatttatcttattaaaaaattttaaaattattatttattttatttgcaacttacttattttaaacgtaacttttccttttattatatttatataaatattttaaataaaatgagtggtaaaacattataagaaagtgaatatctcgggagacgaaggtaaggaacttcgtagagaagaaattccagcgggaactgatattctgattagtcaaagtgctcgcggatggtgatgagtgacgccccgatgctactccctcaggttgataacgtcgttttggataagggcacggtctccaaaaaaaataactttgactattattttctattataattcgtataaaagtgttaacaaatatatgatcttattaaagtattttttaagactaatctagataaatattttaaaaatgatttataatcaaagattctcaagtttaacctcacccttatcaaaacgacaagtattattagaccggagggagtatcattttaggattgtttcgcggctgcttcgttttgcacttttgcttgcttggttactattgtgaagaatatcagatgaattgggctgcatgaaaatgggccacgggccatgggccacatgcccatacaggtagtctaagcagaattttggagtccttgtcatactggctatattggagtattttgtaactgaactaattactcaccgagaaaattctcacaaaataaaaacaatactaccaatttttttaatcataacaaagagactatacacgcgtcgtctcacatagcattaagtgtcatattagaaaacgagcgtgcctgttagcacaccaacaaatttatagccctgtgtgtattactatgtgttttgctgttaaattattgatttctacctagcaattggttttggttttctagaatataagatatgaacatggtaatagtatttgtcttaactgtatttatctcaatattttcttaatattgtaggaaaattcttggggttacttgcataagtacttgtaattacgcttgattagtcttaattttcaattaagtctgtagtagattgtatttgttcaaatgataaatctgtaaggctgtaactcctttggtttcactatttaatttatgttttattttctattcatataggatgttactatcatggagttacttgcctgaattttgatttaacatgtattaattgcttttaaagaaaaaaaatcatgggttagaaatcctaatatttctcccgtttctctcctttttttaaacaaaaaatatgcagttttctcgatctctctagatgcaagcgagcactttcgcatgttattttgcatggagaccaattccatgaataaggacatgccacatggcttatctctccggcgcttaatttgcacatatttcatgttataagataagctaactccaaattttgcatgaaaggaatacaatgtgtcaaaaaaaagggaaaacgaggagaaattacaatggcgtcctgacccacctcagcaaaagcagcactactgtgactcgctgatttggaatttttagggcctgaaacatgttatagccaattgtttttgctgttctaatttcggatatatcacggctgacagataactacaccaaagagcgagtgcagtgatgtatctttgcgctacggttcccatcataccaccatgccggaggctcacacgggtcatgagaaatttgagcaaacgatggaagaaatcagtgaaaactgaaaactggaaggaagggggtaagttggaagagaaattgagtggtggttttttttttacctattgagttgtagaggggagagtgaaaatacatgtgacttgtagagggttatttggacttttcccataaaaattaagcttaagaaattttattatagttaactccaaatttggttgtaaattacaaatatgccctcgtaaccaattgttgtactaaaacacatgaatctgaaataatcatatagctctaagcttaatctgcgcaccatgcatcgggcgtaaagttaccatactatatggtgcatgagtatacgacggcatgagctcaagcttgaagcactgtaagatcatacacaatgccatcttggcctcaagcaatgcgaagttttgacctatgcaaatacgtggcccccaaccgaatgggaggaacgcgcccggattcttggatgccttggagatcccctcaacgaacctatctggcttaaactcgtgggcatcactcccccagatgtttgggtcatggtgtatgagtaacaccgggagctcgacaatcacaccagccgggtaagtgacacctccgatctccatttgcttgtatgtctttcgagtgaaggttacggctggtgggtacaaccgaagaacctcatagaggatcattgtcacctacacaatgcacatataagtgagttttagtactacttctagctgcaaattgtttaagtcatctcatgagaacgaagtggtattgtcgaattctacaatatactcacgattttcaggcggctcaggccttcgtattcaggtttgtttttcccgaatagtccaaggatctcttcccttgcacggtcttgccactctgggtgcatgcttaggagcaggatagtccaggtgagtagcactgacgttgtctccattcccgcgaagtagaacaacttgcactcctcgatgacctcctcgattgtcaatccatggtttgattggccatcctcttccgtgtgtctcatgtttgactcaagcaacaaacccagtagatcatctttggtgcattcaccttctttcatagcttgcattcttttgtcaactagaccccgtaaaatcgaatcggtctctttctttatttgatgcatcttccggttgtttttagtaggcaaggacctgagatgaagaatatatcccaacacaatcataaacagggagaatcatcaaaaagaagatgaccaaactaaccctcaactcatactaaattattcggtatattaagtgctgaattctcacatgtaaccaggaatgacaatcttctgcatgcatttcaggagacgctcagtttgctcggcctgcagctggaagatccttcttccttcaagatagctacttccgaatgcagtgcgagaaatgacatctccggtgaggatctgcatctccggccagacatccacttcgtacgagccgtcagaaccaagggactccatccacttactgaccagctcctcacagcatgcagaaaatgccggaagcatgagctgcagagtatcattcgtacattatattccaatgcagagaggtgcagaaaaacagaaaaaataaatctatctaatactactagtaaaaatagtctgggtaggtaccttgagtttctcgagatggaaagccgggttaaggatcctcctgtgcttgacccacttctcgccttcgtggttggcgaggctatccgaaaacagcttcgtcagagtcgggaacttgggcttctcaaagtggccgaacttgttggacaggacgcccttggccaggtcggggtcggtgattgtcaccttcggcgtcgggccgaaccaggtgaagcacgcgctgccgtgctccctgacggcgttgtggaggaacggcgcgacgcgcggcgcgatgtcgtggcaccgcagcggcagcggcctcgcccaggcctccctgttcagccgcccgtgctccccgaggtcgccggtgaggaagcggtagcgcgtgccgcggaggccctgcgcgcgcagcgccagctccagacgccgcggccgccaccacaggctgtgcagcaggcggccggcctgccacaggagcaccaggcccaggacaccgtacgccaggaggctccatggcacggaggctggactcatcaaccaggctccaagaaccattgctggagtcagtctatgagtgcaagtgagtggagtgaaaaggagttgatgcaagtgtgctttgactactggaggtggatatggtatgtacggtgctgggggtgaggttaaatagaggtgtcacttgcttgacggggccaatcagcattgctagcatagcatcgatcctaggaggtaccttgctggtaaggaacttggttgagaagaaattccagggggaactgatactctgattggtcaaagtcctctcggatgggcgacgcactggacggctacccgccatgtgaggagtgcttcgcggctgcttcgttttgcttgatttttatttttcgagtggtcgttttgcttgattagtggttactgctacgcattggagaaaaacgaatatgcggtgaacagtgataattcgaatagggatattttctcccaaatacgaatacgaatatgatatcagggtttccgacgggtacggatatccggtgaacagtgctatttagatatccgctaaagccataagatataccacatttctttataactctatgtctttcaatgtacatttttagaatttagtagtaacatatctcttaacactagtcaacactattaatattatttaaacttttaaatatgtttataaattatactatattttatataaaacgagctaattatatatgatgatattcgtttctattagaagttgaggtggttttcgtgttttgataaaaaaatattgccatattcatatctgattatattcgatccttattcgtatttgagataatttgtatttgtttctgtatccaagccattcgtattcgtttttacacccggcaaaaaatatgaaagcgaatatggtatgataattgttcgtccatatctgctctgtttttatccctggttactattgtgaactgagtctaatatgacttgggccgcttgaaaatgggccacaggccatatgcaggtagtccaaccagaattttggagtccttggctactacctccatcgcataatggattaggttgttttagagaaagaaaaaaaaaggaaaagactattatgtccataattaaatgaggagtatttgaaaagtgggaggtaggttggggtaaagtgtggagaaatttgaatgagagttgttggagggaaaagtaatactacttagggaaaacatttggtaaagttgacaagtgttaagctatgggggttgttcactttgatgcttaaatcaatatttactaagtttttgtgaaaggaagattctagaattatcaaagtttaatagtggaggcaagtttttggtaatgtttggattgttaacttgtaaaattttggtaaagccaaaacttggtaaggtttattttggcaataaactaaacatcccctatgttttgtttcttttgtcatgtttttgaggaagattatagaattaccaaactttggtagtggaggtaagttttggcaatgtttggattgttaccttcctaaattttgagaaagctaaaacttggtatggttaattttggctataaagtgaacatacccttaatctcttacattttgtgacaaaaatttgaatttgaataccccaattctttatattatattatgaacggaggtagtatagtggagtaatgtgtatacctggactaattgctcgctgaggaaatgctcacataatcacattaggggaaaaaaacatacccgtccatctagcatatactccatctgtctcatacaataggacattttgacttttttaagtcgattttttaaaatttgatcaagtttaaggaaaaatataataacattctcaacatcaaacaaacatataatatcaaaatatatgttagattcaatgaaactaattaaatattgtagatgttgttaaacttttctataaacttaattagtcaaactaaaagaagtttgacaaggaaaaaatccaagtgtaaaacggagaggtatataccaagtcataatgaacggcagagatataaaatgtgagttccttgtaaactatcaagtagaataaaaattacaaattcacaacaggaacaaatagtagtaacttgccacctactttttcaaactccaatacaataattactctaaagttgaagtctttataagaaaaacgaattggataaagataaaattattttgagacaatggagtaccgaccaacttcagtaaatacaacaaaagttggaaggaaacatagaagattaaaacaatattttttgtgcaaattctaactacatatcgagtacaataggttgaatcattgaatgacaccacattaccacatcgatgatacttcacctaaattatctctaaatttgggtttagaataaaaggagaattgtttagaagttgtcaatcgaaaatcagttaggccataattgagaggttatgaaacaaacccttttttagattaatgttttatatgtcctgtcctggaatagatactaggaggtgtcacaaatgagtttgaaaaaagtttaagattgaaatatgtgatacaatctcagggattgcaaaataacccgagtgattaagtgtacgattgcataataaaacaaaagaaccaaaatttgcaaaaataaaataaaattttgttgtatatcctcaacaaacgtaaaaataagtggagtgattaagtgtacaatcgcaaacatatattcaattggctttctctagctctataaattttcacctcaccatattcaattatttgtttgctttatttttcacgctcatcagcacgtacaagttcccctgacatccacacatactataccgtgtcaacatacgtgcacctagttacatactaatgtatgtgattattgtgaaccatttttctgtgtcgatccatatattagcctatggaaaatcgaaaatgacatatatatatataagcggattcacgggtggccgctgctaccaaaaccagatgatcatagtcttgtgagtataatttgtgcaccatgctgcggatgtagcgtgacactggcgtaaggagcatgggtgtacgagggcgacaactgaaactcaaagttctgaagtatcacgcataacgccatcttggcctcaagcatcgcgaagttctggccaatgcagatcctcgggccccaaccgaacgggaagaacgcctgctgattggtcttggtcgccttggagatcccatccgcgaacctctctggcttaaactcatgggcatccttcccccacacatcggtgttgtggtgaatcaggattatgggcagctcaaggcccacaccagccgggtacgtgatgcccccaatctgaatctccttgaatgttcttcggctcaacgtgaccgccggcgggtacagcctgagcacctcatgcagtatcatcgtcacctgcaaaagataaacagagtatctaggcatcgtgagcaagttaacatgtgtactaccacttgtgatcaaatatggatgaagaaatatgttcaggttttgacaagcacttgccgttttcagtcggctcaagccgtcgaagttgggtttgtcgcggccgaacgcgctcaagacctcttccctggcgcggtgctgccattcggggtgcatggatagcacgacgagcgtccaggtgagcagcaccgacgtggtctccatgccggcgaagtagaacagcttgcactcctcgatcacgtcctccgtgctcatcctcaggttggacggctcaccgctgtccatgttggacttgagcatcagcccgagcaggtcgtcgccgctgagctcgccgttctcgacggcgcggctcctcttctcgatgatgcccctcaggagcccttctatctctcggctgttctccttcatcctcctgttgttttcagttggaaagtacctgcatgacacaggaacaggatagcaacaactaatgtcagagatacagacatacgtatactgtacgatgacaagtgacacacaggggacgggagcattggttaattaagctggttctcacaagtagcctgggatgtagatatactggatggtcttgatgattcgatcagcttgctcttcctgcagctggaagatccttcgcccttccatgaagctgctgccgaacgccgtccgggagatcacgtctccggtgaggttctgaaactcctgccagatgtctagctcgaacggtccatcagagccagctagtttactgtcccaacggtcgatcatctcgctgcagcacgtcgagaaagccggcaacatgtgctgaaaacatcaaattcagttcagtaagcatacacgcacacacacaggtattgaggtataaatcactccctgctagcttgtaacaactaacatatacagtatgtaccttgagcttttcgagatggaaagcagggttcaggatcctcctgtgcctcgcccatttctcgccttcgtagctcgcgagcccgagggcgatcaatttcccgagacttttgagggtgaatttctcgaagtggccaaacttgttggataggatgtccttcactagctctggctcagcgatgaccactctcggcgttgtgccgaaccaggtgatgcacacgttgcctacattcagttcagtgttctgtgccgtcagatagagctcgatgaacagcgtaaactgaacataacagcacgcgcatactttctgaagtatatatgaacttgtgttcactattcacgaaactggaaaagtcatagcaatagaggcatgcatggaggcatgtcaagatggattctaatagctcgagtggacgtccacccgtttattgcatgtcaactagatggctacgaaaagttttcaaaacaattgagaagatagatcaatatgtaatatatcaatccacaaacatgcaagttcaaatttaacttctacaaattataacaaaaataacaaaatgtagaagttgaattttaacttgcatgtttgtgaattgatatattacacattgatatatcttatttatatttttttaatttttttataactatttagatgatatgcaataaacgggtggacgtccactcgatctgttaaaacagtttcccttatgcatggagcttaccgtactccttgacgatgtcctgaaggagcggggccacccgggggacaatgtcgtggcacggcggcatgggcttagcccgcgcctccttgctgcgccgggcgttctccggtaggtcgccggcggggaaccggtacgcggtgccgcggagcccctgcccctggagcgcgccggcgacccgccgcggccccagccagcacctctccgccgcccggtagagcgcgcctagcacgagcagggccgggacgccgtagtagagcatgccccacggcgccgccgccggcttacctgcttccagtgagactcccacctccattcccgtggcctcctccattattaccggttccctagctagttggctgacttgttgagactgcgaccacagctgccaagagcgcgcagtgagtggtttctgttggtacgagtggcagacgcgcgagcgttttataggcatacgctttgcttggcgtcacatgtttttctccgtctttgtgaggtttcttggcggccacggtcatacatacgtgcctggattttttttcagctagcgcgattgcatcgacaaagtgtggcagatagccagtgtgtgatttgctagttagttgtttgctaacttgctgcagaagctgctagcattttggatttttggtgctgtaaagttagtaaataaatgtggatttgttgctttcgttcctctggagtaaataaaacggccggagagctcaaagatgttctgactctagctagagtgtacgacatcctgacgtgcgcagaaacgtaggcagtgccgggtaacggaccggggcccaacgtcccagtccattacttttttggcccatccggagtcctgtcctcctgcccctttaggcactggaataagttcatttgaggtcccttaatttgataacgagtttgattttcatccgtcaaccataataccagatacaacgggtccctcaagtgtcaaaaaggatacaaacaaggtctctcaatagtttggatagcggttttggctgccgtggcacctacgtggctggtttcacttagtcctcgtcctacgtggtggtaatgtggcattggaagcaaaatataaaaattaaaacaagaaatgtggggcatatatgtaagttagacaaaagataaaaaatagtgggacctctctctctccacggacgagcatgcacagaggcccagagagggtgaagggtggcggtcgatgtgccgaagccagccgagcgcgtggatagggaggaggcagggaggccaagcgagtgggcaggggagggaggaggttggcgaggggggggaggctgagagaggtaggagtaaccgccaccgcccttctcaacctggcgccgctttcttgagtggcacttgcaacccaatggcagcctcttcctcgagaggtttaacgcgatgccagagtcattggagtcatccttgatgctcccaccaatggcctgatgatgacccatgtgccccaccgcctgctcaccgagattgatggctggaggctgcggtcgtggaggagtccgacctcgctggccttcttcctcccctgccctctcgccgacctcccctcctcctccctctccacacacttggctagcttcggcttgccagcggagagagaaggacggcggtcggcggaggggcggcggccagcccttctcgctgttgaggtcgccccaagtgaaggggagcgggaagggcaagcacgcggcgaggtgtggaagggggcttaggtttcagtcctccggcggctagcgtcgccctcgtagcgaggtatgtcgcgacgcacgatggccgccacccccaccctctccggctctctgcgcgcgctcgcctgtggaggtagagaggagggtggaaccataggtaccactatttttttatattttgtttgactgacatgtgggcccctttgtttttaatttttatattttgcttctagtgctacatcatcgccacgtaggacgaggaccaactcaaaccagccacatagatgtcacgtcagctaaaatcgccatccacactaccgagggaccttgtctgcattggttttgacaattgaggggcccgttgtatttggtatttgcggtgcagtaacgaaaatcaaactcgttatcaagttaagggacctcagatgaacttatttctatgttgaacctttccgctggcccgtgaactgggaagtagataggcctactagactgtttcaccttaggtatgtattttagcccgacccatctctctgtttcacttactaattccagttcactgaggcattgcgtttgcatagcatagcatcagggagaacctgtatagtagaaaaaaaattgtcactgtagtatagattcacggcgatttgcaatttgatttgcattttatataaacataactgtgtttttatgcttacagttattatagtatgcttgttggggtatattggtaaataatcgcataaaaaactaaacttttaattctaagtcataagatccattgttttacccacgcatgaaataaacaaacaagtatatctttttttctctaatggagggacgaacagtatgtactagttacacatgttaatatagtggttacaaaaatgtttgacagataaaaataatcactcattcataaggcacgtacgtagatggtccgaagtcccaacttaacctctaattgtttttttcccagaggaaaacctttcctaattctattaccagaaatgacgtttataacaaagtcaacatatcccaacttacctttcaaaaaaaaaaatttatcccaactcatgatagttacatttaaagtgggcgagccccagacatattctgagctcacacaaacaataattcaacaccacatggtgggtgccccttccttgattttcttctccaccaagttccttctgatcaaggtttagaccgcccaaggctttgaccaataatacactatcagaggcaaccaagaaagctagcaagcaacttccttgattaacatcgataaccttaaacaaatgagcacacgaagaccaactgtcccagcgacactcctatataatcggattcgaatgcgctgaattcacatgtacacaacaccgtatactgtcccttccggtcaaagtacactgcccgctgacagtgaccagagattctactccagcttgctactcattttcgagggtgttgatcatggatccgacctcggtgccatggagctccatggtgtacggtctcctggggctcgcgcttctgtggcaggtccaccggctgctggtgcggctgtggtggcagccgcggcggctggagcgggcgctgcgggcgcagggcgtccgtggcacgtcctaccgcttcctcaccggcgacctcaaggactacggccggctgagcaaggaggcatgggcgaggccgctgccgctgcggtgccacgacatcgcgccgcgcgtggcgccgttcgtgcaccggaccatcgcggagcacggcaaggcgtgcctctcctggttcggccccatccccaaggtgaccatcgccgacgccgagatagccaaggacgtgctgtccaacaagatgggccacttcgagaagctcaagttccccgtgctgtcgaagctgctcgccgacggcgtggccaactacgagggcgagaagtgggccaagcaccggcggatcctcaaccctgccttccatctcgagaagctcaaggtacacgaattaaattacagtacagttttgtgatatctatatattacagcacaagtatttaccgtgatagactgtgtgactgtttccttgagtaatgtatcatgtatgcttctgcagctcatgctgccggcgttttctgcgtgctgcgaagaactggtcggcagatgggcggcgtctcttggttctgacggttcgaatgagatcgatgtttggccggagatgcagagcctcaccggagatgtcatttctcgcaccgcattcggcagcagctaccttgaaggaagaaggattttccagttgcaggctgagcaacaggagcttttcatgggtgccattcagaagatctccattccaggctacatgtgagtttgtttttctctgttcatcaacactgatttagtggtttatgctccacgcctctattgtaacactaaccagaccttacagttatacataatttctatcgaaattaaatgtttgttattcagtactcgtagttcctctctgtactgaaaatctgaagcggtgtgccctttcaggtccttgcctaccaaaaacaaccgaaggatgtatcaaattaagaacgaggttgaatcaattatacgagatctggtccagaaaaggatgcatgctatgaaagatggcgagagaaccaaagatgatttgctcgggatattactagagtcaagcacgaggcatgcagacgagaatggacattcaggcccggggatgaccatcgaagaagtgatggaagagtgcaaagtgttctattttgcagggatggagacgacagcgatactcctcacatggaccatggttgtgctaagcatgcacccagaatggcagcaccgtgcaagggaggaggtcctaagcctatttcagaaaaacaaacttgattatgaaggcctgagcaaactcaaaacgtgagtaataaatgttgaaattaagtaacttttttaggaaatccatgtttaagttatcttttagatgtagagatgatattgaaattactaaatcacatggcaactagaggtaattaacctttggtacatacaggtgacgatgatactttacgaggttctccgcttgtacccgccgggaattgggtttgtccggcaaacatacaaggagatggagatcggtggcgtcaagtaccctgcaggcgtgatgatcgagctaccgttgttgttcatccaccatgacccagacatctgggggagcgatgtgaacgagttcaaaccggagaggttcgccgaggggatctccagggcgtccaacgatcatggcgcgttcttcccgtttggctggggcccgaggatctgcatgggccagaacttcgcgctgctcgaggccaagatggcgctgtgtatgattctccagcgcttcgagttcgagctagcgccgtcttacactcacgctccccatattgtgttgatgctgcgtccgatgcatggggcaccaattaagcttagggcaatctgatcgtcgatcttgtgatgttcatatcatgcattgtaggctttttttttaaaaaaaatggcatgtttggtttataccaatcaaccatgccaccaaaaaataatttagccatatcaataaattaattctccatttagtttgtaaagaaaaggtattgtcaaatatttggtttgattgaatcgacactttaaaaatatagcaaaacgaatattttgcaacttcatcaaaattgtactacctccattccaggttataagactttctagcatatgtgaatgtgggcaataccagaaagtcttataatattaaacagatgaagtataaattttatagtaaactaataatagcgtgaccaatcttaataaaattccgaaaacaatcccaaataggggcggacccagagaggttcccggtatgcaccggcatacccaaaaatcgcaaaaaaaaaaaaatcagcaggtagtatatgcatcagtgggctgaaacttgcctccatgaaccaaggcccaagatgcccacttttactgaacttgcacagcccatcaaaagtgccagtgcgcgtgatgcgttgatggggaactctagtctaaatctaatcgattatctcttcaggatagaaatttctagtaaggtgagccatggttgatgacttggcttatcggttccgatttgtattgtcttgtattgacacctcaataggcttatgatggcttgccttggttaccctccctcctaggaagtgttgattctagggttgtcttgtccaaaaagaattagaggcccatttaggatattgtcttgagtagtcctaagctggcttttgagttagttgtgtatatccacttatggatatagatgctaaatttctatccactatcttaaaaaagtcggcttcgggttggaagtcttcttttcttgttggaaactccttcattatctgcttaagactatatccctattttggggctttttccatatagaacctagtatgcaatagtccaaatgagatattttcacacctttgaggtactcaatatttcgtacattaataggaacaatcatcacaatacatgaacaaagtcattaacatcccaactactcaaggaatagaatgaattcaactctaattccctatccattcctaactatatcaagttgagtctatgagaactatcatggtaaacaattgcgaggcacgagacaccctcacctatgttgagcggtgtcgcccttagctccacgttgcttgcacccgagcgtcacctccttcgcctccctaccacaccgacactggtacccaacgccttcctcgaccacctcaggtcccctcgttgtctgaacccctacgagtctctgatcgggttttagggacccagcggggccaaggcctatttttgccctttctcatttcagttctaggcggcagctccgttcttatccaactgtcatcggctccacctgttgccaatcccagttagcacagataaaaactaaataaacacattatcttctttcgtattccctccatctcaaaataaaacaacataagataatatgggacataatctagtataatgaatttaaacatatgcatatgtatgtctaaatttgttgtggtaggttatgtcctgttctattctagattattttattttaggatggagatagtataaggcccaaagatatcaatatcttgtattgcagaccatttagcccacggcttggacagcccattacctggcattgcttctagaacgtctaattacgcctagcttctagaatgtataattgcattattgtggggtaatccaaatcaatgcggttctccgatggagcagagccatacagtagttagcacgaatggcgtctcatgaatacgctccctaaaatgtaccagggtggcagggtgcccatccatgcgtcactccattgctgcacaagcgccgattccccgctgtccggcggctgcatgtctgcatgtgcgtagggatgaaaatggtttagaaagttttaacattccggacatattttcgaaaatggaaggtattggtcaaattttttcgaaaactttcagaaacaaaaacgaatttaaattttttttctcagaaacaaaaacgaatatgataaactactatcttcggaatctggaatccgttggaaatattctgaaaacgaattcggatcttttcggagtagtaaatgacagttgtttggcttcagccttctctgctctagtgtttacatttacatttatatatattgtgtattgaggtgtttagttaaatggagatatttttttagtccaatgctttagaatttttttgcctaatgaatatttttattaggtcatgacatactacttataattacaattatagataaatatatttctttttctccaaaaaattttctaagaaagtaaagtgtacaactaattgtattgctattaattgataaaaattagcaatattgatttattgttttagaaaaaaaaaaagagttgcatttcttcgttgatttgagaagttctgtttaaaggatttttatattttgttaccgtattcactcgttttcgtatttgatgatacagtatttgattatgttttcaaacttttggtttccaattctaatttcaattccaaaaaaagaatgtgaaaaagggaaacgatggagatgattttcgttcatttttgagccgttttcatcctagatgtgagcacgtgacaatgtacacggaaggagcctcttacgcaagcgcttgggtcatcctctcagcattgtggaacgcagacttggagccttccctacctgacgtaatgcatgacacaaaccgcccattaaagcggagtagtatatatgatgcaggcgagcgattcacttgttgacagggagtgattgtgtgaggctttcaacttgtgagattactgggtaattgaagctggcattattatatactccctccatttcaaaatgtttgacacagttgattttttaagcacatgtttgactgttcaccttattaaaaaaattgtgaaatatataaaactatatgtgtacatgaaagtatatttaacaataaatcaaatgatatgaaaagaataaataactacttaaatttttttttgaataagatgaatggtcaaagacgtactaaaaatcaacggtgtcaaacattttaaaacggagagactatttccttgattctttgcttgggcgaaaagaacacgagcatgccatcttctcttgaataaaacgggagaggacaagcacgactagcacacgtaccagctgcgacgctttcatttaatttaaagccctgacgatgtcatcgtccgttgatagttccatttagcaaatcagagatccacgttttcgaggggaaactggtagtagcctaggagaaatcttcgtgtggttggctcattggggtgcatcgctatcaggcatagcgcctggtgccctcgatcttgtagtagtatttttctccgatccacatctttacatgtctccgcgcgacttgcacgattgcgtccgattgagtctggaagaagcggccgcctgtatagtatacttagaaaatcagcgtgccagatggcacatcaacctatttatagccccatgtgtattacacttaaattaattatttctatccatttatttaattttctagaaacacatatgatatcaacatggtaattaataaaatatttgttttgattgcatatctagatatttaaacctccaagcaatgttcttgctactacttacttctgtattatttttcataaaaaaacgttatgcttgaaaaatactatcatgatgttacaaatttaaattgatgatgaaaattcgaaattctttctgtggtatatgacgtacccactgacagcaagttgactttattttttgtttgacattacaagttgacttcattaatcttcaaatatatcagctcatcgttttagaggtgctcataggaaggaataaagtgtatatatacgtgtgaccttaattagtaggggttagtgtggtgagtgcttgtgtgttgtaatgtgttttctaaagaaaaaattcaaaaagttttacaacaacttaatttaaatgtttgatatgtcattttttacatgtaggatgcacgcattctacagacacatcattgtgcgcgtgcatattttttttacacacggcaagaaagagatcagatataaccaagcttgtaattggacatgcacgcattagtcatgtacttccgtgctaatgtagggcatgttcattttgatgccaaaataaattttatcaaattttggcaatatttaagtacatttgctagatttttgtgagtgaaagattttagaattgtcgaactttaataggggagctaagttttgtcagattgttatcttgctaaattttagtcaagccaaaacatggttaggttaatttggtaatgaagtgaaaaaccctgtagaattagcgtttggtggaaactcttgtgcgcagcgagtatgatgttgcagctccatcacccgaaccagtgctcagtcacttaattagggtgtgttctatgctccatctccctatcttctcatcttatttttcatgtgcacgtttcccaaactcatctcatactctcttatttttcacatgcacgtttcccgaactgttaaaccgtgcatttttttaaaaaaaagttctacagaaaagtagttgtaaaaagtattaatccattttaaagctttttagctaatgattaattaatcatatgctaataagttattccgtttctcgtgtatgtgtcactaacttgtggggtttatatcagtattaatatattttgtttacaatgacataatcaaattaaatttacaatgacataatcaaatgacaaaaagtttatactgtaatgtatttctaggagactgattcaatctatgaaaatctataaaattttagtcgacgagattcttggaaggaaatctaagcaattcaaaattcataattaatacaatgaagtgattaaaagagaacattttcctctattttagtttttctaaagaatctagaaacggctatattttgaaaaaaaaaggaccgtctctgttttttttaagtatataacatgattaactatttttatcaaacctcgactaacaacatttattaattacttatagttaaataaacataaaaacaccactagatttatcgtcaaaataatttaagcataactagtagcatgtttgtctatttcttgaagagatgaataaaaaaatcaactgcgtttctaataaacgcaatagtagtacagtagtagtagcagctctttttttcaccctgagaggaaaaaaggtttgtaagtacatacagcccggataagttttcaattatttttttacttttttaccttttattttaaaagcaaaacttctaaaatttattttcaaagtctgaaccttttggtggcgttagctagcttgacgtggtaaaataacactattacgtaaacatagcaacaactattatgtaaacatagcaacagttttatcctcccacaccagctaggatagcatggcaagacaacactaccatgccagcaagatcggctaataaaataacattatcacaccattctgacatacatgacaatgttgttttgtaaggcaacctagctagtgtgaccaaaaggttcagattttaaaaataagtctttaaaaagtttgttttaaaataaaaaaagacttaaaaaaagaaaaaaaaagttctgtggaccattagtttggctctccgtaaagctacggattataagttttaacaattttggatttttagttttgattttaaagagtaacttatcttttttactctctttgtctaaaagaataattttttaagcttatctaggtacatagttaaaaagtattatgtttaggtttagttaaagatactcttttaaacagcaaaagcaagataatgttggatgaaaagtggagtagataagaaaattacataatgaaggattgtaataggtaggaaagagtatattggtggagctgtttatattttaggacaaatcttaaaggtaaaaaatgttatattttgataataacttatactgatattgattactccctccatccctaaatataaaggattttaattagatgtgacacatcctagtacaacgtcatatctaacctaaatcttttatatttagagacggagggagtacaaaaatggtgttaatccttttctatgcacgaatgctttacttagagcctaagcatcttgatttcggctctatgcttgatactactacggagaaaacaacgcatgtttaaactagggtttgcaaaactgtaggattatcatgcggttatcaccgttattatatgtagtaaccttatcaacttctgaaaccatagtaaatctggcggtaaccgtgtagtctaaaacagtaaaacctggtgtagactctagtaccagatgtcgtgggagattttttttttcttgtgtaatcttggaacgtgtcatcccacctatcctacatatttaaaggccacacatcaccgtcgagatcatcaacaatatcggctatacggtttcgcggatcacctgtggtcctgtgcagccgtaccgtacgcctctgctttcctctcaccccaccgcgccaccggcgagcggcccgcgagggaggaggcgctgccgccgcctctgctgatgctgatgatgctaggggcggcctcccagtggatcctggccgccgccgcggcggcggccgtggcggcgctgctgtggctggccgtgtcgacgctggagtgggcctggtggacgccgcggcggctggagcgcgccctccgggcgcagggcatccggggcaaccggtaccgcctcttcaccggcgacgtgccggagaacgtccggctcaaccgggaggcccggaagaagccgctgccgctcggctgccacgacatcatcccgcgcgtgctgccgatgttcagcaaagccgttgaggagcacggtatagtcctctccctccagcgaatttccagttttaatacgaaacagtactgagctaacatctgatggtacataaaaggctaatcggagttgagatcgtgcttgcagattagcttcggattttacccttttaggaaacagtaaagttcttctaattttcaaaaagagatcttaccgcttcttgttccaatatactcccttcgtttcgaaatgtttgacac

SEQ ID NO: 9467 - DNA, 36530 bp, Oryza sativa
acgaacggtcaaacatatgataaaaagtcaacggcgtcaaacatttcgaaacggagggagtatgttcttaatattttgggggaaaaacatttgaagttgatgtaaaacaaaatgttgaggatgtatgttcatgtggaataatcatgtgcatatggttgacaagagctactgtctaattggaatgtgcgctttgattaagattgtcacctacacatgttgggtatagttttcagtctccttgcaccttttaatgggattgaaaacgtaactgcagggaaaccatcattcacttggtttggcccaacgccaagagtgatgatttcagaccctgaatcaataagggaagttatgtctaataagtttggccactatggcaaaccaaagcctacccgtctcggaaagttgctagcctccggagttgtaagctatgaaggcgagaaatgggcaaagcaccggagaattctgaatcctgcctttcaccacgagaaaataaaggtgaaattcattttatcacttttagattgcagcattccatatttcttattgggtaatgtaccaaagttggctaacaatgttgtctcgttcacagcggatgctgccagttttttctaactgctgcacggaaatggttacaagatgggagaattcaatgtctattgaaggaatgtcagaggtagatgtttggcctgagttccaaaatcttacaggagatgtcatatcaaagacagcattcggtagcagctatgaggaaggaaggagaatttttcagctgcaagcagagtcagccgaacgcataatacaagcctttcggacaatttttataccaggatattggtttgttctttcttcttacactataaaagaaatcatttggacatgcatatcaaatatcttacgaacaatcctatgagttatataatatctttatttagtacttatgtgatatattacagttgccgaaaaccgttgtcaaaaatgcccctctgaggattgtgaaattaaagtataaccttcagtcatgtttttagatacaggggaaaacaataatatgctgaaaaatcattcagaatatggcagtcattgccagttgacatgtgagccaagagtcagacaaaaagatatattcgatctttggtttagaagaaaattttgcagtctgagcacatgcaagttttcagataatagaaaacacacactgatgagaacaaaatgcagtttttcatttcttttgtttgatgaattagttctttaacagtccttttataaatgtatcaatggtacgacaattatgacttggaatataccaaaatatggtacatcctctaagtacttcggtactacttcggaaggtagaactaataatacatatcagtgcaatttgaatgattgcaagaagagtctacgtatacatttttttagactaagctaaatttatacagtagcaattgagagtttactcttgcatgattgaaaattttacaggttcttaccaactaaaaacaacagaaggttgagagaaattgaaagagaggtcagcaaacttctacgaggaataattggaaagagagagcgggctattaaaaatggtgaaaccagtaatggtgacttgttgggcttattggtggagtcaaatatgagggagtcaaatgggaaagcagaactaggaatgactacggacgaaattattgaggaatgcaagctattttattttgcaggaatggagacaacatcagtattgctcacttggacattaattgtgctaagtatgcacccagagtggcaagagcgagcaagagaagaagtgctacaccactttggaagaaccacaccagactatgatagcttaagtcgtctgaagattgtaagtataagatgaacactgttctcttattttgccaaatatgcaaaatgcagtctattaattaagacactaagtttgtactggatttgttttgatcagttacttatataaaatctgaaaatattgcgttgaaatgataactatttgtcaccaaaagtaacaggagcttatgccatgtattttccatatgcttctagaatgttttttttttccatacagttcagatgatgttattttaaagctttatcagttatcaccggtaataaaattgaggggggttgaattgccaatatatgtaagtgaataaaagattctgattgttagattaagcaaggatttatttgaagcaaatgcgttttaatttcagattaattaacaacagtcatgatctctgttttgttactgcaggtaacaatgattctgtacgaggttcttaggttgtatccgccagtggtgttcttgaccagacgaacatacaaggaaatggagctcggcggcatcaaatatcccgctgaagtgacccttatgttgcccattttatttattcaccatgatcccgatatttggggaaaagatgcaggtgaattcaatccagggaggtttgctgatggcatctccaacgcaacgaagtatcagacctctttctttccatttggatggggtccccgaatctgcatcggccagaactttgcactattggaagccaagatggctatctgtacaatccttcagcggttctcctttgagctttcaccatcgtacatccacgcaccattcactgtgataactctccacccacagcatggtgcacaaattaagctgaagaaaatctaaccatgctgctcacttgctcggattggtcaaggagaaacaagtcagtttgataagttatatatctttctcttttgtaaacagaggtagtctacaggtttcgtattcgaactagaaagattttacttattgatatactagcttttatgcagataaaaacatggtgagtgaaataatattccgagtttttaatacaatacaagagtgatttttaggctcttgaggatgtatcatattttatagtgtaaaatttaatctctctaatacaatgacatatgaaaaatttgcattaaaaattttaataccttttgatacctctcgaaaacagtaaaatatatcacaacacaatcattacatagtgacaccagccattgtgaaaacagagcaggtcttctaggcaccggcaggtacgtcccacaggatttccaccaaatctgcggttcgcaagaacaaaaccccttctttgtgattgcttcaagtcttcaaccaactccgctgggcttcgacagacgactcaaaggtgcgagtgtttcggtctttcaaggtcatccaactaccgagactacgagctgatcattgttcgttacccattgtaatgacacagcttatcagctgtagggcaggctcctctcttatggccaataacatgaagagtttgcatctcgctggtgcattattgtacaccgttcccactcggggccatgaagaaaatggaataagtagatgaagcagagtaaagtccccttccctaacaacacaatccgttgtgccaccctaaaggcctaaagtacccttttgaattagtacttggcccttttgaattagtacttggcaaatcattttatatttttttggaatacgcaagcagcacatcattgtattaaaaagagtaaagtttatataaaaggaaaaccgaaaaaaaaaacaggaaggggacagggtacatgagatacaaagagattagggcctaatctccaatcagattctgcgagcgggggaacatgctaggcgtggttagttctgtcatcaccgcatttgttaggcgtcatagctcagcatcagcagccataccctttgccacttcgacccagggcttgtgatgctgattgaaaaccctgttattcctctccttccaaatcgtccaggcaaccagggctgcgatggtgtcgaatccccgtcggtgagccttgtcaaccttcatgcggttatcacaaagccacaagtggaaggatgcttcattgaatggcaggaaattgggcaatctaattgctctgagggcaaaccaccaccattgccatgattccggacaagcgaccagaagattattgatagtctcgttgcattgatcacaaaagacacatcgatcaaggtgtggcaagccgcgattgtggagctgatcggccatccaacatctattgagatccaccaaccacatgaagtaacgacatcgaggaggcgccaacgacctccaaatcggcttgtcctagaactgcaccctttccagttcccacaaacagagacaggtaggcggaatatgacgagtattcccctgaagactcccaccaccagatgagggaatcgggctccttggagaggtcatccaaggagtggattgcaggccacagattgagatattcgaggattgcctagacccctaaggcactggtgatgtccttgatccatcttctatcttgtagtggcaaatcattttctggtaggtttgggagtgttgtcttgcctgaatggaatactaaatagcctaataattcgaggtacaaacaaatgtattaagtaaaagaatggtttaaatgtaatattttaaataacttatatgtaacttttaaaaaaaatcacaccaatagagaacatgtatattcttattctattttattctcggggaaagaacacaccttaacagtttaggatttaagaagaccagctgaatacccgtgatatggagtacggatactcatacacttcaactatgcaaggaactgcagcagcggttgtcagcaaatagtgttctgctttcatatcagagattgagatttcagagtgccggatgcccggaacatggagcttccagtgtttatcagcaaatgtgttctgctttgatatcagagattcagaatgccggatgcacggatctatacagacgatttcatttcatttcatctttttttctttccctaacccgacgatcagagtcggcgcagcctaaccggaacgccgtgctgcgggtgcagcgtcagcacggtgtagggcgcgtgcgcgtacgccggcgacagctcgaacgcgaagcgctgcaggatcatgccgagcgccaccttggcctccagcagcgcgaagttctggccgatgcagatgcgcgggccccagctgaacgggaagaacgcgccggcgccggggtccttgcacgccctggccacgccctccgcgaacctccccgggtcgaactcgccggcgtcgtgcccccacgcggcggcgtcgcggtggatgaacagcacgggcagcgacagcatcacgcccgccgggtacctgacgccgccgagctcgatctccttgtacgtgcggcggttcatcatcaccaccggcgggtacaggcgcagcacctcgtgcagcaccatggtcacctgccaaagatcggctccatcgatcatcaaatcgtgaacatcttttgcagaaaacggtgcaaaaattgcgttacggggcagagtgcacaactcacgactttcaggcggctaacgccattgatatcaggtttgtttcgcccaaagacctgcagaatctcctccctggcgcgatcctgccactccgggtgcatgctcagggcaaccattgtccaggtgagcaacacggcggttgtctccatcccggcgaagtagaacagcttgcattcgtcgatgatctcctcgacggtcatccccttgctggatttgccgtcctcgtcgctgtaataatccatgttggattgtaggagcaagccgagcagatcgtccttgctggcttcgccgttcttcgtggccttctgcctcttttctattatgcctcttagaatactctttatctctctgtctattgccttcatccttctgttgttttctgtcggtaaaagactggagggagagtattatgttagttctatcatctatggatgaaacgaataagtggatacaaaatgaatttagtttttttctctacataaaagttggatatattcccgaaacaatgaaagttggacacaaataatggcaaatgtaaggagcactttttggtctttggtggtccatccatgtttttctcacaactattatgttgtcctgtatgtacttaattttctcttgatattgataaattcggcaaaacaaaaacaaaacaaagaaagattaggagcactctgaactttaggtagtgttttaaatatatactatgcaggtaaaagttgatggatgatccactcgtttgtaaagataaactacatattatatattataaaactaacaaataacttagaataagtggtgtcaacaatgcagtaaaagaaagtttattaagagcatttttagaagtgtgaaacaaataatccagttataaattactacttctttcaggttataaggctttctagcattaacatctatatgaatgtgggcaatgctagaaagtcttatgtagtaatatgaaacggaggaagtataatccaacagatgagttgaaaaaagaaaacggggactgaaactaaagatgttgggacagtgatgagaaccatacgataagcctgggatgtaattactccggaaagattgaacaaggcgttcagcttgctcggcctgaagtaggaaaatttgtctgccttcgtggtgtctgacaccaaatgctgctcttgaaataacatctcctgataaattctgaaaatctggccaaatgtccagctcggcttttccaacagaagcagcaaccgcattctcccatctgccaattagttcgctacaagatgcggagaatgctggcaacatccgctgcaattagttccaagggaatatataagtcagggaaaggggaaaaataccaggaaagtaagtgtaaccaaattgatctccagttctaatatgtttagttcgacctgtttagtgactgcaaagaatgcaggcattcatcagattaatttaacttctgatcaaatagctaggctaaacgatcgtcttactaaatgataattcttacacatgaaatcctgaatactaaatacagtagtcaggtctcatattcacgaattctttcagtaaatcctagtaataatacctttagcttttctgcatgaaaggctggattcataatcctcctatgtttgacccatttttcaccatgaaggatcacaagcccaccaacgagtaacttagaaagccgagtggccagctttgtcttctcaaagtgaccaaatttgttcgatagaacttcacggaccaagtccggatcagtgattgtaacccttggcattggcccgaaccatgtaaaagaaaccctacctgtattttcatgcgcacagagatcagaacatggtacaaagacactgaaaaaaacaagataattgatgatcaaatagtggcatttctagatcaactgtacgatgaacttaaagttgcataacaacaatcaaatcttggatgtgttcgccgaaaaacaaaacaaaagaaaacaaatattgcagaagtagagcgagtacagtaccgtgttcctccaaggcacggtgaagcagaggcgcgacgcgcgggatgaagtcgtggggccggtccatgggcacgggcttggagcgggccgccgtgacgagccgcaggtcctcggtgaggtcgccatggaggaagcggtactgggtgcccctcaggccctgggccctgagggcccgttccatccgccgcggggccagccaggcccactccagcatctgcgcggcccagaccagcagcagcgcggccaccgcgccgccgagcaggctccacggcgaggcctcgccgaatggtagcgccgcgccggtgccggtgccgatgccgatgccgatgccgatgccgatgccgatgcccattgcttctttttctctctgcatgtaccgagcaaagcaaatgtgttgttgaagcaaacgggacggagagatcagtacgtgtgtgcagagtgcagtgcagatatactaaccaattactaacaaagtaacaatcaatgattgccttctcctgttctccaacactaaaaagaaaatgatatcctaaaaccaaaaccggaaattagtgaccatcctgtcccacagaataactccgaaatcctatctgatactactgacgtcactgattacggtagtgaatcactccacgtgacggcgccacgtagccggaggtgaggtgaggtcacagcgcgacctccgccgcattgccacggtggaggaattcagcaagacacgtgtgtgcagtatgcatgcagatgcagtacctggtaccttgtacgcgggcgaggcgtcgccggcgtcggcgtggtcgacggtgctcaggttggagatcaacgaagggggaggccgagaccggccgaacgagcaggcggggaggctgggggctgccagccggtgagcgtttgggagaaaaggcgaatggcgccggcgccgccggagagatgggaagaaattaagatggggggaggatttggaaggatctcaaacagaaaagacgtggctaacataggtgtatctcttgcaggagcgggacaacgacatggggagcatgggcgccgctgcgcatgtcgacgcgacgcaagcgggggttcacgcatcttggcgtggttctacgtgcctcgggcggtggtacacgactggcgctttgaatggaggagaggatgtatggttgcaaatcccggagataccgcaccgcgcgatagggccggaggaaggagaagctgatccaaagacagaccccccaaaatgttcagtcatcagtgggcctggaacggaaaacatcttccggcccatcaaacaccccatgttgatgcacacaggctataaccaacgaggcccatggatgcgtaaggtttagctgaagttttgatttctgggctaaaccttctgcttcagacgttctgatttctcaagctgacgctcgaacattgtgtttttttcttttaagaaaagaacatttgtgtcattttacttttttttaaaaaaaatacatacagagatgggcatgtcgcctacgtggcaccgtcccaccaccattacactgtcctccacctcactcattgcactcacagtcgtcgtccatctgacccttccctccaaaaaaaggtcggctatgaccctatccaagagctactggtgccgtcctcgaaaagccaacaagagagtggaggtagcggcacccccaagaagagtgcatgaggaagacgaggctatgtcttttctaggagttcaccgcctatgcctattcataatcttgtgttctttggttgtttcttcaacttcatgcttaggttaatggatggatggggcaactggcagaggaggcacaatgtgtggggacaggaagaatatgacttgcttggttctatgcgataccttcatgtacattttttttgttggtaccagacttgatatgcaacaactggcctcgataccttgtgggtattaggtatgataccagtatcataggtaccaggtctggtacccaaagcatcaaatctgatacctcaggtatcaactttggctcctgacaagcgtggtgatcagatacggacatgcggtaggcatgagataatgcatggtaagaaatgcgaacacgtgggtgtgtaggggagcagttgatgggggtaaagactcgtcatgataatctatcccattaagaaacatgatatcaggggctagcactcttttttttaattgagaaacacagtttatatgagcacccatgaaagtctagacctacatattttgatattaataaagttatcatgagcgactcgctaccaacgtgtgcattacctacgactaaaacaataataaccgtaagtacacttgtggacattacttcacctttagaagacttgatgtttgtcggagtgcgaaactcctctagaggagaagcaaggcactccccctatatgaattcgtctaggatacaagttttgagctcgggtcctgatcacacgtgagaatgagcacaaacaagtatataggttcctagttcaaaaatcaacctcaggggcaaattcgatgcttttttaaacaaaaacaaatttaaaacagtaagttcgatcgaaatttcgttgaaatctcagttttcaacgtttcgcggggttccaaattaatcaatgatagcgtgaaccgatcagagcaccccaaagcatctttaccagtaatcaggcctccaaaacctattcacgcatatgctctccctgcagcctccaagggcgattgatatggatttatctggactgttaatcacaaaagtctgcatcatcagcatgcgcatcgcctatatacgcacctactgacctgacctgcaacctaggcatgcccgggcctcatttttctatccgcgacgaatcgcgcatgcgttccctgcagatgacagcgatctcccctctcctcctccttgacgaaaaaacaccgcggccgggggcgagaccgggagagggggggttttcagttcaccggagtcaaacaccggatcagcaaaggaaataaagtttggtgccatgtcgctctcggcaaaggaaacgcttgcctcctggaaggcacgcctgccacttcgagatcaatttttaaaaaaggtgttagactacgacttatacgctgtctacgcatgtcatgtatgaacaggttaatttttcttcatagaaattttacaacaaagtcgcctcgcgtactctcaccggtaaaagagaagaccagctctagcagggtaagcgtgttttctgtgttattaatggacttgctctagatcaatctcaactttaagaggacaaaaaaaagcatatggctgcggtaatatcatagtatcatataggagtattacatcatgcaggtgtcttagctttcttatttgttgttacatgaccttgcttatgtcgacacttcagtctgttatgtcgacactttggtctaaacacatcctgtgtactgtacagcggcgaccgtcctccccccttatatgtcaataacaccttaaataacagtacatgtgaaaaaagaaagtttacaacataaaagaaaagaaaaacaaatactccatttgtttgcaaatatttgtttgtttggactaaaaccagcattttttaagtttaagataaaaagtcggcaggaaaattaaaaggggtgagctcctatataacaaatgtatttttaactattatatttgaagtaaatagctttaaaagtatattgcagactattaagaaagtaattttggttacataattatataacctaaaaatttttgttgagtacagtaatcagtttaagtcaaactaaaaaaatatttacgaggaagggagtacaaatcaaaataaaatatgcagcaataaagatgaaagccccaaaaagaaagtcttgaaaaaatgtctcaaatcaaactttaaagctctgaacatcaatatcttataaacatctaggctatggtcagtgaaaatatggatgacaatgttagaaatctagttattatttagcatattttaatccaaaaattatagcataataaatatgacataataaatatgacatgtatgcaggcgagtgatccaaagctggtgctaacattaacatgctaacagagacaatagcatctagacatatgtttaacaccagagtgaggagaacatacccgcagaacgctctggattcagaggttgtggtgttgatgttgtcgttcccgattgagccgttgccgttccctccattgctattcctgtcgcagttgtcgttgacgtcgttttcgatactgatcgacatgatccggaggttgatgtagaggaagcatatatgacttgatgccgaggaagtagtgctgatgtgaagcagaggaagaagtagagcagtcgcgcgaagaacacgctcccaaaaattttatcgcccacctaaccgtgcatgtactctggtggacggaattctggaggtctactcgtcccaaatacccgtatgcgcaagtactcagaactaggaaacaaccataggagcacataagcagaggaggtgtctacacaagaagaaccaaaaactgaggtagatagaaccgagagagagctctctatctacctagaggtggaagataacgcaagagaaacattactacgttaatctcgattgattgcactataggcctcgtctgttaccggagtaatgaatcatgccggttatgcttttactcataaaaacaaaacggctgaaaacgagcagcccgtccgaacccgccgctttgacgccctggctggcttggcttggctcgagcgcacgcgtgtgacattcccaccaccatctcaaccgctcagtaggtattctctagtagtctatttaagttaagatcatttttcattggtttttaatgtggtattaatctcttaacattaattgtgagcccttgaaattacaagaattaatttgggcctatcccatttaattctaatagataagacggagatacataaataaagaaaaaacaatttatatgtaaaacattttatatgtgtattatcagtttaaaagtcaaggctaaaaactataatatggtgaaaataattcaaaaatcctattgtagaattgtgttttatattaaatatttagttgtgtccgataagtaaggcttagattggatgtgcaaaaattatatgcgtagatttatcttgaatagtacttttatggtgctataaattatatgtagattttaaatagtttgtaataataatatgtggtgaaagttttattttaaataccatggaatgtttattctttcatgaacggatggagcaactggctagataatatttttatataagtatcaaaaaaggagttgaaaaatgtgtggtaaggctcatgctcgtaacttggctagataactgttccaagtgtttgatactttgattgctcctagtattaatctaatacactcctcaccacctgcaaaatacagtcaaaacgctagtgatgatctcctaatggcccgattagtcgtcacaggtcaaccatttggtaccttattatgtaacaagcatagtggcccgcgcagattgcgcggctagcatcattatattttctctcatataatagcatatatgttttctcattatattattcaaatatattaaaatgacaacataattttaaattttgcaataactttacaaaactactaatgtgtaatatttatattatattttatatacgtgttagttattaattatttttaatattaaattttagttatttgtaaattatatatattcctatatggactctagactcgtcttttaatatttctttttttaattccgaattttctgtaaattgtatttttatatagagtctatgctcttcttccaatattatttatttttatttatgaatttttattatttctaattgtatttctatgtggactctaaactcatctttcaatattctttaatttttaatttcgaatttcagttgcttctaaattatattccaatatttgtattcctatattgaccttaaattcttcttccaatgtttttcttaattttgaattttagttatttgtaaattgtatttttatacagactctaaactctacttttaattttattatgtttattccaaattttagttagtttgaaattcctatatggactctatactctacttctaatattccttatttttttaattccgaatttctatttttttttctaaattgtatttctatatatactctatactttacttctaatattccttatttttaattccgaatttatattatttcctaattgtatttctatatgtactctatattctacttctaatattccttatttttaattccgaatttcagttatttcctaattgtatttctatatgaactctatactctacttctaatatttcttttttttaattctgaatttcagttatttcctaattgtatttctatatggactctagtctcctcttctaatattcctttttttcattccgaatttcagttatttcctaattgtatttctatatagacagactctagtctcctcttctaatattcctttttttaattctgaatttcaactatttctaaattgtatttctatatggactctagtctcctcttctaatattccttattttttaattccgaatttcagctatatttaaattgtatttctatatggactctgtcttttctttttctccgattaatgtgagaatttctaggccatgagagcgaacttggaggttcctttttctattcctttaattatatatttaattccaaatttctttctaaattgtatttctatatggactctagtctcctcttctaatatttcttatttttaattccgaatttcagctatttttaaattgtatttctatatggactctgtattttctttttctccgattaatgtgagaatttctaggccatgagagcgaacgtggaggctcctttttctattccttaaattatatatttaattctgaatttctattttttcctaattgtatttctatatggactatatagtctacttctaatattccttatttttaattccgaatttcagttatttcctaattgtatttctatatggagtctatactctacttctaatatttcttatttttaattccgaatttcaggtattttctaattgtatttctatatggactctagtcccctcttctaatattccttattttttaattccgaatttcagctatttgtaaattgtatttctatatggactctagtcccctcttctaatattccttattttttaattccgaatttcagctatttgtaaattgtatttctatatggactctgctttttctttttctctgattaatgtgagaatttctaggccatgagagcgaacgtggaggctcctttttctattccttaaattatatatttaattccgaatttctattttttcctaattgtatttctatatggactctatagtctacttctaatattccttatttttaattccgaatttcagttatttcctaattgtatttttatatggactctagtcccctcttctaatattccttattttttaattccgaatttcagctatttgtaaattgtatttctatatggactctgttttttctttttctccgattaatgtgagaatttctaggccatgagagcgaacgtggaggctcctttttctattcctttaattatataatagatttccagatattcttttacccccaaattccaagtagtaacagagaaagaggggcaaagctagtacaaattacaaaagcaatagcacttgagagaaaaagaaggggagaaaaagtaaacacacatccacccagctagtgcttaaccccattgtgtgtatggattcagtgcagcagctgcaggccaagcaggcagcacagcactacacatacaaggcacacacatcccatgctactagtgctgttgcccttttgctcctgttgtcttctccgctcctgtcgtctcctctcctcccccccaaatccccctcctttttcttggtgctgctgctgctgcacgaagccacgagcgcctcgccacctcgggatcgcctccaagatccgattttgatctccccgccgccgacgaattcgtcgagacccgccctcgccgtacctgcccaacggtgctcgatttggttgtagccttctggttctggtacttggctccatggacctatctttgatcttattatgattcttattacggttttaatcttctatatatatcggttgtggcttgtaattgggggaatagggggatcgtattagaacagtgaaagtttggaaaaattttccatggtttgtgtgtgcttaccaatcaaggaggcagttggaggcaagcctgttgttttcttgattggacactaaaagccggttcttgcttttaactgtgttggagttttattaaggatgttttctgttggtatttaatgaagtcgatttggtattcaacagtaacttaaacactaatcacgatccacttatctaatctcgtgtagaactctgctccccggctctgggaattagttttcccacgagaacaaatatatagttgaaggtagcacgaatggattgggtctaccactaccaccaaacagatgacatgcttgaagttgtatatactagttagcactgtattttctctatccttctgttggtatttttacgtgttgataacaaattcacaatcagcaggattgcaggaatataacaaaacttaagcactgagcagcagtatgccttggacccctttgtactcgacttattacagcagccgaaagtctgttcaccttgctgtgtttttccgtgtgattgtgtatgtctcttgatctcctgaaacctttcatattcatgataatagaatctcataattctcactgaatttttaattttccatgcattgcaggtgaggcggtcacatttacaggagaatccttttcctttgtggttctttgttcttgacgacattgggtgtgtaaaaattgagaatgtatgttaaggttgaacttaagagattccgcattgtgaaggaggtgggaacaatagtaatgaatgttaggatctttgcttattaccagttgatgcaagtgtgccaggtgagatatttatttgttgacctaaagaatcctgtttccaaaatgattcatagctgttgctaaacaaaaaatgagaatcaggtgtcatttttcatggaaacattcttggtactttgtttgggattttcacaataatctcgtatagtgaaaagtaccacccatcaactatctacacctatgtaactgtttgagatctttctattatagcatagctaattaatttagttgggttttggaatgcatattgtataggtgatctggtcatgttctcattgttaacctgtaatcctggaccatgtagtgctattgcagatgaaatttaaaatgatgtggggtttcagtctcttcccttccctgtccctcccccagtgaccctgatattcttgagttatgctagaaagttttgattgatcaatcattatttcttttcatgaaattgaacggtgttatcgataaatgattatttgattaccataaatagatattttgttgttttgtcctcaagactttttacatgatttgctaatgcatacctgaatcaaataatacatatacttatcagttcactttattttttagtataaatttattaagttattcaggcatctttgtataccttattttactatgtgtctcttctgtattttaacaaaatattctaaattgcaggctgagtacttccgtcaattgcttaagcctgtcacgtagtccaaatacaggagtcgagattagtcactttatctgctatttatctttcgtctggtataaagtcgcaacaacaaaagcagtgcattcatgatggctaccttgtggtagggtgtttagtctcttgttgttgcgagtcgcaaacatattgtagaattctcgttgtttttgggtagtgtagctactacatcagatcaggtagaggtctgtacttaagtgcgttctgtccagtatcagccattgactcatgcagagggatccaacagcattcactggaaacccttcctttgcttatggacatgaagcagatggttatatcgcaaatggacccttgggtggtcagtgcaactacagggttcctgtttcacctgcctttggtgccccttcaggcatgaccagtcctcaactccgaacctcactcggtggatttgagtttcagccttccaaggtatgccccagaaacttcatcatctttgatcaaactgatgacaaagggcgcatcatgtgtcatcctgcattggtgagcaagctaaacccttcagccaccaatgctttcccttcctatcccgagccaatttgcagaagttccggccaagataacggaaacctggaagaagtttcctcatctttcaaggaggatacaagagagattgatgcactgctaagctctgatgaagaaagcgatgaagatgatgtcaagagtactgggcgtactccggactgcttcgagagtgattcccttgattcatcttcaccaccaaggtctaggaaaatgcatcattcttctagccagagttcagtcttccatggatccatggacactgttactcatgagaggatgagaaatatggtcacagttcttaggggaataatccctggtggagaccaattggatacagcctctgtcattgaagaagctgttagatacctgaagtttctcaagatggaggcgaagaaacttggcgtggaggtttcggataactagaactggcaactggtacagtggcgatactaaagctcacacataaataaaatctgaaggcatcaatgtgtgtatatatggtctttggtaaggcccttatcatcattgttacttgattgactttgtgtgggtgtggaaggtaaggcaggcagccagcttttgcttctttctgcaggcctcaaaagaggtattgtttgtgggattctgatgcttgatgtctggtagcatggtgttgctgcgctgtgagctttccctccctcatcatggtgtggcactatggttagatcgtcagacgaagttctggatgatgcattatgttttcaggcttacctttgccttttgtgacttaagcacctcagctctacctatcctatggtcagatcaccgtgctttgctctttttcaagctctgcttatatttgttgcactacttaaataatgtacatacttggcttgttaaattgtagtattgtgtaccgaacaagatcatgtcattgtgaactaaattacgatatgaaataatgtactttggatttatcatactatttgtcaagaggaatctgtctcattttatttgctttggaaatgatgatgatgatggttctcaccatcgaattaagcaaagggagatgattgtgatgatggtgtccaagagatagcacgacatttgtgcattcatttattccctgtgcttttttctgaaagctatgaaagcgaatcgggcattggcacaaacgtgcaatcttttgcaaaggccaattatgttgaactaaaggttggtgtttcccatgcttttgccttcagttggcttggctattgaagtggaagaagtttgttcaacattgccatgcagaaaatattcttatagtatatcagtatatgtatgcgtgttgtgtgtatgcatatatagtggcatatgttcagtaatcgaaaaaagaaagatgtgtgttcctaaaatagtggacatagcccctatcaagaaaaaaaagaagtggatatagctttcatatgaatgtcttcttttttcaattttgaactttttgtcgagtaagcgtgcataatattttttttccttaaaatgaggcttgaatttttgttaaggttatttatcatagaaggaagccattgttaccatataccagtggttctaattcaaagttttacaaactgagggatggactattagaaaagagaaaattccttatatatctctaaaatatttagccgatatattccagagttttgctcactcttgtatgcctttcacttttgactttattctttttcataccatttctatcaattaactattagttgaccgtttaatgtgtgaacaagttggttataccattggacatgaaggaacgtggaaatttattggcatccatcgttggaaatatttatggtaatttgttgtgtgactaatattctttaactttgttgtataacggattattatatgtggaaagaatattatgtattaaaaaaatgcatgtgtggcatttttcaatatgtaaacgtaacagttagtttctattcgaaaatatataataagtagaataataaatattgaaatttttttgccattatataaaagataaaaaaaacttgccactaataaaaccctacacaaaaacgcgaatattagggaataacctaatatccaataattagaaaaggtgagacttcaaacccaaatcgactagcgcaagagctgcctgaaggccctagatgtttctcaataaaaccccacacaacaaaatcataaatatagtagtctcatagaacaaactcctgcacacttccaataatatactttacagatttctatattcatttcataactatggacaaatttagccttttcatagctattacctagtcagctaatagacaactggtgaaatgggcataaagtagatcaaaaccaaattcgaggccataaagtgagcgagcaaaactcagaaatatataagagatcttctggaatttaggagccataaaagaaattttctcatcagaaaatgaggtcacaccatgttcttggtttgtacgccctgcttggagttccctgagaaacatgttccctttttcatcacttcctcatctttctttacccatttcatttcggtttattactatatctcacaagggcttaaggtcgctgcaaactcatgattgacgttgacatttgtaatcttgagttggtgtcgggcccagctggcctactcttcagcttcctatagacttctacacgacgagcaagcctaacatcctaattcgttttacagcttacaagcccgtttatcggcccacaagttttgtcacgttgcttactggcttaacctgccacatttaggaaaaagtacaccgaaggtccctcaacttatcatcgggataaaaaacgtcctcgaaccgcaaaacctgatatgcgaggtcccttaactatacaaaaccggtcacccgaggtccttcggcggttttgaccctagttttggtctacgtggcggcggaggcagtgtgggacccacgtgggccccacatttcaggtgtccacgtcacctctctctttcccctttcttttttctcttatttttttacttctcgttccttgctaatcacccgcccgcgcgctcgcccgcctgccaccaccgctgctccgcgcgctcgcacgccgccttcgccggccgccgctcgctcgttcgccgtgaccagcgcgaagctgatgtcaccgccaccgcgtacgcgcggccgcgccaccgtagcgtgttcccctcggccacgcacaccatcaccttctcgcataccaggttctccagacccggcgcccccgccgcggtcgggttcatctgggggtcatccgcgccgtccgccgcgtcggggcacacgaactcccatagccccttctgctccccatgtcgccgccttgccgccgatgggctccttgccccagaaccacgggtggatcatcacgatgccctttaggcggcacgagaggtgttggctggtcaggccgtggcacatgacaaggtgatggtagatgttgtcgctggcgctgtcgcccgcgaggaagacacgggagagggggccgtgcgcagcgagccacgggtcggcgacggagagcacccaggcgagtgctgcggtggagtcctcgtacgcggccgggagcgggtgctccagggtgaggcggtagcaacggagacggtgacggcagggcaggcggcggcaaggtcgttgaggcagcggcgatatccgggcgacgcagccgacccgatcacgaaccccccgccatggaagtagaccaccacggggagtctcttgtctccggcagcgggcggcgggaggtagagccgcacgaaggaggaggcggagaggtgcacgtccctggacaccatcactcttgcagcatgcaatccatatggctcgcgaggaggtgcttggcatggtggtcgagatccaggagcggcacgacgcgcctccacctccagatgtcgacgttgaccgccgcccgccgcctccattgcctctccacccgcggctctgccctcaccaccccacgtatcctcgctcacctcaccgccgccagagtccatgccggtgagctcgcaaaagcaccgccttcttcctttgcaccctcggtcggagcagccgccacagcaccggccatcgcaggcaaccggacctcctctcccgactcgccccaccggcctcctccgcacctgtcggtcgaccgtcggcctgctgagagtccctgacaagaaagtgttggagaggagaaagggagagaagatgggaaagagagagatgacatgaccagtctgacatgtggggcccacgtgggtcccacgttgactcagccgccacgtagactaaaaccggggtcgaaactaccgaaggacctcgggtgaccggttttgtatagttaagggacaccgtatatctagttttgcggttcgaggacgtttttatatcccgataacaaattgagggaccttcggtgtactttttccccacatttatggcctattttcgtatcagaaaagaagttcagaaagggccgcccggtccacattgaagagcatgaacttttaccaagaagaagaagaagaagaaggaggaggaggaggaggaggaggaggaggaaagctgcgtctacaaataggtttcctgtagtcaattagatcaaacattttgtgggtaacatttccctgtaattttctctctctggataaaaacacaccttggtcgctgggacacctttgcttggcgaaatagcagatattgaagaacatgcacctcgtctcgacgttggtagcttcttagcttctctagtccaaagtcaaggggatttaccaagaatttgtaagaacacagtgtgatgtagatggacttaaagcatgaggctgttatgacatgacgccaggatcatgttcgtgttacaatcaggaccatgatatcatccgtccggccacgccacaccatgttacatacagtatgtgtttgttcaaaacccctcaatatttagtagctcccaacatcaataaccaacgtacctttttattaatggagtgaaatacattacacgttacattatattatcatttagatctgtgaatgcaaaatacacatttaaattcattatcttgatttgatcaaagcgtatcgacttgcacctccacgttggcaaatgttttgcgtttggcccccttcacagctaaccatggcagaaaaaataaattcacacccttcctgctacagtttagcttttttccttctccttttcgctcattgttcctttcttttctttctctttttttttgtcttcttccactgtaacaaccgtcgtcgaggtcgtagtgtccactaccacgcactcgagaggaaagggacgctgacgaatggcttaggtcttcgccacctccttcgcaagaagggaataatgcctggtgttgccaaagcgtggacaacagaggcatatggacctggaggccactggagccacgctctaggaatacattcctactccacccgttgactgctttacccagtatctcgaccccattctagcacctccaacacacctgctctatttatttcgccacctcttctattgctcctcgaagtccagctggcaacgtgcttgcatagacccatatggaacgagccaacggcaggtattggtggtgatggggatttactgcatccgcgctgcggcttggcgaatgtttcgtaactaactagtggaggcttaaaaggtgagagaaggggtagtgtacagaagatgctcgataaaatgcgcaaaataactcaagcttggtatcgtgcgtattcaagcaacagtgccagggtgcctccatcgacagcgtggtcttctccttgaccttcggtgccacctcattgtcgcatcatgcctccgcaaccttcaacaccacagtatcccaaggctttacatgtgaaaggagctgcaggaggaggctaatcgccgtcaggattgagctcccccttcaccatcccctttgctccaccattgttgccgtcagggtcaagctccaccatccccataccgctctgctccaccaccaatgtgtgaaggggaagttgctgccggagttccatgacagtggtgagctcggtctaattgcaatgtcagtgtttgctacgcgttgagctctcccgcacctttatgaaggaattagagaaaataaaaggaatatcaaatagaagaaagaagaaaaggaatagggtgaaaaaaaaagaacgcaaaatacatttacttcccattgcactgtagtgggaagggggcaaatgcatttttttctgccacggtgtgttgtggagagggttgaacgtaaaatgcttgccaacatggagcgccatgtcgccaatcatatccggtcaactgagatttagacctattgtgatacattaaactaacataatagacctaaatgtgcattttgtagattcatgaacctaagtgacagcaccgtaacttgaatgaccttagaatatatacttgccttgcttgccttcctatcagtacctccgagagactgacgatagtattgattgaataattatagacaacttactgttgatcaacaacacattgtctaagattgaatgaaacactcgtggcttgctagctcgtttgacctcttgggatttgttgactagcaaagataaagttttaacctgttaagtagataccaaaatgaacgaaagaaagcagcccaaggagaagaaaaagacatctctaaccctaaaactcctctccctattccatggaaacgtctccccactccccagctcccctctcctctcgttgtctcgctctcgcacggctaacgggtattggccaagtcaaggagtcacgacactgccctaggccacagttggctaccccactcccagcctctatctcgccacttactactttccatccccttctccacatatttgccattaacaacaccagatactagcagtgtcacgggctcgcgacaaaagccctagctggacgcctactccgcctcagcctcaccaatcaccagtcactatcatcttcgttggtcgccacccatagaattatagtagcactagtcacttgctagatttgtgggctcatgacaccacccagcccactgccagtagtcagactccacactttaccttgctgtctctagtcgccatcccctacaacacttcactcaatattttattgctcttgctcacaagctaattgacctaaaaaatgagccaagcaagcttagcttgttaggataaacagtcaaaccgaggcagaccaagctaagctggctcgatatctaaccttatcattgtccgtcactaaatagttataaatctgagcatccacatgagtcaaagacttaaactcgagcagacagattagaaatctaatcaacttatagctacaccaagtttgcctctttgcgatcttcatcttaccgagataaaatagtatcctagagttttcactcagtattggaaggttctataaatacccttgagttctatatatattgcctatccaaataaaaacagaaacgcaacagtttgaattataattgctacaacaaagttagtatagtacatatgtgtgtacagtacgtagcaaaatcttgcacacatccttccggtgaaatttaacactgcagtacagaggccaagcaagcaaatccccagttattaattacgggagaaaattttcttgttcgtactaatttccatcgctcgctactgctaccgtccaaagtccaaacacgatacatatacaccgaatctctgaaagggaggtgccacctataaatgtgcaaaaccgttgctatcaaaaggagaaattcgcaaagcggtaactctcaaggagtcgcattctcgaaccacaatatccagcagggtaaatgtttggtaattggtactggtcacttcaagggattctagttaaccacatgtgcttaaatattgttgcagcttccaggaaacatcacgtccgaccacattatcctcaaaagtttggttcgcaagatcttgtcttccccctttttccgttcactgatcctgaaacagagcatgaaagtctacttcaggacctgcaaaaacacggttattcatttttctccctttaataagcacaaacagaaaaccatcttaaccaattatatttatatgtcccgaactgcccaaaacatcgaacagagttatcatggagatatgattattgaaccatatgtgatgaagctttaggctgagttctttctcgattattcgtcggacggactatttgatacattttttgatatatatatatatatatatatatatatatatatatgctaaagataatttgcttccacttaaatgcataggcaacttattttaagctatttgctactttatttcttaaataattaacttatctatataatatattagacaatccgtagcaacaatccgctcaataatctgtgattattcaggaaacagtagcaggtgtgttggcttgatttcttcttttttctaattttcatatggctattggttttactccttccggtccttccggttccatattaattgatattttagacaaggctaagatcaaacttttataactttgaccatcaataactttaaaaatatttagtttaaaggaactagagcaacatatatagatttgtcttttaaagcactataataaaaataaacatgtatttatttattatatatattataataaaaaaataaggtcaaagatatatctggtagactgtgtccattgtttaaaacgtcaattaaaataaaatcagagatagcagttacttttgtaaggtatatcggttatattaaaacctactgggaatttgcgagctgagtgcgcttcggagcggcgtgttcgcacgcggaggcatccacgtcgcccgcgagcgctgggaggcgggtggattccgcgccccctcgagcgtccgcgcgagcggctcccgcgccgtccgatccctcacagcaacggctgagatcgcacgtggttcctagcgtgggtggacatttttcaaaaagacccattcttaatagataatttgttttatatccctcaccgtacgatccaacgttccgatttcttacgtatatactctccaaaactaggaaaatcctatgcgacgaagagaaaaacacgaaataggattgcgctctaaaaaagaaaagtcaaggggcttttctgaaacaacataaatccctacccctttcggcccttcctccccgaaaccctagccgccaccactcccgtgacggtgcgtcgcttccccctcctcgcgccgcctctccccgccacaccgacaccctgcgcagttgcgccgccgctccatcctccagcacctaacctcgccccgacaccgccacatgcttcgccgcatgtcctccacttcctctctcttcttgctgccgatgccgctgggctcgagctagcgagtaggtcgatctggctttcaatcaggttaggtctccgtccttagcaccacctcgtcggcgatttaccttcgccacaatccaagccccacgctgccttcagatctggtggcatctaccttgcagcggccagatctggcgaagagaggaggagcgcatggcggagcgggcctgaagtgtgtagctggcaacgtccccggtgtggtggtggttcactggttcaggtggacaatgcctcgagcttgctagaaatggcgttggcatggagttctccaaggtgaggtggcgaggtatatgtctggcggtgcatggcttgattttcgagtgatgtgggtgctccataagcagtggcaaagctcctatttttttctggccaccagatggaggaggagttgtctcccatcgcctagccgttctctggatgcagcaagccatctcccattagtatctgatttttgccgttctctggatgcagcaagccatcttccattggtatctgattttcgtttgtattccccacaaaaatttgaggtgtttgttttgtgtggtgtcctgcctacaaggtgttcgttgttttccctacaagcatgggaatgtggcaatcttacatgacctgttagtgtgtaagcctgaatggtttgttgggctttagatttggatcctagcttccacttaatttgccctaaacatttgaacctaccttaatgttagcagttaaaatatctaatgaaatgcatcattgaaaatattcatttgtagttagctctgtagatgcatgcatttcatatagataatgattgctgataactgcttcttttgctagaatatttatgtgactacctaaatagctaacaaacttctccaattataatcagtcattgcttgtccctgtgattcataaatctgtatggttcttgtgattcctgattgagttttcaaggaaaatactaacattaggtggggaatactgtgcaaatgattctgtcacagctgaaagacactctaaaaaacctctcatgtatttcacatttgaatgcaccattcaggtgggaaggagattacacattggtgatggcacaaagccacgggcagaacaactctcttgcgtgctcgagaaaaaagccagcggcagaaatgccatctttgttcattttattttcctttttttagttagtttgattagattaaggtgcttaacgagctggatttgctgttaaattttaaatgatttaaacagcgggccatgggttcactatttgctagaggtgttcgcatcgtttaattcttacatgcattccttggggtcctacatctacaatcctggttgcctttctaatttgagataatacaaagcatgtacagcctatatggctctatcggttttctgatcacaaaatttgtctgtatacatctattagttttctgatcacaaaatttttgttacaacattgaaaatgctggtctatctatgattagaaactttgctggttatttctgtgtataactgcaatatgatgttatctatatttgcgatacaattctgcaaattgctgattacagaagttgtcttgcaagagttgaaaaggacatgtttatgtgcttagatgttattctggttgcttgatctggcatcctgtcataatttgtttctaacactatcagaacaaaaggatagaatatatgttgcctaaatgctgtaattttcatggaaagaagcttgatgatattgccacctcatcccacaactatcatgtaagctatattggttgtatagaaaaccaagcatttgagaattttttttattgtcaaagattcaaaagccttgccaacccttggtattgtttgtattttctgtatttggtctatttggtagttaagaaattccctacaagtctgatttgatactttataaattcattctcttgcagtcctggagcattgttctgcttgacgggtggacagggataagtgtggccttttgttctgtagctgaaaaagtggaagctatgtaaggaatgttagctagcatatgatcagagtgatctaaggtttcagtctgttggataggattgtgttggcttaatgtttaagcttttgggtataggtggagatctcttagtagctttcttttaagctggtaacccccaagccttttgtcttctgaaaacatctctatgaaaatatttacagtttgtagttcagtaaagcaattgatcaacatgagtattatattttgatatgcgaatgttgttctcacaaaagaaaagtgttaattttgtcgttctaattctatagttaaaacgactgcaattcatgaattaattggttgtacccaattactacacaaaattgatcttcgatagggcgcacaacgtgcgccaaaatgtctagtactatgtaactattccatggttgtatgcaaagacgagggacggtagcagaagcaccgatgatcaagatgacaatgggaaatccctcgccaaacaatacatccccgtcgccgccaactacagtgatggggaacttttttgttatccccgcctccacacggaaaattaatcaccgcagatcgcccatccccatttttaaaatcatttacatatcaatagcatattcttttaacatgaaaagtgtccgtccactgatcatgttacgattaaacctttggacatacataatttgcattggatttagacccttatacccgctaatcaggtcttcacagggaacggggacgacgagggacaaaggatcatccccaccgtacccctcgccacacccaacagggacaacccctagacccgacggggacatatttccaccattccgtgttctctaataagagaattccctacagaaaaaagggaagagagccccatttcgatacctatataccgacggtagtgtgatgaagttatatgggtataactatattcaccggggctcaaattctgatacctaccgatattacatacatacacatatacacacacgtaggtatactttcaatgggatcttagtgagctcggcgatttgccggccatttacatctatctatttgagctcgtgttagggagacacgttcgtaaatatgtaagtatggtatgtatgttatcttttacgtaataaaaaaagtccaatgaaggataaaagaaaagtaaatatattactagtcgtaaaaagtaattatcattcaaagatctgtaaaattatatacatatgtgcgcatgtgacaagctgcctttttttttgaatgtttcattactcagccacttcttataagagtgaggatatgacaattttggaatcaaaattagcttggttaataatttaaaatactgccaaagcagtgtaaaacctggcctcttaaccaattcatgtgaagtgaattagaggtctataagtgttacgtacttgctttgcaggagaaatatacaagtaaaacacaagaacttgctatagccaactgtcctttcagtctttcaccatgaaaatgagtgttcacccaatcacccatatattctctagtacatgtcattagttttttatatcttcagagggatcttcacggacacttaatgatgcggtgaggccactaatcttcaattagaagatccagtcatccaatgcatgcatgcttaatgcattccaagctaggtaagttctagcattcataccccgagccgcacgcaaatgtaagtaatataagacatctctaacccagaaactatcaaatagtttctatagttgtcatatcgatcgtataaacactatatatagagactatatatccaatgaattatatcttcaaaattaaattatcatcctatcacaactcttctctatccttttatctatatatccccttattttctttcttgcttcttgtgtagagatggttttcttacctgagaaatgttttcttcatctttttacctctttcctcattatttttcttgtcacatcagattttttttacttatgtggcaatgtattaaatgttatggacactagatgacatagggttgatgatggtctaatatgttgtcttatgatagaaaattaatgtgtcatttggtgtcaaaacaaaagtttcaattaaaatatttataattctaggacaatctatctatctattaacttattaaggtaatagaaaaaagcgcttccaaattcactctcatgacctaaaatttcttatagtaatcagaaaaaaaaggaaaaaaatagagtccatataaaatataatttaaaaatagattaaatttgggattttaaaaataatactcaatttattccaaaatataaggcacaaccacccttaactcaaagaccacgaaataattattatcatcttgtagtttggatcatcctcataaatataatgcatgcatccaatagaattagagataacataagagtggaggattttaaaaggttataatttaatgaagaagatgtcatagttaattgcatgcttgcttccatgccttatattatggaacatctaagaaaagtggttatgccttatattatggaatggagggagtaaaatattgaaagaggagactagagtccatacatatatacaattatagagctaattgaaatttggaatttaaaaaaaaaatagaaaattaaaactagatgttagagtccatacataagtacaaaatacctaaaattcgaaattaaaaaaataaagaatattggaaaaaaattatatagtccagaataaaatttagaaataactgaaattttgaattaaaaatatggatgatggaaagaagagtgttgaaattcggaattagaaaataagaaaattaaaagtagattttagagtagacaggagttttacgtgataataatagagataacatataagatagctaggtaacaaaactcagatttgacaattttcgtcctagagtctgcagtcaaaagcttaagttatagaggtgcatttgacaatttccgtccaacgaccaagtatcacaattcgatggctgactaaaaccgcgcgcgcttcctccacgaatcacgaccagcagtaatttctattgcagtaggccaccgtaccatgcacagcacatgtaggaattatagcgttttacttccacatatgcatgagacagactctcctctcagttcttggagaatcctcccacagtggctgcacgatcagaagatccaacttttctagaaaacgcccaaaattgcgtgcaaatggctacttgcaaccttttgttggtcctaggaagaacgtccttcttggtgcatgcgtgacaaaatgattgattgatttgttcacgcccacgtactggccgtagctactagagtagcagctagctagccgcggacctcccttttcacgaactaatttccttgtccttagagtcggcaagaaatcgatcagatcatccacactagctgggcggtaatgagaatctcatcgatcgcacgttcagccagcaccaaggccttgtaggttgtagccactcaagttaattagctgaaacggagcagagtcaaaatttgactctctggctcgtgtagcttttgataaggaggttttactttctaattccaagccttgatcatcagttcatcacaaccataaaatgagtgaacgcttatatggctgctatttatggtatactaatgaaagataagcccttctgcgtgtgcccgcagtgttatgttgtgtaaccgaattgctttcttctaattgaatgatgtgcaattgttctgtgtgttcgaaaaaaataatcaaaggtaatggcagaaggaagacggaacaataacaccacatatgaacatctaatagtgtgccgcctaaaaaatataatttacacggaaggccatctaagatacgtccccatgtaaatatagatatttttctagtcggcacttcaatgaaaccgtctgcgtgcgggtggctgcttaaggtagccgctcgggtaaattgaaacaatcttcacgtgcggcggttgtcagtggtcacccgcgtttttatgtttacacgaatggctctctgaccctttgacacaagagatatcatcattcgtaaccataaaacatgcattttgtattttcatccacttgggaaattaatcgtgagggacctgcaaaaacttttttttgaagtagtgggagctagcacactggtgttgagaggtgtcctaggagaaactggagctcgagctagtaacaatcaacaagcctatgttagatatgaatataatcaaaactgaattacggaataatcaaaaccgaattgaaagtcgattatatggagatttgagatagatatatatttgcaaacatcgaaaaaggcaagatactaaagcactttcaatatctaagaacctgaaagatgaagctatccctgaagtgacctgaaagatgaacatgaaagacgaattacctccttgacaaataaaaaatagaggggtccacttgttagttctatctcttctttcggtcaccatatggcagttcaatcagcactaaaaaaagtacaaaaaggtagagcccacatgtggtgattgagagaagaggcagaactaacaagtgggcccccactattttttattttgttgactaccacgtgtgtgctacatagaatcaaaaccgttctggattcggtcaaggggtaattcgtccggtatgaaaagttaagagtgaagaatatctatttttaaattgagggggataatacgtactgttacaatagtttgagaggtagagagaggggtaattcagatttgtttttttcccttaattaatctctacatttaatttgtgacttgtcattcctggatcaagttctagagttacaatgttccatgaagatattataggcttaagggaaaattaacatgtactcccttcgtcccaaaatatagtaacctaggatgggatgaaatctatcctaggacaacgaatctggatatgtcttatcccattctaggttgttatatttttaggacggagagagcaacaaggtatttgtacttctatatcttgtattgcactttattatgtattagtgtgccactatcgaggagtttgaggataacaactggacttgaccagggcttgagaaaatactaggtccgttaacgcagacatacacaaaggctgatagctacttaaggccatttacaacccaataactaggatggtgtccataacattaaataagctgccacctaggatgaaaaatgatgtggcaagtgaataaatgaggaaagagaaggaaactatatcttgcatgagacatgacttctacacaatatccaaaacatcatgtgagataagtagcattaaatttaaatataggataattatgtttacattggaagagtagtgtctagtaggagtagtagtttcttaatgatgtggagtttatgaaaactatgtctagtgtcttgggttgagaatggccttagtgatcctgtccttgctatatattataggattggcaataattaacagccattctttttcctctcttcttcttttagatattttctttttttatttcaagaacgttagttgagctagcatgcgtcctttttttaaaaaaaaataatcaagatcttctctcttgcatgctgtccttaattaagagaagaaaataattgagcatatgaattgacttgttagttttaatttacttgattctccaaagctacctaccaattctatttctacacctgaccgtcaacagtattgatagtcgtcagcaactaactactaatttgccccatatatatatatttatatatatgcttgcacgagggataaccggaaaagaagagtttggtcaaatatgacggcagagggaataaaaatgatggcactagactgtcaaaactaaggaattattcagctatatcgagaggaaaccgagacatgctcgtatctgcaatccgtttaaaaggtgcaacttttgcgtggcaaagatacaaaatacatgtgtgtgctgaaggagatcgagcctttttatcattccatgcatgcatgcgtgaaaggattagaaaatacaccatctgtgcactcccaaagcatgtcgtgagggcaagtattttgcacgtctccttcacattttgtgcagataaaatttcgtaaataaacttataatcaaagtggattcactcataaagagaaaacgtatgcacgctagtaaagactaatcttgaagaagtatttatgcttgccctccgtcctgtaactgaaaacttactggtactccggcacttgcaatattaattaatactagtatatatgcggatttatcgtgtacatctaaaaacttgcggtcacaaccatatccatcagaccaccgtacgtacacatatattatctcagttttataatatatgatgtcgttcatttttttaactaacatttaatcattaatcgttttaatcaaaatttttgtgtaaatataaaaaaattaagtcatacatacgtaaagaatttttaacgataaatcaagtcaaagtaaaataaataatagttatatattttttaataagataaatgatcaagcatacgttaaaaaaattcaacggcaccatatcttagaaaaacgaagggggtacatcttggggaattaatatatcgatcatgatcattcatagaacatataaggccagataaaacatcagattcaacacatgttttgattagataccatacaagaatgtgaaaaaagaagaaataataaatgtgttatgttgaactgaataacaaatagctagcgatagacatagatctaacgcaaaaccggcctgctgcaggtactagctagctaatcgaatatgagaacaacagtattaattatcatttacttattcttgtgtcaaaatcccaatattacggccatctgctaccaaacaaaacaagcaaaccatgcatcatgataaggctatcttatggacactaccacaagaaaccggccagttcagtgtatcaatgtccaaagcaatcagaactctctcttttgcaccgtcattgtgtattaattccagatttatacatatatgtaggcacaaaagaaactacacacccgtcattaatttgtacaatctaacaaccaaaagcgggtcgatcatgtataataagttggcatcttctttgattgtcaaaagcgaaaatgtgagacgaaatattaattaatttgctctctccgaaaatgagtcaatgaggtacacatgatatacactagtacatgcatgtacaataagtctagaggtgcagaacagtaaagggctatgctgaagaatcaagtggaatgcagccgttctacgtt

SEQ ID NO: 9468 - DNA, 8038 bp, Oryza sativa
  unsure (1)..(8038): unsure at all n locations
gcctctcaaatatctgagaaaatggtaggaacaattgcttcaccctgcttttgtactgccaatggagtgccaatgctctgcatctgatgcaatttttacttatcttatgtaggtcggattgtcgagtggagtgctattcctgctgtttggtatcatgtcatacttgtcaggaccagaaggagaattataatgcccccagaaagtcatgcataaggagaattatcatgttcatcatggccggttaacaagcttgttttcactacgacttgatctcatcttagtaggtggacgatggcgacgaaagcgctgatcctttgcaaggaggatggcgattacttagcttagtcaacacattgtaaacatttcactcatcattcataaataacaagatggtaccaaagactctactggttgcttcgtgttagtcccagcaccagacaacattcagccaaaactgtcggagtagttgctgcatactaccatactatttttttggtcgcaactatgcataagaactgctagtcttcggactaaattgcctggactgaagaggggttacaaatcataaaaagtgatttcagaattagttgtttttctaacatcacccttcacatttttaaaatctttattctttgggatttcggatttgtcctgcagagactacattcaactggactataagacaggcaatgtgtgtgctgaatcagtcggcatgaagccagactctgtgtctgggagctctgaaccacaggccagaattagttgcttatctcttgtaggaataagttcatctgatgtcccttaacttgtttacgaatccgattttcgtccttcaaccgaaaaaccagatacaacgggtccttcaactgtgaaaaccagtgcaaaataagttcctcggcggtttgaacggcggttctagctgacgtggctaatttaacttggtcttcatctgacatggaattgacgtgccgctaacgtggcaattcgatccgaaaaaatattaaaccctgtgggacctacatgtcagtatcacacataaattaattaaaaaatggtggggctcacgtgggccccacatgtcattctcaccccccaccacttcttcctcctccatccccatctcccctctccggccacggtcacggcggcgccggggacaacgacctcaagaaggcggacgaggccagtcttgacgcccttcccacgtcctccgccactcacctcggcggtgcgctcggccggtggagagaggaagcgcagtggagatggcccaggcggcgggagtggagatcggagggagttgggggcgccgccggcagattgccgccgctccgtcccaccggcttcgcgcgccgccaccgccccactccgtctcgccgctctgctcgccccgccccgccggcttcgtgccgctgcgcgccggatgacgacgacgacgaggctggcgcccttcgcttggctccgcagccccgccggcttcgggcgccgccactccgcccgcgccgcgcgtccgccggccgctgccccactccgccccgccgatctgcccgcccagccccgccggattcgcgccgctgcgcgccggaagacgacgacgacaaggcatgaagaagcaggagcagactacaaaacaatggcattaatcatgttaggattccacattcagagagtgagctggagcacatcattgatttttgtgcagagagccagagatcgatggatcgattgattctgtcgccgatgactctaccaattctgtccaggctaatcaactcagctgaagtgcttgcaatttacatcggccgtcaggctgccgctgccgtcgccggcggatggctggatggtggtggccacgctgttcgctgccatgacnnnnnnnnnnnnnnnnnnnnngccggggtggatgccgaggcccagggactggttcgcggtgcttctcgccgccgatccgacacgatggaccaggccgggaaggcgatgctgtacctgatcgtcaacccgtgcaccttcgcacctccacggcgccgccaccctcctccacgctgccgccggtcaccgccgttcgcattgcctgctaccgcgccgccgacgctgagagggaagggagagaaacagatagagagagggggaaggagaggatgtattgacatgtgggccccacctttttttcctgacatgtggccccgccattttttaattatttttttttgtgtagctgacaggtgggcccatggtttttattatttttatgatatataattgtcacgtaagcgccacgtcaatgccacgtggtaagagaccttagtcaaaccaaccacgtatgcaccacgtcagccaaaaccgcctttaaaaccgccgagtgacctcgtttgcaccgattttaacagctcggggaccggttatatctggttttgtggtttaaggacgaatatcggattcggtgtaaaattaagggacctcagatgaacttaatcctctcttgtacactgtctctctttctctcaactcaactgggccagagaccgggatttctaacctgggccaaatttgttcacactgtctctctttctcttaacttaactgggccagagaccgggatttctaacctgggccaaatttgttcacttccagtggtagtttgctggtggaaaaagtacactgaaggtccctcaacttgtcatcgggataaaaaatcgtcttcgaaccgcaaaactagatatgtggggtcgcttaattatacaaaaccggtcacaagaggtccctcagatcccggttttgtcctacatggctgctgagtcagcgtgggacccacgtgtcaggtgctcctcgcgtggagacgaagaagccggcgatggctgcctcagtcacacgatgagcccgcgcatgaactcccactcatcatcatcctcggccacgccggcggccgacacctccgagtcgctgctcatgccgctgctctcccctctggccatcgctgcggcctccgggtagaacgacaggtacggcattgcgccgaacgctttggcgagtgcggcggcggtggcgccgtcggttctctgcttgaacacctcgtgctcgtgctgcatcgagcggaccacgtcggcgcaggaaggccccgccgctctacgacacgcgcaccacgctcggcccgccgaacaggttgtggagcccgccgagggcctcctggtaggtgccgccgaggtagtagccgcgggtgccgtggacggggagctcgtgcagcggcaggctgtgcctcccgctgatgaagtggtcgaccttgccgtcgctgtcggaggtgaggtcggagaggacgccgtcgattgcagggcgctcaccaaggcactggattgggatgattgggaacatctgcccgattgcccacatgtccggcagggaggtgaacacggacaggttgctgtggtacgtgaacacgaacacggacagcgaagaatcaaatcaaaggaaaaaagaatgaggtgtttggatggatggatcgagattagcaagaagaagaaatctaaagcaagaaaaagaaatggaaagaaagaaagggaagggaaattgtatcaaggatgccaaaagagagttttggaaggggaggtagaagaactccaggacgggattttggatctcgggcaccccacgccggcggtcaggagagagcctcgtcgaagctatccacgggccaagaacccaaccgtcgtcgccggcgtctaggagggtggtatgacccggcgctgagggctcctcctcctcgcgcgtgtggctccagctccgccactgctcatcctcgttggcgagcacggagaggaggctgccgccgccgccttcctccccacccgtcggctggtggcgccggcctgcccagagccatagagagaagagtgagagagagagagagaaggggaagagagaaaagaggggaaagaaagagaaggctgggctgacatgtggggcccacgtgggtcccacgctgactcagcagcacgtaggacaaaaaccggaatcaaaactgccgagggacctattgtgaccgttttgtatagttaagagaccccgcatatctggttttgcggttcgaggacgtttttctatcccgatgacaagttgagggaccttcggtgtactttttcctttgttggtggaagttggaacacaccatgatgttgcgtggtgacgggctagagtctaagcatactccctccatctataaaagttacacctattttacatttgagtttttccaaataagtttttcctgagtttttccaaataagttgttcctatttgtaatctttatgcattcaagaattaaatgaagagatgttttattagaacacaaggagtcatctaaatactcattggttgcatgcttacattcactccttaattttgtaacatctaaggtgatttagtttttccttggtcttgatgtcaaaataatatgtgtaacttttgtgggtggagggagtacattggtgcgacctaattttaatttggttacaaatttacaagtctagcaagatgttgcgttttgaaacacgagacacaaatgctgatatactccctccgtcccacaataattcaactcctggattcccaatgcaaacttagtacaaccatgaaaataccaaaatgccctcaacaacaacattacacagaattgtactgtgttctctacactgtcctcactgaaaaaaaaggtttaactgggttctctgcacccatcgattacacaggtatccagaaaaaaaaatgaagttttaaaccgaatatgctaacaaaaaattaagaacctctagtttgaaaaaagaaatcgttaaaaaaatactactccacaatctgcaagatggtttgcatccacaatctgtcaaaaaatacttctccacaatctagaaggagtatgaattaatctgcaagaactagaaagaacaaagaaaggtgtttgtatccaccaaggtggcctgtagtcatgtgtgtatttatccagattgaccctgcaagaagtcatcaccaaaatccaagaacttagtatagttaacaaggtgaaagggtagaaataaacaccagagaagaaagagtgatggaaaaagagtagtagaaaagagtacctgggctcattctaatggcaaagcttctcgaaccacctcagctttgggagacacaaaatcgttggctccttcatcagatccgctattgcaaaagcttgtgcatcaggctccctgcaacagatccactggcgctggagactataggcttgcgcctccgccggcgtagccgagcagcacctacacgttgcgttcgccttctcctgcatcacaatcgcaagcccctacctctgccgccgtgctgctagtgcctcatccgagccatctcaatccgccggggccggcgccgctcccgccgacctgtcacatccatgacatcacgggaggtcgcagggagggagagatggatggagcgtggagggaggggaagcgactcatcgccgtcgagggatgggtgaaggtcgtgaggagaggaaggagatgagaccggtggtggtgggttttttttagcgcggttgtgtggtgggcgagaggagagagacgggcagggataaggatcattgaatatttctcgggtgttgcgcaggagtcggttttttctgggacaaatcctcacccccagaaatcgcttctttctgggacggagggagtacacgcacacacgtatcccaattgaacgcatatatgtatgtgctgctcttatgataatatatgaagactgaggtcacagtgtatcgctgtcatgtcaacaagtacattatctatcattgaaaaataattataccctttaaaatctattataaataagaaatgttaaaatatattacatggaaaaataaataaataaaatttgctttcgaaaagccgctgaaagaagcttttcaattattctttttatgaaggggaaatgccttttccatgacttgatcgaggaatgtcctctagtctgacttcaaaatatagttgcaaatcatatctctagcctactctttggttaagaaagcgcaaggtgctagccagacttctgggttgcgcctagtgggcatatatatcataccaactaatcaaataaaagaaattagcaatcatattacataaaaaatagaccataataataaatagcaataaattaaaacaccactaagatagttaagttgcctaatgcatcaaccaatgcctaattgcgacgactaccagctcctaccttaatggtcgcataagtggcgcctagagttgaatttacaaacgctaagcctactataataaattattaatgtattacaattagattgttaattatattatttaattctgacttgttcaatattgtgcttacatttgctatacaatcaattagagaggcatcaatgattgttactttcgtcctcgcgaaaaaatgattgttacttttgtgctaggctcgtctgcatcctttctatgtatgttttagagctcattggttgccctaataagtgaaagcaaaaactggaatttaaatttaaatttaattttgaagttgattttaagatattttcaacgtagtttctttttcagtatagacttttaagtcactaagaacacatatataaaatttttacttacaaattaatttttattacctaataaatcttttggcttattaataaatatgggcaaatgatgatgaccttacactttaattgttatctgctttaattgctagataacaggaataatttcatttaatttagaaaataaaattacaccctgcctttgcgcctatcaggatgtgcgcgcaaaaaaaagtaaatttcacaaaactacatatattttgataaaattatcacaaaactacagatttaagaaggtgtatcccaacactacagatttaggacaaattttatcaaaaaactacaaatttaagatgggcaatcaccacactatagatttagttttaaaattatcataaaactaaatgttttataccatgttaaatgcaaaattacaacatttataacattagtggtaaggatttaaactacaaaatctataattttgtgataactctagtattaaatctatagttttatgatatttgaccttaaatgtgtagttttataatatgttgtcttaaatctgtaactgtacgataatttgatcaaaatacttgtagttttatgaaatttactttaaaataaccataagacaaacacgaacatatatattatcttgcaacaattcagtcacatatcgaaagaacacggagacctagttaactacaaattaaacaacaccgcctttatgaaagaaactatagcttgtccgatccgttacaatcgtccagagccagaactagattttcatccataatctgagacgatagcttgaacaaatcatattgcacataagcatcgatgttaccagatcaggacacatggggttctctcattactcctcatatagctcagtttgattttcgattgatgtttctacgcttcatagtttagtacatcactgttgattagtacggcctatcaggagcacaaagccacaaatccacatcatttgatcgaactacataccactttaattatagcacatccacaacacataccctaatattcctccaaagcagaaaagattgagcatgcatgcaccctctcatgctgccacaaacacaatcaatccaatgtgcttcaatgtttcattgcctctctaataagacaattaatcaaacccaagctagcttgggcatgatgataccattagtgttcactttactttcccctcctagctactccctccgtttcgaaatgtttgacgccgttaactttttagcatatgtttgaccattcgtcttattcaaaaaattttagtaattattattcttttcctatcatttgatttattgttaaatatatttttatgtaggcatataattttacatatttcacaaaagtttttgaataagacgaacggtcaaacatgtgctaaaaagtcaacggtttcaa

SEQ ID NO: 9469 - DNA, 29882 bp, Oryza sativa
tccagatgcaaaaagtacggccaaacgatttttctatgttatgttaatattaaataaagaagtatttattggtaaaacttgttaatattgttataaaaatgtattgaagttggttgtttcgcaatttcatatgttaagtaaggtagtattttgtaaattattcgacgtattagtactcggataattaatataggcctatcgcagtctcggtcgtagaaacattatatggacttaaacaacgagaattatgtaacatgaagaaatagtagtacaatttgaacatgatacaactattttcattgcggttacatagatgatattagattcgaactaggagggaggtaatgcaatagttgaacacaacgacgatgtagtaatgggacaaggaagcatgacagtagaaatttcaatatgccaagttgtccgacaatagctaacccctacgtgaggatccctctcctctctcaaaacgcgttttagtaactctgtattgctctggtagttcaagctacacaacacggctaggtggagttagaacccttatggtgtctatccattctctgtattgacatctccttggtggttcctgggaggaaagaatagatgtaaagcgaacaaagttagtaaatgttgtgagaaaataaggattcatgtaatcaaaatattcttaccatgaaatcgccatcaagaatatttggacaaacgttgtaggctttatggaacgaagaacctgacaatgatcaccacacctgcatcttggacgggtttcccatggagggagtgccgtagttagcacccgccagtcgctctgttgttcacgacattgtcattcataagccgcttttctctgtaagtattgctcagtactttcggatacgaaataccagcgaccttcttgtaaacaagtggttaggtcgagaacgggattttctgtatcgacccacttgatgtatgcgcaagccgtagtgcgggtctgccgaatagagtagtgttacgaagaataaagcgattgcccatacggaatgaataagcatatgcagataataaaatacctcacgatcatagttagggcacctacaaaagcgccttcctcgaatattaggattcctcaaagccattagttggcatcgatcaccgcataggcagagaggacgctggcaccaaggtggtagtaggtatacacaaggatcgctacgccagttcggatcctcaacaccccggcgtctagccattgacgaaagccggtaggatttgtaatgaagcaagtgggaagagagtactgaatgtgactgagttctgaaagattgtgaggcctcactcgttaaggcgacttatataggtgcaaaaaatcgagtgatatccctgacatgtgaacgtggcggggcatggtgggtacgcctgattggcgccgaaagttacatgcctgatcggcgccgaaagttacattggtcgtatgcggcaaatggcgggcaaatactcgtatcgcatgcgaataaaggaggatgcatcggtgcgacagaaagtagtcgtgcatgcgccgaaaggtatcgtgcacatataacaataacatagtcattacacaagcatacagtactagaaagtgaagcaaataaacaaagagaagactgctctactggccctgccccacgccgcgaccacgcttagtcctccgggcctgtgctcgcacgtggtcctgggagtaggtgaaacgatccggtggcatagcacaggtagcacgagtgtctggcggcggagtggcctgcgcctggtcctgcgtctgcttcggcggtgcgcctcccagctgtaaggggccgatgacgtcctctgttgagcctgaagcgaagtcgaagtcagtgatgtcgaagagcaaggtggaaggcaccaagcggtccgacgaggtcccagcatggtccagtggtggaccctgactcgacgtgccggctgcctgtgacgaagtcccggtgtactgcagaactgcgctgagtgcaaggtcgatgcagctgcctgagacgctgaccctgcagcctgggagaagtgggcggcctgcatcatagcgaactgggcgaaacctacacatcgacaacgggacccttgtaagctaagacataaaatgcatgtaaattgattgtcgaagtaatgttgtttttttaagtacctgtggggggcacaacagaaggcctagccgaggaaggcggggtgctgaacggtgcacgaaaccctgaagcgatcggcaagtgaaacggctcacatatatgtgcgaggcatgtacagaaaaatccttaaaaatacagctgcggagggggagtcggcctaggaacgtgcgcagctggacggggaccagtcggtacaggtggccgctgtacagctgcgtctgcccgagcaacgttgtctgcacgacaggtgagcactcagagaatcgagcgcatcgactccaccatccgcgtgtacgtcatcaggtgctcctctacgggtaccggaatccccgcgcctaaacgttggatcatcgttgaaccgtcaacgacgacccggttgatgtcgtcgacctggatggttaatttgttcgtacatattcgtaaaatttgacgaagagaaagacatgaaaacataaaggaatggtgcgatgcagggtactcacagcacgagcgaagtcctggtcacggtgcctggtgtagaggtctctagtgctcgcaacgtggggctgctgctccaagggagcgaaggtgaccctagtacgggtgcatggttggtacccgcgtaggtaggcctggtacgcctcctcagtgtgtggctctctctcgtggtccacgacctcctcggttgcgaacaaccagtcctcaataaaagtcgtcaacttggcgggccagtcgccagctgactgctgacccttgcgcgagtacctgcaaattaatgtgtcatattagtgtgaatcgacagatgttgcaaattattgtggacaggtagattttaatgcaacaactcaaagcgcagtgaaagatcttaccggtgaacagcagctgggacggtcgtcggaaacagtactggaaagggctgacggaagccgaactgctgcatcacgcggaaaggggcgtgaggctcaacgcagatgtcgaagaccatcagaaccgtagtcatccagtatgcctggtccctagtgcagagtgtggacagacccaacggcgcacgagcctgggtagccgcggcactgtagggctcccacacgacgtcagtcggcagaaggcggtcaaactccataacaaactcaagatacgaccgcctaacctggacgtgagcccatcggcgctgcaatacgagacgatcgatgtgatgtacaatgaacttagcaattaacttaacaatacgagaagatcgatgtgacgtacctgacgacggcaccacagagtacccatcatatggtagtcgacctctggtcgctccgcgtacagtgactcctcgtacgcgtgctggtccacctcagggcggccgatcgcaatcctctcagctgcccagatagaaagaaagagagggcacccaccaaaggtcgcgctgggatccgtcttcgtgcaaacctcacaaaggccacggtacagagccgccaacaacgcggaaccccagctccactgaggcacctcgcctaccacggcgtcggcgatgctcctggcgtagtgcacgagtcccttgtcgaccgcgtgcccgtgaccgccacagaacatcacccagccaaaaagccagagcaagtatgcctccaaacagcggctgtaggagtactcgtcggcctccgcctgtagctgctcgacctgcaagcgttcgataaaatgttaggcaccttaactgtggactaaatatgtagtacgcttgtcatttcggtacgaaaacactcatggtgaactgaagcagccacctcttcgtaggtccggtgttgcggtggtgtgccaacggctcgagagggagatgcggtgcacgctgtactagtgcgaaacgtgttgtcagatcgtcctgccagtccacacccgtggtcactggcccaacagcgtctcccgcgagcggtagccccaacaagtacgatacgtcctgtagggtaggggctacctcaccgcacggcaagtgaaaagtgtgcgtctctggcctccatcggtcgaccaaagctgctaggagggaccggtccacagtccatcgtctggccgggtccgcgtcgccggcggtagcctccaccagccgacacatcggtaggaggccggcctcacgcagcctgcaataacaaattaatatgtcattataaaaattattacatcacaactaatttatagtaatacactgttcgtacctctcgacaaaggagtcgtgaaccgtaagtagctcaccgcacgtccgtgcccggaacgtcccaagctgagccccctgcaccgcagtaaggtgagaccggtgtcggtgatctatcgccgggtccaacaactgaggtgtatcctgacgtgccatctctgaaaaatatagtgtttcgtgttagaacaattcaaaaagtagtaatgtaaaacaaaagataacttgtaaaattatgaaatcgtaataaaatcatgagaataattatgtacaacaagagtacaggctatttaaatatagcaaacgttactaagggtacataacgatgacgtgcaatttaacatatatgtagagttcgataatataacataacataacataacattatgtatcgaagtccgacattacatcagcatacctaaagacactaggtgccttagtctgacgttacatcacgagacctaaagacatgacatgccgaagtctgacattacatgacgaaacataaacacatcgataagttcgaaacaaattacaagcaaagccacatgccaacatagaacataagaactacaccacgtagccagacgtggcacgacgacgcctaggacgtggtcgagtggaggtagtgccttcacccgtagggcgagctccatctgctgctgatcctgatagtcctgcctccgccgcacttggtttctccttgtctttaggacaatgcttgtaggtgtgcccacgttcatcgcatttgctgcaacgcttcaccctgccagcctccgactcgtccatatcgttgcggatgcgacgagtcttcctccttccagccttgtctcggagcttcgatgggtcaggaatattgagtacttcatcgttagtctctgtgaactccccagctatgccgaacccataaatctcgccgctccatgtatgatatattgcttgcttactgaactactgtgacacatatactgcatctggtatgccacactccgctgcggcagcaatgatatgggtgcatggcctgtggagcagcttctgctttgcacaagagcaatgacatgtgctgtcggctttgagaatacactcctgcttcactctcttgcggtagatacccctgcatgccttatcttgacatagtatctcaaacctgtgctgttgggtaccttgcactagagctcgatgtttcatggcctttttacgcaactcctctagctttttttgcatgaaagttccaaacaaaatgctgttgttcggcatagagggaagaactgcctggaaccgatccctaaaatacctgcatgtcccatgtaaaatgaactccactatgccaactagtggcagtccacggacaccgcgcatcacccagttgtaaacttctgccaaatttgttgtcattattccatatctagcaccacctgtgtcatacgccttggcctatttctcttttggttcatgcagaatccactgagaaaatttccgaatctccaatctagttcttctaaccaatgttggactatccgttgggagaggtccaagagcttgaggagggtcagcatcggcagtcgatggagccgctgcacgctgatcactgcatttggctgtcaactcatctaatctcttccaaagctcattgatttttttctcctggttttgattgcatagcctcttaaacatgttcatgagctccttgttcttgaattgcttgaagaaattagctcccatatgatgcatgcaccacctactctgtacatcttcccactcaccagggtatcctcattccatactcccaaactgtaactcttctatcgctcgcagaatgccagcgtgcctatcatgtatcaggcacacatttggcctcataccaacaacttttgttttaaccaatttcagaaaccagtaccagctatcggtattctcactctcaacaaaagcaaatgccaagggcaatacctgattgttcccatctacccctattgctgttagtatctggccccgatactttcctgtcaagaatgtcccatcaatgcagagaacaggacgacagttcacgaatgccatcttgcatgcatgtagagctaagaacgccctttgcagcacactcttgccaggatgttcaattgaggggaatttcttcacttcgtaagagctcctagggtttctttcctcgataataccaagcaggcgtggcaaattgtcatactaggcttcgtaagttccaaatctcatctctattattttctgtttggccctccaggccttggcatagctaatagtatacttgtatgtctcttcgatgtgtcggattattgaccttggtttatatgtgagattatcgatgacatgcgcatacatctcagatgcaacaaatgcacatgtaatgttcctgtggtatttctgaacaccaggtagaaaacatgtatgcttggtaacgactgacactgtccaataatccttccatttccccttatatgcgtgcactctccaaggacaaccatctttttccttaacacaccgaacttcatattgcgaccgattggacttggcaacccaaaactctctatgaagtgacactgcaaaatgttttaccgcctccttcatatcttctgctctactataaatcgctccttgaataacctcattttctttgtactcccatctcacactatccttttcagagacgaccagcccagaaaaatcctcactagcccattctgctggattaatatccgtctcatcatctgacgaatcaccttcctctacacgctcgttgtcagaatcctccctctccatttcatccacaatggcaccacagtctccccctcgtcggccactctacctggttgaatgcccactggagctactacgcccctgtcctctcgtgcgttgacctcctccacagaagtctcatttacttcagcacttggtccctcgccatcatccatgttcatctgcacacctggatccttcgggtgaacaaacagaaccatagctagaggccacccgcgttgcaatgcatttttcacataccatctccacactcgagagttttgaactggtattagttcccaataaaaacccttagttgcccaacttactataacattgattgttatgtcacttgtctgtggatcaactctcaagcccctcattaaccatccttttatagaaggtacactcctctcagccggtctatcaattccccttttctgatacaataaaatctgacagatctaccccagttgacccgtaacggatgtttcctgggccatggtaaacttggaatatttgtttgttcgacatatctgtcaacgaaataactagattatattactctttcatgcaataaacatctacaacgtaatatcttcttgtgtatgccaatgcaacggtaaagtattgattccaaactagcagatctacgtagttaccgatatctgcaatacgcacttctagattagtacaactaaaaccctaaaaatataatgcatttattcaaacaaagttttaaaaaatacacactatttaactcaatagtcacatataggatctatgaatattacctgaaatcggcgtctgaatccggtagggcttcgccccttcttctcttctcctcccctttcttcttttttttcactggatttgagaggggaggaatgagggctgggagctgggcggcaggccttttataggcagcgaggcctgccgcccggccagagggcggcaaggggccgcctgcaaaatgccggccccgactggttttttttgcattcaggccccttgccgccccaacagagggcggcaagggctttcctgcaaaaaaaccctccctccgtcaccgcccgtcccttccccgtttgccacgtcagcttgccgctccaaaggtgggcggcagggtctatttttgcaatttttttggccgatagattacttctgtaaatattttttaaaaaaaatctaaaaatgaaaaaaattcggggcgtcactccaagtcgcttcttttatttgggccgggcagtttctgggctagacccattttactgttttggcccggcccatttagccgccgctactttccagcttccaaggaggccacaccacgcaccgcagctgcagctcatccccacgaccaaatctcgccgtctccgcctcgccgccgccgccgccgccgccaccgccaagagggggggaagcaacccgcagccgccgcgcggcgagatgaacaccgacatcaccgcgtcggtgaagccggagtacccggtggtggaccggaacccgcccttcaccaaggtcgtcggcaatttctccgcgctcgactacctccgcctctccaccatctccgccgtctccgtcaccgtcggctacctctccggtacgtcctccccccacccctctctacgttccacccctgggaggaggaggcctcaattccgcgcgtcctttgcagggatcaagccggggatccgcgggccatcgatggtgacgggagggctcatcggggtcatgggagggttcatgtacgcctaccagaactccgccggccgcctcatgggcttcttccccaacgactccgaggtcgcccgctacaagtacaagctgtagtgagaaactttatcgattcgctgcgttctctctctctctctctgctgctgcaagcgtttacatcttttttttctttttcctgatgatctcgttttagcgtcacttgttgatgtgcgagatgtgtggccttggctgaataaatgttgtacgctgcacgcttgtgaggaattcgtgctacaatttagctccctttgccatggtttagtggcaatttggttgccgatctggtaaaaatttatggaactgaatgtgaccccctgcctgtgaaatttggggattttgttcttaagtgactctggaagtcgtttcaggaactcaggatttgggaggttgatttctttacatgtagtggtagtcttgtggtactggccagatgcggggcaaagtctgcctgccaaatagttcgtagatagttgttgtgagaggggaattataacttgcatcttggagaatcgtaaggaagtaagatgttacgatgagggagcacagtgatagttcttgctaacctaagaatacataaattgctatgccacatttagctaagcggtctctagtggttttgctcttagtttattctctcagatgttatatacactgaaaatattatttgaggcaaggaacactcagcggtgaacagtactgcctcaaattttgccgcaaaaggactaatattagtttttatatatgtaaatctgaaggcatgatacgataattatttgattctgagtaccatgatggcatggttgaactagtttaagacgccatattagactagcaatgccatgctgcatagttgtcttattcattctcttatgtaggttagcaagatatatgagataacatatcagtaatcaggacgcataacttgattcagttgtttgtttttcatactcatctcatcccaatgcttttgataccaaatcacgtgcagtgtttagttcagagaatcggatattggctcctcctatgtctcaaactgcttggctgcctactagaaatgagttgataattgtagcatttaaaaaaaaaatcgaccgctgtcctagctttggtgatattcagtcgtggatttagaattttttttagcctaagcaagcctaatgatagataagaagtacacataaacccatataactacatagaccatttatcataggcataagcaaaaaattacagttgttgagttctaatttacaaggaaaaccgatgtacaaaattatattgatgaaatgatggccgtgtattatcttaaatagaaattatatagggcttgtattatcttaaaaaggaaaaaaaaagatgatgaatgctggacagttaggtcaccttgccttcatattgcagacatatgatgatgtaagtatttgctttgctaatttacgttgctgatccactgatctgacattctgatctccattagaactagttgattaaacatgtcaaattacttgttgttccaaggtttgtcctaagtcaaacatttgtatctttgaccaacaatttctagaaattcatatagttcaacatcataaaattaatgtttttaagatgcaccatgagaaatgtttttataatatacaattcacatgttgttaaactacacgaatttctagaaactgatgatcaaagataaaagtgcttgatttaggacaaagctagaactacaagtaatttgaaatggagggagtacctattattagtacttaactgcacgcggctcaacgcctgaacctatgatgataactaagtactgctcactgcgctgcatgtggcaaagtgacgctaattaagtattactggtcacttgatgcatgcggcggagcccgggcacctgtggcggcctgtccagggtagtcaattcctggctccgcaactggtgatattcctgagctgatgacttgttcagccaccctgcattgtacaagaacatgcagtccagagatgttgattggagagtgtgagttactttttgcttccccatgcttgatcacattaagtagttctttaggaaaagaggacaaacctatgtatggtgccagcttccatcaaaatgttttgttttagaaatgatgtgtgtgttgtaatgttattcttgcttatcatccatatctaaatcgttatgttcttgaaaaatggaaatcagaaacatagtttccaatctgaatcttttgggaaggttctagggactacatattctggttactttaagttggtataatttaataatatagctctttggcgtcctagaaagtatcataatttcatatttagtatggtaaatgaaaaatattggtggaatgaacaaagaattggtcaaacagaggacctcacactgattgtttttggatttgcatgttgcttgacaaatagaagtataatttacccagaatgcctccatctatcttggaagatttggtaaagtacggtgtcacttctatctatgctgaatgcctgtatgtgtgcaacctgagtatatagttgtatgctgtatgcctgtatatgcgcaacctctatgttgttgcagtagaacgtttgagaagtttatctgaaaccaattgttttccttttgctacataattacatgagcttgtgactccgttcttagttaaatgttgcaccattgttagtaattaatctgcaggtaaaaatatgaccaggaagtcttctgaataacaggtgttatgagactaggacgatgacattgaactctggaatttactgcagtaaaccaacgcgtctattagtggatcatcggattcgttccctgtccctcccacagcagtagaggcgtgagatgacatagaacatccgcgctcatccctttgccctcaagaacattgcagaagtagacagtgaacacagatatagggtggggctctctctttattatagatttcatttggagtacaagccagccaatcttagatgtctcgccctgcccttatatatataggggtcttaggaaggaggagatagatcttacctctactccgtttggattagtccaaaaaaaaaagatcttatctccccgggagataatattccgtaacatttgcatctaccaaagttagctgcatagtttttctgtatttgctgatttgcattttgcagtaatttcctcttggcacaaggttttggcttctacattagctttttaattagaggttagctatgcgtttatttcacaagtcagtgcggggggcataatttcaaaacttattgttcagtgtttgagaaatcagcttaatatcaaacaaattgtgttataaaaaattctgcatatgaaatagagccctgttttttttacaaacattaacctctctaagctgcgtaggattgctgaaatccttattatcaacctggtcagggaagaacgcaacgacccacgaaattcgtgggctagtttaggttcacttctggccccgcagagatctttgcggcccataaatattaatggaccgaaagttccggttggaccaaaatacagatggtccaccatgaagacgggctagattaggtccatatatataggtgggccgagaataccgtatgggccaccagttgacctagctagtggacataaaaggatggtttgtaaatttgacttcccgttcaagttcagggctacaatttgggagttttttttcatttttattttttaatattcacagaaatattataccggtgaaaatatttacaaaaatagaaatattaaggtgacgtggcatatggtgccatgtgtgtattttgcgctgaggtcatatgcaattttcgccgcatgcaaaattcgcatgcccgctcagcagcctccaatacctggtcacacaagtcaccctgccaccctccccgagagcggcagggtttatttctgtaaatattttcaccggtataatttttctataaatattaaaaaataaaaatttaaaaatgaaaaaaatctacaatttggcgcatgatatccccgtggattgggctaaaagtagtaaggccgaggaaaaagctaataactggataaataaacaagatgggtaccacgcgcgttgctgcgggagaattgtgtgataatataatatatatatgagttctaaaattttctttcttacctactatacaattttttttcatgttttatatatttttatacctttatcaattatccaaaagttataaatgattgggttgtatggtgtgccttttaggagaaagagatgcaatttgcaagaaccgcatcaatttgcgtcaaaggtcctagatacataactgcccaagatattatcttaccgccttgatgaatcatccaaatactaaaataaattgaggtgatgtgaaaagaagcaatttacacccttgatgaataatccaaaggctaaaaataattaaggtgatgtggtttcatgagagaagagagaattagcattaactatacttagtggggataaactttatagatatataggataattccacttcgattttcttaactagcagccgaatctgactcatttacaatagcagatctctcaacccccaattattaaaaccagtgcaatttgattccctcgactgttttggaatttggaggatagtttcgttgacgtggcggtgttaacatggtattcatccaacatgacattgacatagcgcttatgtgacattagaattaaaaaaatatgagacccatttgtcatgtaaaaaaaagttatgggacccactaacatgtggggcccgcataatcatcttctccttccttcttcctcctccctctctcttccttctctctccttctcacatagctggggctgagcggcggcggcggcaagagatggagcggcagcggcgggtggaaaaggagctaggtggcaaaatcaaacagtgcggcgacgaggaatggttgcgtgccctgagcacaattccgaagggagacggcgcgcggtggaaggcatcggtcatcgaggaagatgggaagcgtgctccacaccgcctctcctcgtcgccgctgctccacgctgccgctcctcttccctgctccccatcgtcggtggaaggtgtcggcggaaaccggtccacaccgctgctcctcgccccctctgctccgtggagccatcctcgtcccagttccgcgctgccgctcctcgtcgttggtggaaggcgtcaacggaggcgccgcgagttaggatgagatggaaggaaacctctgctagaacggccacgtcgtcaacgcgtggaccgagcgcctgatctactcctaactcattccaacaccatagtttggtatgccactactactttgctctctagtgccgccatggcgccattgccaagaatgccaccttactacgtgcttgtgaccagggtttcccttatcgtttggaggggggttatcgcacccctgctataaggcggttactgtggtaaccgctgaaaaccgtgttaatttcggcggcaaacatttgaattaaaaaaaattgatggtttcgcggtttggttgcggttatcacacggtttgacacggtaaccacgatatttgcgcggtaaccgtgagttgtgtagccgaatagaataatgctaaaaaaattgaaaaaccacctaaaagtagaaattagggataattagaagaatatataggatacttgtaaacctaacttttggatgtaaaatacagaaaacgggcatgactttttctatattatggagatattttctcctctattgagccggttgcatggtacaacttaaggcccaatacctttttttattttttttcattttctaaactattattcattttgccctcaaatatgattttattttactctttttcaaaaaaaatcttcaccatctacctttttttttaaaaaaaaacaagaactacattcatgctttttttttggaaatgttgaatttggtcaaaattccataaaaccctattgacggtaaccatcatcgtacccctgcggtaagcacggttatcgtgctaacagcacagttttcgacggtaagggaaaccttgacgacaacctacggccccccaccccccacagccttggctctactcaactcttcatcatggatggcgcttgcatgatccatgaccttcttgcttccatcaatgtcaacgaactaggtcgggcagggagggggggggggttagcggaggctaggggccggaggcggttgctacccgtggcctgtcgacaggaggttcccaagctgtcactgtagacgtacaccatcatcacctccacgtggttgcaactcttcgccctgctggcactggcgagctataaaagttattgcggaggatgattcatgggagaagaaggggagcccgccgcggattaccggagctccttgtcgctgacctcacactgccactgcctcctcccgttgacgggcttaccggccaccaccccagcggtgaactcctggggaagagtaggagatgagaggaagagaagaaatgaagggagggaaagtagaggaggccatttacatgtgaccctcatatggtttttctattttattcttactgactaggatatcatgccggcaaaaccacatacccatagtgttataggagtatgacctaatttgacccggttttaagatttccggtattgacgttacataaagtttgagggacgtgaactagacttatttcttatgtgaatgggctatatcgtttcgtttgtaagccttccggcccatcttctgaccagtcggcacaaaaatgggctggaagcctctttcaaagacgttccctgtcttcgtcggcgacggcggcggacgacgccggcggcgagtaggcttccagcaaataccgcggcctaaaccctagcccactccggcgatgaccaggtctcgccccaccccacccgctcgatgggggcgcccgctggatagaggagcagcggccgaccagccgccagtggcgaagctgtcgccgccaccgattcgcgcgccgcggcactgttcccacctagagaatcgcgctgttcgacctcgtcaaccacgacggcgctgccccggcctcccggtacaccctctccgtggctttcggtgacgagggattaaggtattcgttttcgtagttcttatctgttctacttttttgatagtttgatgcacatttggggttaggatgctgcccaccgcgagtgctgattcaaagctaacttactgaatttaaaatgctttgccgacaccggacggcgcagctgagcaactgcggcgccggttttgagagactgggaatactaaattggagtaaatatcccactacgtgagctgaatgcatagggacgatgggagacttgttgtttattatgtgctaaatcgccgacttaatgacagttcattagctgttggccacattagctttaaaactaggaggcttagctatgattttttgttcacttgttaattttttcaagttatgcgcctttttgtgcatcatataatttagagtaattgaaaagaaatgtggtctggttcgttccttcaattcatcccaagaaaaggtctcgcaaagataaatcgtaatgcgtgtatcttttgcagttgggagtgttctgtccaaaagatttctaatcatcataactagcccaactaatttcccaaatcgcgaaaaatctttcagcacttcataaccatcaactacttgatacaaatgtgcaataatatatgtcctctaaagttaagtcctattgttaacatatgtcgaaaagctttccttctttgcttaaagaaaggtgaaggcatggaatgttttgggagtatcaaacactctctcacatcaccaataatgcaccattaaaaattcgtaccatcaactgttgcccctgtattaggacacccttagacatttgcatcaggaacctgacgtgggtgcagaaaattatattaattgtttagcctgctgttgttgctgtctcagttcaaaatgctaattatcagcaatttgtctacctatatttctactaacaacttgtcaaaagttaaaagtaaagcattactcacaacaattgcattggatcatgcattcaactatggtatcaagttgatgaaggacaaaattatatatgattcaactttctggagctgagtctgacagattgaaaagccataggaaacggctgccagttcgcctgtttgtttgtccagtgattccattttggtgatgtttcatataacccaatcaagcaacattcacgaaaaccacatatgttttgatcttgggaacttgttgaagcaatgatctggttatctgaatctatgtaaagcaaatgcactgagataatgatgcacaccagtagactgatatcctcttacttcttttttccttgacagtataacaatgtacaattgttttctttcagaaaaagatgggagcatgcttttaggttcctgtgatctgctttcttcataaattcagtttatggttcatgttgaagacatcctgatgatgtaaatgagatattagttcactggtgggagggacatcatcgcaagtatttaattgggttttgaaggctgatagaatggaactaagatctggagctcatgcaatgctacaactgtggtaatagatgctctttctggattaatgtaattactatggtgaattggcagatgcacattaatcttgtgagtttatattctactgctgattcagatttattcgcttgtcatttggattgcttggttttctgtgattcgatcttgcaactattaccatccattctgtcaggtgcatgatttgaataactctcctgctagattgaaattaaatttaagagtacgaaatttgccgtttcaacttttgatcggcatggcaagctctcatgcattaggaagggacaacctaataaaaaaaatcaatgtagtgcctcatcagcagcattaatgaagtatgcacattagctgtagctgcaccattggactttgacgagtcaaattgtcatttgtgaactactgtaatcactgttttccttttctaatgaagctgattgagatccaaatgctcgtgatgaaaagcacagcatgggatggtgcgccctgtttaagggcagcatgatgagcagaatccaataggtgaaaagattcggcaccatggtgtccctcgcacgcagcttcagcgaagctgcagccagcccaaatagcaagagtaaacaaatgcagccaagtacacagtataggtacatgtcttatgcatgtgaatttgttattatcaatttaccatgttccaacacctgttactactattaaccatgactggtgattgttggctttataatgatatttatatgacctcaccctgtccagttagaaatatgtctgatttagtcagccccaataagccacagccaaacaatatagtttggtattacccagtatcacagtataagtctatcctcctggcacacgatacaagtccatcgacaaaaccaagaggttatttaaccacttgatttttcttcaggtttttgcacgcacaagatcatacctaacgtacaggtacaaaaatatttttataagagccatctatctgtctgtcagtacctgtttctgctaattattagttcttgcttattttttttctctgtacacaaagccagtgcaaattaaaaagattgtactaattttaaactgggcagcatccaagcagagtgaagctactccacgcaagtgggagtttttcctgtcagcaaactcaaacacattggaattaataattgcatcctattgttccctgttcccttccttgtttttccccccgctgcctcctctcctcatatctgcccattcggttataaaagtagacctggtctcgtcccctctttgcaccaacacagcattcttcctgctccagttctagtcttctagggttagaagtgatgagaggtcaagataagctgtgggtaaacaagctcaatcactatggtgtgggtgtagagatctgatctatatatccaggtaattaattaaactaattacgttaagtttactttcgagccatctgtgatcttggcatgactgctggtttgcagctatggctttcaaaagcttgctgtgtcaatctcctagatctaatggttggcacagcaagtatataacacatattttggtttgttcacctagatctgctttcctttactgttccatgtcaatattgatccttgtggaacatagaatataaggggcagcacagatcttgttaaattacatagtgtgcttgatctgtggtaccagtttgattttttctgatacatgggaatctcatactaaatgccaacgttacttttcctttccaaaaatcttgctggttcaggtattatttacatatcaggtgcacttaacatgcatgtacgcttgatctaccaaagatgtcttcagcaagtttattaccatctatcataaaaaataagtatattacaagatgcaacaaagcaaaggtgccactatactgcatatggaaccttaagtgaagtcacctcactgggggttttagagttggagatgcctccattgtgtgtgatgcatattttccacttcggatggctaataaagtaataataacatagcaaaactatatttgttattgacaatacttgacacttgattgtgctaacatttactagttcttcttgtaggttttgtaaccaggggcaataagctagaggcagcaactgcataacttgcgagaaacttgtaagatttctttacaacctatggaaaagataggtttacttgtcttaattttttgctgttcttgttaactaggaaaccagaagaattattaacaagagagaatttataacaaacaaatttgatgccaattctatccttgactctttttttttctattttttttatctcttgagtcatctagtcatttcactgtttgaaagttgggaacatctgcatcacctaagatatgatcctacctatccctgtggaatgtgttatctgtgtgttcagtttacaggctgtgttactaaaataatgcatgtatttgtgagtagtagtgttctgatgtgatgaccttcaagctagacctccacatttgcgagaactttcaccatcaagacaaaaaaacatgatgaaacaacctatccaatacatataaagcgccataggatgaactcactcataccaaactggcactctcatggtatggtatgacatgtggaaatgggtatacgcatgagatctcccggaactgaattcactttgatataataacaccttggcatgtaatagcattagtaaatgacgtccaaggaatattagagtaatcatagcgttaatactgtaaaaggaacatattacttgtactagtccttgattgacattcagggtctgtttagttcccacaccacaccctgtcacatcgaacgtttgaacacctgcatgaagtattaaatataggctaaaaaaataactaattgcacagattgcgactaattttgagatgaatcttttaagcctaagtgctccatgatttgacaatgcgggattaattaggcttaataaattcgtctcgcggtttactaacggattttgtaattagtttttttattagtgcccaaacaccccatgcgacaccctatataatatccgatatgacacgctaaaactttacacctctagatctaaacaccccctcaatacgtactgaaacagctaccggaatccagaagtaaaactttttcacctgagtatcacataagctcagccatttcgctatggtactctaaggtctaaacatggcaaatagtctaagtctgtaacaattattatagatatcagtacaaacaacttaatggtgaggagacagttatatcatgattttcatgctgattattattcctatatatgatgtgcttccttcaggttggatgatgatcttgccaatgattttgccgcaagttatgcagttgctgcctcaagcttactgcctttgtttgctaaaccatgaaaccagcacaacaataagagactccaattgcaagagaccttccaggaaatctttagtaggcatcatatgttcaatacaaatatacctgaggttgttagagcaaattatctgctcatgtacgattacactatctctattatcagaaaatcacaagaacttttgttgctgggttttgcattagtacaagtatctggctcctgatttttcttgacgtttatcattttccattctgagctatacgagcaataggctccggattgtagtgatctcctgtgcaagttttacctcttcggcaaaaaataattgtcggcctacggggcaaactattctgtcccctctaactaataatgtctttgaacattttgatcatataccctcccattttatcaaaaattgaggatttattcttctgtcactgacatgtagggtttatctgagggcattgacatgcggaccatgagggtaaatcctcaattttaatctaatgggagggcatatgatcaagatccacattaaggaccagctatttaaaatacggaaattaaattcttaaaaaaatagtaagtagatctgtatacttgtaacatttcaatttattaggttactgcaacaaaattgatggagaaaatactccaaagagtcgtgtgtgaattatgaccagatatttgtacctttcaatacggtggaactttcctgcttaatgacagtagaaatcacaatgtaaatgaactagtcacttgattataaagcctcatttagaggatcacaacccttacatgggtttctttggaattcagatagaataggctcttccatagggattttggatttaaattttgtgaggtcatatgtcatgttttcatttctttgtttttgtaatcttatatttctagactttgtttcctacaaatgccttgtaaagttttcacgagttgttcattcctctggattttaaaggatgtgacgctattatattttttctttaagccacaaacaactaaatttcaactcatttcaagtgacaagctaatgccaacgcccaacgcatcattcgttggccattttcttgtgcatttgcctatacacagtttgttcttaatctagccttattcagatttatgtgaatggaagtcctctacgttatagtgttcatggctgtgtggttaacacttaacagtctataggattgtttaattcatggtaaaacctggttcgatggaaaaatagccaaattattttcccggtccttgaaagaggtaccgagagtgttgtgctgaatggatgaataactgtatagtttgtgataataattcgaatgtacaaacgaactaagggtgcgttcgttggattgggtgagaaagccccatcgtattccgcgcgcacgcttcccaaactattaaacggtgtattttttataaaaattttctataagaaagttgctttaaaaaattatattaatctatttttaaaatttaaaatagttaatactcaattaatcatgcgctaatggctcacctcgttttgcgtatcttcccaatcttctcaaactccttctcctcaaactcaccctaactatatattataaagttgaaatataaatttgaaatgtttttttaagaaatttatatatataaagtttttatgaaaattatgaaccatggcagtttgaccaaaccatcgtcaacccgacaaataagccttcctagatttttattgagaatctcactatcgcattagccactgataaatctataaaggaaagggaaaaaaaagactttgttagagcatccattgcttgaactcctctctctcaaatatggagtagttacttaggactattttttagtaactatagtaatatgagtgagttgtaacttgggtcaatttttattaccaaagtttaggaaaatatataatataaaccatatatgtagtgtaaatctgaaaactaccatgggatcgagaaatagacgtatgatatttgtccatgtcacctggagtaaaatttttactcttataattaaccagattactgagagtaaaaaaaatatcaggcttctacttctcaatcttacagtagttttacactagatatgtaatttgcaccatatattttctcccaaagttttattttggatcatcatttacattttttttaccttttttaggttgaatgctacaaggcatttgccccgtactgtttttttttccctttagcctaggttttttttttttcaatttggaacactccgatcactctcctttagcacaccaacgacatcaagcacatcgccaccacgcatcagcgaactctcctacgaccaagccatactttcctggagaagacgatatggatggttaaggaatagagtcagggtagtaaaataaatatagagttggccaaaagttactttaacagtgaaagatgccccaaaaatgcaattcactctagtaatattttgacaactacaacaaaaagtgtctttgaataattatccaatccaaaaaatgtgttttgagctaaactaggcacgaacttaaaatatcaacaagtccgaatcaaccatataatcttagaagaaaaagaggtccaaaccttaacccacttgtcaaggaggaaatcaactgctgccacatgagcttagttgtaagtatgaagtagccaaactagatgccgacttcaacttttcactagtcaaattatactggcatttatttatatactccaaaaaaggttcaaagaatcaaagtagagcaaattatctatctatatgtctggtcagtgctgaatgttcaaaccagtatcaacttgttaaatttaataatctaaacgagcagagagtgcaaagaatataagatatttttaaaaaactatgaaaattatgaaagaaagccatggtataaactatcggtggctaaaagcatgtgaactttggcggcgagctgcatctgtgctggcacaaactgttttattctgcactagtaacgtagtttttaacacccatctgattaaaaatcgacaaaatgagtagctacctactttgtttaaaggtgtgtaattgaatattagcacataatttagatgggggaatatgtcttgggatgtgtgaagagaggcagtgtcttaacattgccaatatgttattagcaataatgcatcattaagaattggctacattagaagattccggtagtaaagcgtatccagcagacacacatccgcatgtagagtatcagacaccatacctcacgtggctgctgaggaaaaggctaattattggcctaaatgccgcgattggggtgcgtttacactagcataattttattacctcgacggttagtaagatcttattacctcgacggttattgaattggaaagaagtccatttcacccttggcttttccttgtcgactgacgatggcaacacatcaaattatccgtctaccagagcatcctaaaatttaactcataaaattcttggattgggaccatcccaaaagaaattgggcccaaaaatcactttctactacaagagtgcccataaatttggttttcaataactttaaaatatgccacatcatctcaagtagatcctgcttcaaccgtttatgtctttccatttttccggtaagagggagattggcgctgggaattgccaaccaatcacgcactagcggctcagctatgctgtgcagtagggtgatctttcgcgtgcctagcagctacggcagcccacggcgagggcgtcggcaagtctgcaaggcacatcgaggaggcaggtagggccactccagggttcatccatctcgtcataacgcgtgacaagggaagaaaaggcgtgagcggcaaaaacctcccgtgatttcatcaattgggagtgcgtggaggtgtccaaaattggttcagattgattctagttttaggtgtaggtaaatagtgggaccatctttgggcatctcttggagagatggttttagactggattcctaaaatttatcttttagactagattcctaaaagagtatctccattttttaggcgtgtcacatcaggtattatatagggtgtcgcatggggtgttcggcattaataaaataataattacagaatccgttagtaaaccgcgagacgaatttattcagcctaattaatccgtaattagcaaatgtttactgtaacgccacattgtcgaatcatggagcaattaggcttaaaagatttgtcttgcaaagtagtcgcaatatgtgcaattagttattttttagcctatatttaatacttcatgcatgtgttcaaacgttagatgtgacagggtgaaaaatttttgggtgggatctaaacagggccttaaacacaatcctaagtccccaaacaattctgaggggttaaagctaaaaacaagttatagcaaacacctacaatgagagcaaaattaaaaagtcctccgtcggtatccctgcaccaccggtccttctctagctagctatttctacaccatccaccctccccaccctctcaaacctctaccacaccttgcaaactccaataccactgtttgtgcagaccttagcggatgaagagtgcaacaatgccatcttcggctgcctcccgagctaagcacctccaccattctctctgtcctccttcatgtcccttgcaccgattaggctgtgttgcgccgtaggccctagtttaaggcagggttgaaatagaatagaacaaaatagttctaataaatgagagtagtgctgaagtttgaggcattattccttaggaaattggataacccctatttagtttttaggagctctaaactatgggctattgctagggatgttctaatatggttggaaatctttataagggttggaagtgttccaaatactttttcctcatggcatgcttttgggtcgcaatctcttgttacgaaccttcggcactcggtgctcgagctattgcttagctgcagtaagcaaacacaactgctctttactttgtagatacatgtgcttgcctgtagcgatgacgtggcgagaattacagacaccagtgaggaagaacaacgactatgtttgcttgaggggttgaagttgacctaatagtttaaactcaatatcgatccaaagtgtaacagaatacaaagatttatgatattgagtgaaaatattgagcttgatctaatgtacttttaaactttgagcaaagtgatagtgggcatgttcgacttagattgctctagtagcagtggttgctgtaaaacacgtatgctgctatcgtgcagctgtaatcaagtggtaccgaacaatagtctaatgtaaagttttactccataatataataatgtatttattgataccgtcatttttttctatttagactaaattgtactcacgatacaccaacttaacatgtggatgcaaatttagttattttgagcatctttttatatacatttagtttgtaagtgtttattttgtcaatgtacttgtacaaatatgtaaaagtatatatttttttcaatctaatcactaaaagtcaattaaattttactatgtaaaaaatgtatatctcagataagatttgagaaggtttttaaaaaaatcctgaccgctggtgtaaattgaatgaggaacgcaattcttatatgttaaatccaagattttaaagtaatattcgcacgattgctatatgatatcatattggcatcgtaagaaaaactcatctagcacccgtggactaaaatagcacatattgagctaagttattgtatcaaaatactagtttgataagttcttatactagaacgcatccacattaccaggttgtttcccttcgacgttcaattctcaagttcttaactaaattgttgcatcattttttaaagagtaaattatatgttgggttcttacctaagtttcaccatgaaccaggtgtcagcacacattttcatttaggactagtcattattaccaaaactttcaatttgaactagaggaccacctgccatcaagacaagttgtctcgaggaggaggaggagaggagaggagattgagataacttggaagtgatttattaacgtgaatataatttactcttttattccagtgatcgaggctatgctttcataacttatcttctcattttttacgtgcatgctttccaaactactgaacgacgtgtttttgcaaaagttttttaatacgaaagttgctttaaaaatcatattaactcatttttttaataatttaaactaatattatattagttatacggtaacgagtgtttcgtcgtatgtgctggacatcccgaacacagcctatgagagttgctagcttgctatacgctctctggtctatgctgctctgcctgtcttgctcgtcctctgccgcggagacacttgctccctctgttctgattttgacatcttgcttgtaatattttaccactcgtcttattttaaataaatatataaatataaaaaacgaaaagttatgcttaaagtacttttaataataaagtaagtaaaaaataattctaaatttttttaataagacgagtggtcaaacagtaaaatgtcaaaatccctaataacttatactttctctgttttatattataagcctttatagcattacccacgttcatatatatatgttaatgaatctaaacatatatgcgtacctagattcattaatatatatatatacatatacatatatatatacatatatatatacatatacatatatatatatatatacatatatatatatatatgtatatatatacatatgtatatatatatatatatatatatgtatatgtatatatatatgtatatatatatgtatatgtatatgtgagaatgtgaaggatgctgggaagttttataacctgaaacggaggtagtattagtgacggagggagcataatagataaactcgttgtcgtcgtcccgtgcggtgcggcccccgctacccgccgcgcgatgccccctcttctccgcccgcctgatctagggttttactggagccgccgcgcgcagcgaccagccgaccacggacgaggacgaggggatcaggtgagcccgccgccactctctcccccacccctccgaacccgttcaattcagctccccgcggatgtgatcttggttaggggctagggttgggtcggttaacgaagatcggttccgcgtctcatcgtggcgtgtgtcttcgcgtgtgtgtgttgggttggggggagtccgcgcatgcgttgtgtgggtttttttttttcaatgctggatgcgattgaaattgagcagaatgcccagtttactcattcagaccgaatgagcttcatttactcattcatctagtgttggtgttggaagttttgaagacctgagtatgcggtggctatataatgtttttgttgcagatcagttagctttgctggttggacaaatcgagtcctagatatcttggatttttcttttttccatagcagaaggttgtgggtaaaggtggtgcaagacaacatggaatataaaaggccattgtattcatgctggctgaataaatactagtttctcgcacacattatccaatggactctgttttttcattgtgcataggcgaagggggttatgttgtttaaataaagcattagggcaccattatatttccatatgcacggactatttctcattatatattctataattgacactgaaccagtagggtctgaaaaggtcatataagcttagctgtgagtagctcagatattcttttcctatttattttggctgaacaaatttaacaattttagctaatattcgtttcaatatatcttagatgcaaaaaaaagatatgccttgatgcaaaatttagtcgcttttgcttgcatcgtgtagatttattgctattgtgcccctatgctctggcctccaggcttactcacgacaggtgatggaactaccaacatctgtagctttccacccatgcagtcttgtgccaggctggttgcatgctttagctgttttgcatgtgtcgtctgtcctatttttgttttcttgatgtcagttgaccaatggaaaatcttatgagtataggattaaacaatggtctaaaagtcggtgctaggtactgggtagccactgtaatttggtgcttccctgccttgggggctctatattgctatgtaatgttatattgtcttctttcatgtcatatgcttcccaactgcttgaaactccatagtcaagtttgttctaggctgtaggcaccgcctagttgacatctaggtgctaggtgccagccttgctgaccctctagcgcctagcggcttcttgaaccaatagtattaaagtgaataagtgttttagcatttgttttggaagatatagctttactacggggtatgaataccattatcccaaagagttgattgcatttttcaaatttttttagatgattgatccgtaattttcctggttgatcatgatattctttacattgcacatgccatgatatagatttgaatgttcccaaccaattagttaattgcactgccatcctgtcctatgagaagttgaaaatactggctgtatatgactaataagcacttgattgagttcttccctctgttatttcctttggtatgtcttagaggtagatctatagggtgcttttatgctattctcatatcaccaaaccaaaaattctgcgcattcttactggataacactaaacagataacatgtcaaccacttttgcagagaaaattatgtctgtgacacgagcaagcattaaaagtatcacatgtacttttgctgtagttgatatatgacggaactaaccttttaattgttctgattagatatgcaattgggggcagcaagctagaggtggcaactgcataatttgcaagaaattgtaagttctcttggaaaagtctgaaatgacatgtattcataattttattgatcctttagttctttctag

SEQ ID NO: 9470 - DNA, 89025 bp, Oryza sativa
cagttcaaaattaattgattgatcatgtttaaatggacctcatacaggcataatgtccattgaaaaaagagtgcaacgaggggggaagtaaatataataaataaaaaaagaacagccataaagctgtaaaacagtgattgtgatctactaccgatataaatatttacaaacgaaaagaagaaaattgtaaagttaatctgcaaatccctcccaagtgcacgatttcagcttttctgtggcttgagcacagatgcagaagcagaacaacaagcaatgctgtcaaggtaatcctgtgtcaaatagcagtgagccttatgattcaattccaggcttccagcatgggtttgctttcccattcaatcatatctgaaaggatttttattatcttctttagttccacgaggcaaatccacacccagctgcctcccgaagcccctgtcaaatctccgagggcttccccttctttggggttctggggatctgggagccgaaatacatggacgaagtttatctcctgtatgatttctgaactgctttgtggcaccattcctgtcatatggcttggcagaatgagtttcatatctatcagcatactccctttgatcatcaccattcccatcatgcctatttcccctccccctttcgaagccataaggaagtcttccctgtgttgggcgatacaactctccagaccttggccgtccatgggagtccacatcaaacctgtcatttcttgaggtaactctcaggggtgggctcctccttgaatatcgctttttatgatcaggaagatcaacagttgagcagttcctcccatcagcccatgtagaagcatgttgagagtaagcacgatctcttgatgaagggctataacgcataactcgatcaccaaatccaggttgtctagaaggcgaagtcattcttcccattctaacttcagtcatgtaattaggcggagatctacttctactatgcctccataaacttgaactaccattcaccataacttcccttctgttcctaggtgatgtccaagcatgcggagatcgagaccttgaaccagaaggggatcggctgtgagcacgtgataggttaagtgaggctctatgttgcgggaacctcctttgtctactggccagtgagcaacgagctgagctcatatttacattagcatgatctttatccatatcaggcccatatctaacagatcgattaccactagtactgaagcgtctttctggggatgcttccctagcatgtgcaggacctctagacaccccacaacctccatctctgtcaattggagaaccacgtccagataaagggcggtatgagctactcaaagtgttgtttctcaccctcctagccattttactagcatttgcagtatcaaccgcctttaccaaggtgccatcaggtgcaacaacaaagccattgctctgcatctttgcaacagcagcttctgcagcattccttggaccaggcagtccgtaattataataatcaggtgatttgcgccaggtagtgcgagaattgtttgaattttccacccactgttccacccggctgctaccttgaatatgtcgtgatgctccacctctttcatgtgatttacgaatatcaatggttctttcagcctttgaacctgagccataaccatcatcagatctggatgaaaaaagaaaaggggtcataagattagtaattggggacatgataatggatcatcagtgtcgaattaccagcaagatgacagctaaaaaagttcaccagtaacttacctgcataactcatttatgtgggctctgtcaaatgatcttggccgatcagctcgtggttgcatatctccacttgataactccatatggcgcaatgattcaccacctccagctgtatctgatgtgctcaaaacacaccggttagatgaatcaactgtgtcccttgaatcatgttgagaatgccgctgatcttcaggtaacatatcccatcctgtgggctttgttctcagacttgaaagatcgtcccctaaaccatcattgaccctttcagactggttgactgttgcggaagatccagctattacatggcctggattcatctcatacattcgagtctccccattaactctcaagtgaacactaagagccttttcaccagtgcttccagcacacatcgttccagatccatcatctatgcaggtagttgaccatgaacacttcaatgcggctggtgaaacatcaccacctccattcctggaatgttttccattgaaattagcaactcgatcacctgtattctttgacatggagccaagagggaagggagaaatgcctggggcatcactcttgcaatctaacacctggtaattggcaggtttaacttcttcataacaatcatctccccaatactcgccagattcccttagttccccatcctcatattgagaatcatcctcttcagcaacaatatttccagtcccagcaagatctttaataatatgaggtgcctccgtttcattacagtgctccataaaattattcgatagaaccttcccgaggtagctttgttctgcagattgtgaatcggcaatgctgtccatgtcagtagttgatggttttatgcattctgaattgatagggggagctacacaggcaccatctatacgacatattaatgcattgctactgtcagtacaggtgagattattactaatagttgcatcagcaccctcttcttcatgggcatgggacataccacgatcagaagaacctgggttgtcattcatatgagaatcggagaggtccaaatcatcatctacatctgcagctttcttggagatgctcaattcattggtgacatgttcaactttgtcgtgacctgactgtccaattttactagttccagaatcaacatccaaaagatcctggttcttcaattcagatatgctttgttgagatgtttgcccaagtttatcattgctccagccaagatcagtagaacttttattgaaaacagttactgttgcaaggtttgtgctttcctcagaaactaacctacttgtgaaaggcttcactctggatcccagttcactcatttgaactgaattgatcccatcacagccatctgtagaaaccatctgggacaaacctacacaatcaagggctgaggcatgtgaaacatcaagtttctcctcaattacggtcaaagcaaaacgttcagtcataggaggcaaagagctgcaatcaggatcagaccctagctgtgattttactttggagatatcattgttatcaggcaactcctttgttcctgcagataaaccatcgcattctagcggtctcgattctaatactggtacattttgcggagacaggctgcacaaaggttgagatgaaccgtcaccagcaaaatcactttcgctctttgtagaagcatcttttggtgcatcaatcacaggagttttgtcctctgaaagatcaggaatgttaccagcaattgttgagtcaaaaggagcttgacacacctgcagcttgttcaacacattttcagcatcactacaactgcttatagcaaaagcaacaggatcaggatcagccgcatcaggaacatcatcaccaccacagtcagtgtcccatgcctccattgcaacattaagatcccagtgcaatcttgagtcacgggtgccattggaatgcttagtttccacaactgcatcctgcaagccgcctacagatttgtctggattacttgcgttgattgacatggtaacacctgaagacttcgtgtcagaagcagttgaagaatcatctgctttgtttgcactgctcaatgcagaaaaagacgcggaacagtccttctgagtgtgtgtagattcaacaagattttcacagttcaatctagtggcaaccacaggcttcgtatcaggaacagattcagacgactccagcagcgggtctgatttgcaatttgaagcatccagactatttagcatgtcctccttgatgttatttaggaaattcaattcagaactaccagtgatattttctggtttcctttcaacacagtgggctgacttcgaacattcgacattcaacgtgtcatcatccaactcgctcgtgcaggcagcagccgcaagtattgatatgccagaaaaatcatctacgccaaaatgctcttttgtttcctccatgtaatcaagtctaggtgttttaaccttatgatgctttccatgtgacgagatacctccacaggatctgctcaacagtttttcatatggatccactagcaatggagtgggtggaggtgatggagaacaatccataagaaatcttctcttttttattggaacatttcccacaggatcactaaagcgccgaccaagaatagataccccaaactgcaaagatgtcattaaatagttcataaaattggcattcaagaattgaattgactcttacttcattgtactctaaaggagaaaaataagaaccttctcagactcagaaacaggagcatcatcttgtgccaattcttgattagtagcattgccacatgcatagaaagatctaatttcatcccttattctgtcttctccagagaaagaggtccttgctctccttgcagctctttgccttctgtttacggtcttccatctcacctcaggatctataggccttggaagctccaagcccatggtgttgagcttgctgctacacgacggcccagctctgtctgttgttgattcaccaccacagcctttgcaggtcattgaaacacctgagttattaagattacgaagtgatgatggccttccagtacaggtgcacaatcgaatctgccaagagaaccaaactagtcaaaagatccatatccagtacagtatcagtaaaaaaaagtttaggcggaacatcaacccatagcaaactgaacacaatgataggctttcaacttggttgggaatacaagcagagcatgaacaacataagcataccatgaaaccaggccttcttcctgttgctcccaaagaaacaagagactgtttcacatcaactgcaccctcaggtccaatagatcccttaaaatcctctggaaaacaaaaacaacataaggttccggttgagcaccacaccaccaaagcgtacgatactgcttgaagaataatagcatcacaatccacatagcatgttcgaaagcaataggaaaaaactaaacgacgcttctgcagccatgccgccaccgcgcgccaattatatcagaaaataacttgaacccctcctgtagcaaaatttttaggaaaaactttgaactcccccgctccaaggctacttgagcacatatgggagtggagcaccagaaataatggaaaaccagaaggcttttacttccaggactgaatcccctatggcatcaacacggaacaacagctcagtcaactgccctcttccatcagcatccgcaccaacgagaacatctccttcctagaaaatcgatccccatgaaaaagaagaaaagcaggcagatctggggagctggacgaattcctggcgagcaccgcacgaccacctccatcccagattccacaacacgcagagagagaaccagattggttgattgaccccgagaagtccaaatccttcagacaaggcagatctgacaaccgaacctgttcctccgtaccccaggcgccaacacggcgaaacacacggcgatctccccagcggcgactggcggcggaggccaagcagagactactaagtcagatttcttaagatctagggttgcgtataccttttgctcctccggccttcctcatcaaaccccaagggcaaaatctctccctcctctcttaccacctgcgcgcgcgccgccgccggggctcagctttttcagtagaaatcgcgccgccccatccgctcttccgcttgcccttctcctcctccccttcctcgacggggattccttgcgtgcgctgctctcctgcgcgaagaaggaattcttcccccccccccccccccccaacacggctgtggctgatgctgctcctgctgctgccttttcccttccccctcgccttttgactcccgccctcgccggggcgggacccgatcggtgggcggcgccgcctccccctgccttccgtccgtccggtcgccgcgagccgcgtcgccgctgccgccgccgccgatttttttttttttttttggttttggaccctttccttgtgctacttcgccgcctgcggaggctgggagggggagaagaccaagaccatatttttccgtgatttttagggtgcgctcgatttacttatatataataatactcctatatatatataagtattttttttctcttctctccatggtggtggtggtgggtgtggagctatatagggacgggaatcaaagcctttggtcgatttacgggattgcccctggtgtgcggtgtgttggggatgagagaggtggaggctggttttgcttttactcctagattgttttagctggggtggatctcggccgtcggatcgcatcgggattgaccataatcagcttcagcggtagtctctcctttccaaattaatcatcatatatgttttttttcgaggaatcattatatatgtttattatgcaccaacaccaagataatttaaataacatcaatcaagatatcatacacatattctcccacaatgaatatatcattctattacatgatgattaatttgggaaagagggagtagttttttaaaagaattaaaacaagggtacctttaatggaattgtaaagttttaggccacttctaaaaataagttgtgaatcggtacttatagtatgagaacatgtatgatgatattagacaatagtgtactctttttgttccataaaaacccggatatgacgcattctagtattacgaatttatagaatggagagagcaacagtgcatgattttctcgatatgggctttgtacttagaccatgataggccaatgaatgaagtttgtggcaaataattgggttggactcaggcttttgaatttatgaacccataaaactttgcctaacctaagagataacatatatgcctcattaataggtcaacatcgaagacccaatgatcttaacataggtggtgtttgaatcttctgaagatgaagataaaaattaagtgtttcatgtaaaacgaggtggtaataatgaattaatatgatattttagagcaactttcatatagaattgtttcgcacaaaacacaccgtttagcagtttgaatagtgtgccatgagtatccaaaatttaatccaacttttgttggagaaaagaagagggcctagtttcttcttaataaatctacttgttgcacggtgctacttgttgtgttctttcccattagttcccaactcatatccatcgttttccgcgtgcacgcttttcaaactgctaaacggtacgcattttacaaaaaggttatggatgtgtttagttccacgccataattggaagtttaaataaattagaacgatatgatggaaaagttggaagtttatgtgtgtaggaaagttcggtgtgacggaaaagttggaagtttgaagaaaaaaattagaatctaaacagggcctatataggaaagttgctttaaaaaatcatattaatttatttttcaagttttttatagctaatacttaattaatcatgtgttaatctatcgcaccgatttgcgtgcataggggaggggttcccaacccctccaaaagcactagcccatggcccactgctctcccaccacatcggccatgccccacgactctcccctgtgtggttctacccatcaactaataacccaacataagcctccgttggctgtagctttgtagcttcttgtacccctactattgggaggatgctacgcgtcggacgtccaatttttcgtaaatatcggacgcccaacccctgactgccgcacgcctacgcatgcatgcacaatctctaccgtttctactctagttgattagcacatgtaaaaagtctatatgcttgcgcatgcatgactgcatggttcagcacttatctcaaccccactttttatttctttaaattaaatttccttctaaattaattatccgatttatgattcgatttcaccattaaactccttgcaattaaatcttcacaacaagatctcgcacggttatattttgatgagaaaaatcgaactttgtttcaccacttataaaaaaaatgtttcaccactaggtcaaaatgttccaactcactctaaaaaatgtttcagagaaatgcaacattcaagtaatactaaatgcaacaccgataatatcggtatgaaacattgactctcaatgagtgagacataaaaatcttgctcaaatgtttcaactcagtctataaaaatatttcagagaaatgtaacattcaagaaatactaactgcaacaccgataatcacaattaaatctttacgacaagatctcacatgattatttttataatttaatcataaggtattaacaattgaaacatcatataatatttgctgaaacatgataccgtgtgcaatatttttaattaattaatgaatacttattgaaacactcaatcaacacatatgcaacatttataaataaactagtgaaacataataaactacttactgaaacatacaaatagcaccatgtgatgcattaaagaaagatatatacattgcgacaataattaaatatgtgcaacataatagaatttcagttgaaacatcttattctcacatgtgaaacattaaatttaattggttgagacatatgtgtgttttttattataatatagtcatgtgagatcttgctgtaaaaatttaattgtaacgaatacaatggtgtaaacatatcgtagattggatgagtaatctggaagaaaaatcattttcaagtttgctaaaagggtgttatgtacatgcaaataatcttgtatcctctctcctccatgcatgccaatgctaagtaagggagcatatgtaacaggtgtgaaaagaaagtatctgacaaaaagaatacgaggctgcatgcagcaaaaccacaatgagacgcgtccgatttttttcaggagattagacaaccgggtggaagcattttccctactattggccacatttgcccatggcttcaccattcaccaactttgcatgtggttgtgtcctaattttttatacttgcaatttgatctctgggatttataaaactaagttatgccaagtttttagtgtagacttcaagcttttggtccattgtgcaagccaggttcacatatagaaaatgcaaccaaaaaaaagcatggctaaagccggtctcaatttggttcaaagatcccattttcttatagaacttgcttggaatttgaacatgtcaacctagcacctaacaataagataggtgaatgtatgatttaaggaggtttgaggatttgagggtgtgaaagtctcatgtattactaacagctatatgttttaaccaagaaactatgacaagtatctatcttgaaaacaagaagagctggatatgttttgatcatctagcttttccttgtatcatagcaaccatgaagagaatgtgtagaagtagaagtgatctatactttttgatttcaaaccatgtcatgtcagtgtattggtaaataacataatttaacaatgagcatggttatttaatcctgtagtagcttgttgccaatttcactagttcaaatttgttgtctcgtaaaatctttgacgatatcaaattagttccacaacttcgttcaaaaatctgttccaaaaccaacgctgactttattggctagccatggatgacaggccaactgtttcgcttatttatatactccctccatttcaaaatatttgacaccgttgactttttagcacatatttgaccgttcgtcttattcaaaaatatttgtgaaatatgtaaaactatatgtgtacatgaaagtatatttaacaatgaatcaaatgatataaaaagaataaataattacttaaattttttgaataagacaaatggtcaaacacgtactaaaaagtcaacggtgtcaaacattttgaaacggagggagtacttatttgaatcgctaattagtaaataaaaatatttataagtaaaacttttatatgcgtattcttagtgactcaagaacaagaacaaatgttataaaataaactatgataaaaaatcaaattataaaatttaaaatttcactatataagcctaatcaccatgagcgaaacaagtttgcggaccaagtggaccgtcgaatgaattttaccgaccaaaatgtacccttaagtacggatgtaactgggtcgatctacgaacccacttgtaaacaaaacttagtgggtaacctattaatttggtatatattacctccttttttaatatatgatgccattgactttttgtcacatgtttgaccatctatcttatttaaaaaaattacataattataatttattttgttgtgagttgtttatcactcaaagtattttaagcatgatttatatcttatacatttgcataaaatttttgaataaaacgaatggtcaaatgtttgtttaaaagtcaactacgtcatctattaaaaaacgaaacgaagggagcaagtggattcacgggttgacccacttatatccttaagtacgacaaaccgggccataacgcgggaaccaacgagttacctacttatttaacctgtaagaacaagttttgtaatagaggtgattgtcacataaaatattatccatatcatcgactaatttatagtgggcatctcatacaccacattacctctaatgtactaaccctaatgcaacataactatttattttatccactctcatgcaatcaacctcattcttttctctttcttccttaaagtttgtgatgagattacccttgcatgatggtggctcatcctgttagtgatatgccctaaaggcaatcatagagatgattgtatcacatactatgtttacatattgatccgactttgttccttgaaatggacaactcattattggttaatgaatatgtgattctttcatgagactctttatgttgtttgttactatttctaaaggatccctgatcaaatatcatatatggaacaaatatgtttaaatgatcaacacatgtattaattgatgatcatgtctcatggatcatggtatatgtcagggttatggatattacatacccaatagtaatcgactaagctcggcagggcccaccacataccatgtcttatacggaaacaaacctcgtatatagagggagttccggataaggaaggacaagaagagttatatatggaaatgataaggactactcggattgtatccatatttatctccctagtcttacttggacaagggggcaactatgagtataaatacaagctcccctaggaggagaggggacacacccaccacaatatacaaagccataagccaatacaagccaatacgccgccgtatattgacatcagagattagcctaggcatacaccatccggcacctataggggccggcaagagggatctagcaccatctctgatctcgccgagtacggattcaaggaggaagactaccttgtcgtcgactatgagttaattatttagtcgtcaagtcgacgacggatagatagattatcccagatattatatttgtgtgatccagatgaataaagagcaacaccggcttcggccaacaggatgtagggctattacctgtaagataaggggcccaaacctgtataaaaatccatgtctccatcttttttatctcaatctcgcatataccctggtaccaatgatccccataccatccaaatatcgtagtcgtgatatcaaacgtcgacagtatagagataccaaattaataatgtggacacatgttggggaacatgttattggatagacccaacatgagacacttcaaaagctatatgtgttgtgtcatcagtgatctcatttagtgctggtgttgaatccttagacctaagattatcatgattcccaacatgtgtagtagcttacctagggactgctaaatgctactccgtaattgggtagttataaaagtagttttcgggtatgttgtgaaacatgtagtgggatatgaataatcaagatgggatgtggtgggccccttgatgttgtagattatggaagtgcatggccatgccaaaggtgattgaggagtcaatcacaagttatataatctatacaggttcgagtgaacgattgagctattagaggatggcacatatctaaccttgagcttaatcgatatcgtgaggcaaaggggttcatacaagtatacactagaggttcagccgatatgatctttatgtatgctcggtgggtcaatacgttctgctaggggccgttgttgacacgtggaccgaaaatgagttttcgggttacagccgagtgtacatgaacctccaggatcgtacgcttaatgggccggaataaggggattggatggagatccaatatgagcttaattcggatagggatccgaataggagtcctatgggccttggaggctcgagtcatagatcctatatattcgtgagaggtgtgattggcggaggtattgcatcacgagcaaaaccctagccgtcactcccctccccgagcaaaaccctagtcacgcacgggtgctagcacatctacgcgtggcgttccgtccctgtacgtgtggataccggtagaggcgccactactttgcggtgctgatcggcgtgggaatacggcgaggggaacgcacgaggaggagaaggtcgagccggtgcgatcgactacttcctctacatcgacgtgcgctacttcgcgggagtttcttcgacttcttagcgcattcttccgctgcgcagcgcgtcgagtggtaacgatctatgatctaatacttgcatggttcctggtttacatgatagaaaattttgatttatgctatcgtagcctacgcgtattccatcacatcccctatcctctattctttcctccaccttatcatttaagcttaagggcccctttgaatcgtaggaatgaaaaaaatgaaggaataggaaaaacacaggatcctaacatgaatgaaagtataaaatagaggattgcaaaacacaggaaaaacatagaaattaccgtttgctcggaccgtaggaaaaaacacaagaatcatatgagggagatatgccccgtttggcacagctctagctcccaactcaacttacctggagccggagttgtgccaaacggtccagatcctctgtttttttggagtggagctagtagaggtactcctaaaaactgaactacgggggtggagctgggtttttctgctccacagctccactccacccccacaaaccactaccctttaattttgtagtctatttacacaaaaataccactcaactacccttcagtcatcctctcatcctgttctctctcctccccatctcctcccgatcccaaccgagctgcgggggcggcggcaggggcagcggcgtcggtggcgtgaggcggcgaaagcggcgggcggtgacgacgggcaggcggcgcgcggccgacgaagcacctagggacggcgaacgttcggtgggctggcggcgcgcggccggcagccgacgacgcgcctgggccgatggctattttttttcttttttttccagatctggagctgaaacgtatccaaacacttttcaacgagtcttcaactccaataggagctagctctcactggagttggagtttggagcccttcaaaaaggaaattttctaagagctttgagctctggctaagttttctccaagatctctataggattccattccataggaatttcaaaggattttatatgatccaatcatttgattcaaagacattcataagaatttttcatatatagtattgtaattcaaaattctctaaaaaaattgtttttcctcgaaatcaagatcctaccaagatgcttgtgcttagatactctctccgtcctagaatataaacatttttagagttggacacggttattaagaaaataggtagaagcgaatggtagagggttgtgattgattaagtagtggaggtaggtgagaaaagtgaatgatagagagttgtgattggttgaaaagagaatgttagtgaataaattgttatattttaggataaatcttatgtgataaaaagttgttatattttgggacgaatggagtatttatcgaccaacttgcattcttgcccaaagccctctctccctgtgtttccttcacatccactctcccatccaaattcccaagcccatctctctctctctctctctctctctctctctctccactccagtcgaggcacggccggctccccccgcgtcgccggcgagcagggcacgggcgtgtcgcgctcgcggacggcctcccctcccctcccctcgtcctagccttctcctccgtgcggcgcacggccggcgaggccacccagggttggtgacccaaggggggcgagagcgcggagacgcggcccccccatccatctccgtctcccccgtccggatcgaatccgaggtatccgctcttctttctctcttgtagcgctcgctcgtcgtcctccgcgcatgccatccccatgagtgagccggcgtgcgcgtgggttggagatccatcagtaattagaatatctagattggtttgtatcatccccaattaacctgtccacgcagcgaaccgtcttccggagaattggtgagcggagtggtgctgctgatatcaaatcatatagttgcgtgtaatttttgtatgtgttgctgcaggattgatgtagaggtgtggaatcaccgtaccatgttggcacatagtatttgtcgatatggccgtatggggtttatttagcgtgaaaccgattggcattacttggatcatgtcaacatagtgtttttttgttcagatatagccttttactgatcggtctgtgattgtgtgcctacctttgaagttacttccttcatttttttttctgctttcatatgctgatgcagcttctcactaaagcaacttctgcaaatattttctgttggatgtaaatgcacacttttttcgtcgaaataaatcttccataaaagaggagcacggtattaggtgtacccctgacactcactacaacttaagtgtgcttctgagattcttccttttctcgcaatttcataatatacataccaactactattgtgctacaaagatctattgtaactctagcattacacggtgggacttgctacctttttctttaacataaacggtatacatcgttggacaattccactaataagggattttctcttcaccttgcataatgtttttggttgtattgacaagcactgttttaatcctaaaactctctctctctctctctctctctctctctctctctggggtcttatatgtcctgctgttttgttgcctgctatagcattaggcatcaagttccttccagttactatgtgctggtccttttgttaggtttgtaaaatcatagttagttaactagccagatggacatattgcacattatctctctttttccccactttctgatatattacagctggtatatgctcatccatgccacacgttattgtataagtaaaacacactgtggtgaacaaaaatgccattctataacgcgcagctgtgaacattttttattggtgattttttttttggaaaatttatacagaaccagagcaagcagaaatatgccatgtttttccttctttattctactgaagaacaggacaaaattgtgtatatatgttctggtcacacaaaattatattgaaatcctttgaacacattggttgcttttcatttgtcaagtctaaggatgatcaagctggtcttttgtttcacaaagtcacttgtatgcttcttccatgagaagtcctttttattagttttatcagttatcacatcacgataaactcataggcagtgaagtcatgtttgtgtggttttgactggccccagatgacacaccctttttgtcatcttggatcgcacgtttgttattgtggacttgtggtattgtctgtgcgtgctacccattattccctttggctctttattttctaaaccaccccaagtttgtgctagcaggctagcattgacttacatatcttttctagcattattattaatataaccatggtgaacaaggtttctgaaaagtttaaatgcaaacatgatgataaaatgccttgttaataaattcagtctaatctaatggctaaagaaattaccttcactgaagatattaagcatgtgaatgtgtgtacatgttctgcagagtgaacacatgaacctatggaaaccaatgacattgccaacaaacaaactttatgaagttccctattgtagtactacctccgtcccaaaatataagcatttttagctatgaatctggacaactgtgtgtccagattcatagccaaaagttgctatatgttgggacggaggtagtatatattatgagaaagtgactatggtacatatgatgtaaaatactacctctgttttttaatatatgacgccgttgacattttgagatacgttttttgtaattatcatttattttttatgacttaatttattattaaaggttatttaagcatgacttatatttttatatgttggcacaaaagttttgaataagacgaatgatcaaacatatgtttaaaagtgaacggcatcatacattaaaaagcggagggtgtatgtgctacatgacctttttcctccatacggtaattatttcttagaagtggaagtggttaggagtggaaaatatcaagtgagagaactttcttttagctgaaaaatgtgtgtaagagccttgtttgcttttctgtgagattttccttaattcacactacgttcctttttttttttgtcaccgtgtatgaatttcaaaagaggggtcctattcatgttctaatgtgtgacattcttgagtaggtctataaatggcaggaagacaccgcatacctcgtgaatactatgatgaacgtcgaggatttcgtgatggccccccacctccacttgctcgagcaaggcccatctctccacgtcgcttggaggaggagctgtctagccgccgtgctgagatgcgcagaatccatgatgacaatcagcgcctagctgatgaaattgttggtctcaggcaggcaatgcctcgtctgaaggaagatctccatgccgcaagtcaagctatacccaagcttcgtgcagaaaaagaacttgagtcaagggagctgactcagaggaatctgaagttggaagctgaactacgttccttagaacccctcaggcaagatgccttacagctacggtccgaggccgggaaactacagtcaataaggcaagagatgactgcaaaggtgcaggggttgttaaaagagcttgagcatcagaattctgagaaccagaaaatacctgtcatgatagctgaacgtgatgctcttcggcaggaactagtccgaatgaggtactgaactattctgcatcatatttcgtgtaaaatgattgcttcttattgcttttcttgatggatcaagtgttagttctaagttgctgcttgaaggagcgcatttaggatcctttcctacagtttcaattctaaagaaaaaaagtggggtacttgagtatcatcttcctcttttcaccaggtggaagatcaaactgattaatatcactgtaggggaacccttgagtacgagaagaaggcaaggcctgatctgacagcacaggtgcaggcaatggagaaggatcttgtttctatggctcaggaatctgagaagctgagggctgagattaagaagagaaatgcacccagtaggtttcttttcttttgctagcttgaaagttatggaaatcaatggcgctgacccacaacaacatactatgtttgattttaggtttcagcggccatggagcttatggaccaccaatggcgactccagggatgggcctgcaaggcgtctatgatgatggctatccttccataggcagccgctatggcactggatcttgggcaccacatgatccccatggttatccacaactgtgactgggcttctgatcgttcttccctgggcagtgctttatcttcgtaatatcgcttgatggttgatactgatcgtgacaaagcttttctcttagtagaacttgtggtgcacagtagatggtcttttgggggtgcacttcaagtgttgttagtttagcatatgtagcaatataccagctatggttgccttggtacctctccaaaaaatgtaatcaatgatgactgtaagagggaattcagtgcaacgaagaagaaaaataggaacttaagctttacaagatgcaagtttgcgtatgaatataacaaggtggaatcagtcagggctggatgttgctcagaagtttgtccctaccaaattgcaatagcaaaaattacttattcatgagcgatatctgcaatgcgcagcatcatgagctgtgtttcctgagcagatgcatattatttgctccaggataattaatttaattttgtaaatgagtatctattcgcaacaagcagtgcaaatttaaatgattctgctattacttgtgtgaagtttatacagtagtcgtacctgaagtttctgtgatgttggtgtgggtgcctaacccgacgaggcgcaaatggcttctctatgcaacgattagtaattctgagcgatatgattctttttcccccaatctccattttttggagtcgaatccaaggtgtgaccttgagagagacatttgtccgtgaaaagcacgagacaagtggcttgaagaagattgaaggcatcctaaaagcaccagacaaaatggaagatcgaagagagacggcagtcaagatcacttgcttgcagttgcagacaacattccatcaattatctttcttttttatcagtttattagatattgcaaacaagtctatcaagcacaggtcagcaaattatcgaatcccttcaactttggagtaaccgagcaaatactgataccaagacaaggatccagctatttggtgggggtgggggtggggggttgtttttttttttgtttgaactatccggctagggttagattcgaaaatgaattcggactttttcccttcggtcacagaaacttatacaaaagtgctaatatacagtgtaaacaaatacggtcctaactcctaacctattaggatagttttggaaacaaagacctaaaagcatctccaacaacctcttcaaatttgaccttagatatccattttgtcagcttgttaaaaatttagatagccaatttatctttcactccatcggcctttctatttaccctatccaatatgatagtaggtctcacatgtcgatctatatatacttcttcctccctctattgtttcctcttcccatcgttttcgtccattcccctacccctacctctcgttgcctcagcccaagtcgccagtgcaacccatccttgctgcctccacccaagctgatttagcaagtgatttggcttggctaatggcaaatctgttggatactggtttttctccaagtttactaaaatttgacttggcaagctagataagtagtttgttggagatgctctaactcattactttaatttttaggcccatctctagctctacttgttcatagtattttttttatacaaagcatggcatctagctataaatgtatgccttatgcacttgttttttttttctcattcctttttacaatctaattataaaatattaaattgaggtttaagatggacaccatcagggttcacgattccaaagaaaaccggttgaattccgtggaaaaccgaggtttcgacatggctcggaagtagaggaaatctggaatttcgatgggttttatcaaaattcaaatttgaattgataaaaaagaaaaaaaacaaataaaatcctataaacagtatgatattcatatagtctatttgagtataaattttccagaaatttggtgtattccatgtatttcttgaactttatagtaggaaagaaaagaataacgatttaaagaaaaggaaaacactttcctcagccgaattccaaggagtaggcccacttagtacttagcccagttaatagaatagaaaggtgatgtggtcccgcacctgatttcgctcagaatttcgccaaagtcaaccggttttcgcgagcatattggtaaactcagtgaatttgtagttaaattttggtttatgaaatttgttcaaaatctacctgttttccaccggatttcatgaaaattgtcataccgccagagcctggaacggaaagtcatctcagaattgtaaaccttggacaccattagtttgtacgtgtttatacgatatcgttatacacatatacagttgctatttttttttaaaaaaaagtagtctactcttttatatagaataacaattgatattttcaggcaatttttcataagtccgtcagacaagtattttaaccgtattcgtttcatgtctatattcgataatatttatcttcgtattgaggatattcatcatttatatgtttccaaatccaaatccaaaacgaaaacgagaaacaaatacggtacgcgtagtcgagttttgtttgtgatgagtttgagttgtgactgggcttctctcccgttaacagtgagagagacctttttggtacacaaaaaatcctcatcatcagagggaccctgcccgaaaaaggtctctccctctttttacacacatatattacgcgacactacccctctcctctttcgtttctttccccttctccgctcctcctccccctcgcgagctcggcggcgggcggcggcggcggcgcgatgaaggtctccatcaaaacgctcaagggctccagcttcgagatcgacgtcgagcccaccagcaaggtacgccgcggcggcctcccccctcccctcctctgatctgtgatgtgatgccctgtgtgtgtgaatctaccccgtcgccgcggcggcggcgggtttgcagatggtgggggtgtttggatggatcgggttggtctagagcgccacgggggttagcagcagcgtggatgcagtggggggcggggatggggctctagggttgcgggatttgggggtgagggggattggggagtggtaatggagggcggattcatcgtctaggggcgtggcttttgtgctggttaggtaggtggggctctgttcgtcgccgctgcgagttgggggagctgctattgagtattgagtgttctggtgtagtatatgatggttggaagcaatattaggttttgttatggctttgtatgtatgcgtgtatctgcttgatgatgtattgattagcgtagtccgcgattcagtaccgtgtctttatcttccatcgcttttattgatattattgcatactggagcttggttgctatgtgttcagcttgttgtgagcggatcgcgggattacggatatatctttatataggtgtgtgtgcacgagtaagctgtatttaatgaccgttggaacaggcaggccatgaatttgtacttatacgcgctggtatcgttgtgttattatggctcgtgtgatgaggactgtttcttccagtaatgttatatatatgactagaccatggaacgataactgtagcgtcattatgcaatatttgtttgaatctaagatttggactagggatagccactctagcaaagctcttaaacctttgatcatagcgcttaggctcttcagcacataacttaatacggtatgttttctcattcgttttctatattgttttgatgatcaaagggaggacaatttctgtttatgcatatagttccaactagtttggaatatatattaacgtgtgataaatgctgcttagttattccacatgagtatgtacacatagtaactattgtaaaaattgcccatcagttaccattaactatggtcaggtggttttactggagtgatgttaacggttagtcggttacgttacaatccatgattggaatcttaatatgtagtactcattactgcactttttcatgactcgcctccccagatacatcaaagcaatgttttcttgccacgtgaacaccatattaaattgattaatacaaatacattctgtttgactatgattgttttatgcaggtcagtgatgttaaaaagctcatcgaggttacgcaaggagataatgtctaccccgctgatcagcaaatgctgatccatcaagggaatgtccttaaaaacgacacaacacttgaagagaacaaagttgttgagaacaacttcattgtgataatgttatctaaggtgcgttaaatttttatcattattatagtagagagcttaatgctatctaaggtgcctcagtatgcaacatatttgtgaaatagcacaaatatgggtcatgcctcgttatgaacgtatgatgcaaatattttcctttcaggattttgtgatttatctatgctataatttttattaaatagaacttggacaattctatttgcagaagggatcatcaagtgctgcttcaagtacagctaaggagcccacaaaacaggtgcggtagaatagccatgtttcattatatcattgaatctgtttctcagtattatttttcccatttttttaattagtgttctatgtggtttcttagaatatcactgatcaataaagtaaatgtgctaagtcttattcaactgatctggaaattttattgactcactcaagaggaaatctgctctgtcctatatatttaaggagaactaccattgacaattcaagatttctacttgttgtatacctgatatgagattgtactatttcttttatacgcttttcctgtaaggtttttggtttaataatatcatctcctggatacatgatgcccatccaagtatatgatttaaggagaactaccattgacaattcaagatttctacatgttgtatacctgatatgagattgtactatttcttttatatgcttatggttgttggcttgtagaattgttattctctttttgtaatttgacactgaactcaaaatttcgcttgttgtacaatcaaattaatatgtatgtcttgcagccctcagttgaccgggcgatacccactgcgcctgcaacccaaccacctgctccaccagcacctgtgtaagtatccacccatattggcctgactgaaatcattgagcacttatgtgctcaaggatccatttttctcagtccttaaattgtctttctttaacaataactgtagttagtaactaatgttctcttggccattatatccatcatggtgatatttaggtccacatcttaatttgcaaattgagttcttttgttgccacctaattgcaacgttttgcttttcccagtagcgagcctgtgactgcaccagttccaactgcaacaactgcttcagctccagcagctgctgtcaccgctgcatcgtgagttgttacatgtttcctttgaatttaagaatctgatcaatcaccctcttttgcttttgttcctttgtttggcattgttttatttggcaagatatgaaaggccactttgacaatactatctgataatttgattttaccagcaccgaagcagataattatggtcaagctgcgtcgaaccttgttgctggaagcaatttagaagggactgttcagtcaattcttgaaatgggtggaggagcttgggaccgtgacactgttatgcgtgctctgcgagctgcatacaacaatccagaacgggctgtggagtatttgtacaccgtaagaatcatttctgcttacctcccatgttttccgtgtcttgttgcttggacttcctgacgtgctattatgtcgtcaaaacttttaaaacaaatagggagtctcaaaatattaaactaatagaaagatgttgttaatctgtgttatttaagtttttgcaatgccttgttgaaaataataaataaacagatcaaaaaacaattttaacgacataggcactttcttgtcatgcatgctttggtatgtgcccttgggcaacaggaaaccacttatttcaaacaatggttgcacccttttctctcctttgaacttatttctgccacttctgctgcttttcgggcacaattttatcatgtgactaatctattgcactttgtgtatttgatatagggggttcctgagcaagctgaggcccctgctgcagttcaagcacttcctgtccctgctgcagttcaagcacttcctgtccctgctgcagttcaaccagttgacccaagccaggctccccaatcagctcaactttcaattccatcatctggacccaatgccaatccattggacctgtttcctcaggttctgcctccacaactcacacaaccacatacacacgcacacaaaaagtactagttctgaattctttcaatttttttttcaggtccttccaaatgcttctgcaaatgctggtggtggaaatcttgatgttctgcgaaacaattcacagttccgtggcttgctttctttggtgcaggctaaccctcaaattctgcaggttactttttcatctttttcttctagttgttgtactctatacgacatatgcactgatgtacaaattctggcatgcagcctttgcttcaagagttggggaaacaaaatccacagattttgcaactgattcaggaaaaccaggctgagttcctgcgcttaatcaacgaacctgcagagggagctgaagggtatgcattgcaagtttgccactagtgatgtcagtatttgtatatttcaacattcgtttttgtgcttgacgcttgataccgtaaaccaggaacttgctagaccagtttgctgcgggaatgcctcaaacagtggctgtcacacctgaggagaacgaagccatacaacgtgtaagcactatatgtgttcttctgcagtaccacaaaaccgagccacttgtttcatgccatcttgttgcttttatccacgttttttgcacctgcaagttgtaacatcacgtcactttgttcttttgtgcagctggaacaaatggggtttgatcgcgatctggtcctggaggtattcttcgcgtgcaacaaggatgagctgttggccgcaaactatctcttggaccacatgaacgagttcgacgacgacgcccctgaaccaccgcaataagatgactgacccgtttttaatgatacatgccagtcacacaagagacattgggttgcaaacagtggtcaccaagactggtgattatccccgttttagaacatccaaatccacccatccatccaggcgtgagaaaaatgtttttgagcttctctcatcatcattcttttttctgctttgggatttttatgatgattagtacatactctagatgacatttacagactacatataaccaaatgtttcaagtcttcagtgtcggttaactgcattgagggagaatgagttgaagttagagaaatccatgtgttcaacttcttatgctcttgtttttttggaggtcgttgtgcacgctcaaaacgtgcttttgacggtatgatgcataccttgacagcacgtgatatgggccgagccctttaccgacccacataatatggcccgcacggatgccacaatccatatagtatgggccgatcttctgttgcatctaatgggccgggtcgcaggttcccaaggggtcggacgcaggggggtttgcttcatctgatgttctgacgcagccacgcagggtggttcgcttttcggatttggagatttcaaattcatacaaattttgctgttacatggagacacgccgttctaacttccaacctgtttaaccgccaccaagctcatgcaatccggcaaaactgtatacaacgatttcacgttcatacacaactgatctcaaaattgtctgatcagacacaaggaaattcgaattttagcaattaattttgaggctgttcaaattgatgtcattttcaaccatactgtttttttttgagaaagttgtcaaaaaaaatgtctacatttagtttattgtcaaatttagtaaatacataataaatcctgccaaaattttggcaatattaccaacttgccaaaatttggtaaggtttattttggttataatctgaacatgcccttttaagtcaaatttaggggtttcttcattgtagactatttttttcaccatggatttttaatggactgctaatagcacatgtatagaagttttacacattatttttggttgcttcattcattttctacatctgtcattcaaacgatcagccgtagaataaaaaaaaggcatgaatttttatatcaaatcaataagttagcagtactattatcatttaaatgcactagcaaacatgactaattaattgagcgtaaactgtttccaatctatgcacaccacgatgaattgattgaattcacatgatactatatcacatggtaacgccggcttcatcgccactcccatcgtcgaacaaggtcctcttccctgcaagatggccaaatcatcatcatcatctactaaccaaagccagaaatgttataacattaaccaagattgactgcacagcaagtcatcacatcagctacaaattaaggcaagagcagcacctatgatgatggttaaacaattaaagatcagcaacctctgcatattacctgtgctaggcgtgtgccacttaggagtgtcgtcctgatctggcactgccaatcctgcgtcgtccttgtcacaaccagctctccctattcttcgtttcttgcaccatgaaaaatcaggccattttgtgacgcgcagaatgcggcctccaatctcggacacgccgtcacagtggagcgcaccattgtagctgctcgcaacatcgtatcttatgtatgctttcctgtgaaatttggaagagcagaggtaaaatggtaatggaagtcaaaaggatagttgaaacaggtagaaaagatatgcatgcaggaacaggtttttctgacttaccctgtgcttgtgccatctagattcacgggagttacaagttttttcatatgatcgttcgcgaaaatttcttcaagtgcgtgcctaatctgaaatgggcaaattgtcgaggggaattccctagggcccatcactccaaaaggcaagccaacgcaagaaggttaaaaggaaagtattcatccgtttcatattataagattttctagcattgttcacattcatatatatgtctagattcattaatatctatataaatgtgggcaatgttagaaagttttataatatgaaacggagggagtagttagcaacagtatagttaccgttccaatctcgagggatgaatcaaagccggtcacacatacagtctgcattaaataattaggcattctctccccacgagtaggtatatctctgaacaattcggaagaatttgtgcaatgttaatgaggcaaaaacaatagcatagcgataaagctgatgaagtcacagttaacagacatatacctgagaacagcaaagtccttgggatcgaaccatgcaagttttaaagggcgtcccatcagatgatatcccataaaatggtagagtgcctgaaaatcaatataaacagtgttgtcatcctcaaacattgcaacatgaatcatgagaaaataaaaactgtgcagtgctacaccaggtatacaacacaaacaacagagataaggctttacactctcagcagcttgttctgtagaaaaatcaacaactgcgagatgcctcgtgctactgaaataaataccaacaatctcaccaatctcctgaaaaatgttcttcctataaaccaacagttggaaatttacaatcaatggtttaattttcagaaagaaaagcagttataatttcaaaagccttacacttgattatattcaacataattggccatgccccagctagcaatcatggtctgctgtggtactttctcttggactttgtcttttgcgggtgctttcggctgtacagaacatcagaccaggattacatgaagtaacaaggattgatttctagaaagaacatttagatttcgtggaggagtctggagtttaagaacatgaattaaaaacatgataatgtccatcaaggaaaaaaacattgagtacttaacttgtattggtttttccccaaaaattttgcaattccatgaaagaacaacttttatggtagttctgactgaacacaagcacattggcagatagcgccaatagcaacatagaaggattagtccttaggaaattttaactggcatcgtaagaccaggtcaataataggaactcaattacatactagtatctactatataaatgggcaccaaaagaaaaaaaaaatccatatatgcggtattaataaaccattagttagtgaaagataaacaattggccatcagcccaacatataccatgatccatgtcattatggccattttctttgaaagattaatcagattgaattggaggtaacagtgattaggtctgattagaactataatgggtgtatatccatcagttgcagatcagctcctctgttgagaaagtagacatggatatgaacaagcctgcctgcctgcctcaatcatcacaaagatacaagtccctagtaaaacgagagccgttcacctatcctcttctccaacgtatgcaacgcaggcgaaaaattaatcacgggaaatcgttgcagagcagacatgggatgagatgaggggaatagatggcattccgatattatatttggataaaatttcaccttcttggggtggcgataagggcaaccgaagatgatgtagcggcggaagtctctcgggggagggcgatgccggagcgggaggcgggggctgctggcctctcctgcgctgcagctgtaacccgcccaatggtggcctgaggactcgctccccgctcgagtcgtcttctcccccgtcgccattgttgacgatcccgattcttgtttatgcgctgagcccttgggaggattagacattagggcttgttcgtttaatcctcgcaaggaaaaaattggaggggattgataagaaaaaaataattttcatatcataatagatataaaataaattctctataaatctccctcaatcatcttgtgagagggattaactgaaaccgtatggtgagacgcctgttagcatatttcaacatgtacgaatactagtcaatagtttcaatctatattttttttttcttttctcattcgcagtgtacgctgcacatgtcatgtctattcatacatgtccacatgtaatttttttttactcatctgcacccttttctccgcctttaaatatttttttctcctaaaataattatctaatctacaatatgattacatcattgtattccttacaattaaatctttacaataagatatcacacgattatattttgataaaaaatcaaacgatgtttcactcattacaaaaatttgtttcaattcactctataaaatgtttcagagaaatacaacatttaaaaatatgggctgcaacactagcaaccacttatatgaaacactgagtcctaaatgagtgaaaaaaaatcatataagagatacaatatatttataaaaacctgatattgttgaaatatttttatatcgcatatgaacactaaactataattattgaaacattataaaatacttgctaaaacattccaagaacaccacgtgcaatatttgcaaattaaatagtaaaacatcatatgaatactagccgaaacatttaaatataataggtgcaacatttgcaaattaaaatagtaaaacatcatatgaatactagctgaaacatttaaatgtaataggtgcaacatttaaaaaattcatgaataaagctaaatatttttttcatcggattatagccatgtttggtcatgttttaaagatttaattgtaacgaatttagtggtgcaatcgaatcatgaattggagaagtaatttaagagaaaaaatagtttaaagtttgctcaaagaaacttaaaccaacctaacttttgttttctagtatggatgcatggcttctgatgtttgcagtgggcttcacctggtcctggtgtgtcttcatgcgttggcggaggctgaggtgggcatccgatttttaactaaaaaatcgaacgtccgatccgtagtcatcccctaattgtcatgcattagaccttgcaaggctcatttggattgaacgatttccccagggagaattgaaggaattcaattcggaatattttctatctggctcatttggtttgaaggaagcttcaaaggatattcgtaggataagaaaaattcatccacattttagagaaattctagcgtagcatgagagggttataagttataacctcacgttttccagtttctttgatctctctctttctctctctaaccaacatataatctcaaatttcatctctctctattaaaccaatatataatctcgaatttcctatgatgcattccaacgtatgatgcacattagaccatgtcttttttatccatattgtactttggactagggttaaactactttattgtgggaataagatgatggggttgtttatattgtagcaaaaaatataccttaccaaattttagcaatgccaaaattttgttaagttggcaatattaccataattttgacgagatttcatatgtattcaccaaagtttcgttaaaaactaaatgtagacatatctttggcaattttcaaaaaaaatgaaaatgacatcaatctaaacaggctcgatatcatccttcccaggaccaaggctccaactcctttgctgccctgagcttgagcatcacgctcatgcttgtcccttgctgcctttggtactatgcccaagctgagctcaacctctatacctcatccatccaccttcggatccacctcttctcccaaatttagtactccctctatcccactatagtggccatcccatgaatgctgacacaaattagctttgggagaaaattacccaaacacccccaaatcattagctgcaggtagtcatttcaagatgcagggaattgtcacacaagcaccaaccacgtccacagaagggataatttaaacatatacaattactccgtaatggtggcatgcacataatttgaatgctcatgcggtaaaattacaaggggcaagtaacctagctagacccactaattcaaaatactccattgatggtgttttgctgccaaggtgtaccctttcatgtcctataaattctgaaggaaccaagcagacaacctttttccattgcattcatcaaactgtgtggtaaaccaactcaatgtccagacatcacaatcgctatagatctagacatttggaaggcctttgcctgaccttagggctgtcaacgagccaagctcgagctcgagctcgagccaagcctataaaatgttcgaacttttagacaggcttggttcgagctcgatcaagctcaagctcgactaccgagcttgatttttaagtacaataatgcatatttcaaggataatattttaaaaaataattattttctagttcatcatattaatagaagaagaaaaaagaataaaataagtatatgacaccaatacaaggcatacaagtaacatatttgatatcctaatttattacataaaaaaatcatatattactagactcgttggaagctcgagctcggcttgacaaagcccacaagctttgggagaggctcgggcttggctcgtttggagcccgagacgagctcgaatcgagcctaggatgagtcgagctctagcagcttgcgagcctcgagcttttttgacagccctacctaacctcaatgaagcaaaagacaatatagaagaaggaagggttgtttcccgggcagcttaccttgctagagttgcttggcatggaaatgaacatgttgtactcccttttgatctgaacttgcaaacttttgatctcaacatggaagctgcatggaagctgcagaagaaggaatggatctaggttatttttacgtcatctattttttctcaatgcatcacatggatctttatcagtgcattaaatgttgtttgcaatacttgatgatgattgcattattcaatctagtttagaaaaaaatatatggtattctatgacatgtgcagcacactctactccctctgcccctcatgatcagcacacacacatgatgttaacaaaacaaaagattggtactacgataatttgacagtttagctcatctacttccattttctcctaaataatgttaaatatttaagatttttgattcatcaacacaaccacatcgacaaagcaagatttgtgcataatttgattagcaattcagcctacaaattttcaagttatcataaaagagagaagtacaaggtaattcaatgatcactttgttgcacccccatccatgaagtttcccatctgcatgaactgccattgtatgccttcaccacctgattcatcacagaaaaaaggaccagataaatgacatattcctcctcaaaaggttgtgtaaaatagaattatgacagatagctacattaaaaaatcatagaaagggcaactaatctttcacaatgcataaaagaaaatcaacatatagacatgaagccacaacataacattgttgattacgctacatcaatacaagcatagggtagtactggaatcaatactaaaaaaagagtgtaaacttcagttgcatagttgtatgcctaagtcatggataatatatggaatagataatattgttctaacgtacagtatgagtcatgacattgcatatcctaaacatatacaatgtgctttgtggctaggtaaagggtactgactagcaagttgtttttttcagacaatgatcaccaactcaaggagcacacccttcatgttaatgcaaacgcaaatgagaaacaaggtattgaactaggtaaagttcatgactttttaattagttaagaatatgttcatgtccttgatttcggttgtgaataaatcagcataatctgattagccacattaacttaccaagtaaataattttgtagatgacgacgatgttttgcaacatgagctacaagccttggagtatgacattcaagagtatggtgtgtacgccgatgctatcaatgttgtgttcaatgtagacgagttgctcgactcagatgaagaagaaaatgatgcaaatgcaaatgagccaatcaagtccagaaaattgacaaacccacaaaggcaaggcatttatgaattgttgcttgcaaaaagtatggatggaaaagtagaaacgggcagcacacatgtagttgttgaagtgtccaatatgagcatacgtacagtccaacgtatttggaagagagcacaactttgcagtgcacagggagtacaagttaatgttgactgaaggaagcattataattgtgggcgcaagaaggttgaaatagacttgttagttgtagcagcaattccattatagcaaagaagcactatacggtcacctgctgaagcgctaggtgtgtcaaaaagcacatttcatagattgttcaaagaagggcatctacgacgtcactctaactcattgaagccttatttgaaggaagccaatagaaaagaaaggttgtggtggtgtgttggtatgttagaccattgtacattgccaaacaaccccaagtttactgaaatggaaaacattatccacataggccttgtttagatcccaaaaaatttaggacaaaaacgtcacatcaaatgtttggacacatgcatagggcattacatgggaaaaaaaaaccaattgcacagtttgcatgtaaaatgcgagacgaatcttttgagcctaattacgccatgatttgacaatgtgatgctacagtcaacatttgctaatgatggattaattaggcttaataaattcgtctcgcagtttacaggtagaatctgtaatttgttttgttattactctacgtttaatacttcaaatgtgcatccatatacttcaaaaattttacacccaaagaactaaacacacccatagatgaaaaatggttcaacgccaccaaaaaggacaagacttactacctacatcctcttgaggaggagctgtataggattgtccaaaacaagaatgcaattgagaaagtaatgttcttgtcggtggttgtgagacctaggtataatgatgaaggtaactgcacttttgatggaatgataggcatttggccttttgttagaaaggtaacacatccttcttacatgtattgtttgcttatatttatttttgtttttctgatgtactaatagaaacccgcccaaaggagtagccgtaacaaagaaagggggacacttgtaacaaagacttaaggttggtagagacactatgagatcatccatgatctctaaagttctcccagctattagaccatgttggccccaagaagatgcaagaataacaatatttatttatcgggataatgctagaatggatgtcccaatcgatgatgaacaatttggttttgcagtagctctaatgggtcttgatattcgcttcgtgaatcaaccaccaaattctcctgatatgaattgtctagaccttggcttctttgcctcacttcagtccttaacatctactagggtctctagcaacatggaggagctagtagagaatgttcacaaggaatataatgactacaatccaaccactcttaatagagtgttcgtggcactacaaagctgctacatcgtggtaatgaaagctagtagagggaataagtacaagatccctcacatgaacaaagagagtctagaggcacttggcattcttcctaaagcgcttttttgtgatcatccgctctatgagagagccatacagcttatagtttactaattgtgtacttgtgtcatctatgtacatgtgcatctatgtaattgtggaaactaaatatataagttgtttgcttgtattaatgctttatcccatgttatattaacaagttgattgttcatatgcgcaatcacaaaaaaaaagaatgagtactgatatcgaataaagatacatatggcatttcattaagatgttttcataaccatagttccaaaagatgccaccaaaaaagaaacacaccacatatagcatcataggatgaactatgcaccccaatcattatgacttcatattttagactagtaacaagcatagtagaaaaaaacggaccagtgggtgacctggtcgacctctcggtttgacggtccgctggtccaaccgtgaaccgaacggtcgaaccgcagtttaatacatatatgtacaacgtatgtaattgctcaatcataagtgcttggatggctcggtggttaccgccacttgcttctatcatggagacctgagattgaaccctcataggagtatgtttcctctgatttttaccaaccaaaacgctgttggcaggctaattgggccacattaaggcccatctcaatattggtgtggtcttgttcggtcggaccgatggcggtttaatggccggttcatagaaaaactacccggttcaaccggttcaaagcgagtcacgtgcatgcccggtccggtttaatgttttgaatcgaacgacgaagatctctggttccggttttttccggttgaaccgccggtccggttttttccaatatgataacaagttgtagatatatggcacattattcatgtcacacggtactagatgggcccacttcttttttttatgagtactttcgctgttggggacttgggcatcaacctttctgggacaacttctacaacgtaaaacgaccactaaagtgggacggaaggagtagcacacacttgacttagggaggaaaggaggaagaaaatgcttttgatgaccgacatatcaccaactagtccagtccaaaatgcaatcttcggtaacaaagcatatgatccagcttctctccatgtgggctagagcaattagcagctaagcgctggtacaaatcgtacgtatagtgattttcaaagtgaaaatacgtacaactacctattccaatatgcaacataggtaacaaacactagcccaaggtgcaattcactctttcagaaatcctgatgtccaaataagctctcaagatcttttttttcttattataataaaaattaaaaagattaggtgtcccgttccaaataaaataactccgcaacgcataaacgtatcggttcggctcattttgggtcttttgtttcaaaccactcgaagttggaacaatattttcgagcccaccgaaaggcaatcgacgacatcgcaattcaacaacgcacaagggcagacaaacaacatcgaggaggtggacgacaactttaaatattgctcaataaaacactatctggagacaacacacacgagagtcatatccagaggaaaacaatcagcccagacggaccactagcaccaaatgcaaagcaatgggaagaactaattcgaccgctaccaccctagtaaaaaccagagaagagagaggaaggggggacaggaagaaaaacattctagtagaacaggagaagaatccatccatcatggtgacagcagcatgaggcatctaaatcgatggtctccaataacatgcggagccatcgatcgatcgatcttcccattttactggccctcgcaggcgtcgcccttggaggcttctttcacctcatcaccaccgtcctcctgccacagatagtttcacaaggtaaaattagcaagttgctcattaggtcgatggattttgcagaagggagcttatgatgtgttgagaggtaccgtgaggtcagaggtccagagggtcaagttgtccctcaggagctgcatgatcaaagtgctgtccttgtaagactcctccccgagggtatccaactcggagatggcttcgtcaaacgcctgtagcaaacggttcatcagtcacatttatttagagttgatatagcgacaaacgtccagatggcaaaaaagtcagggttcatacaacaagcacagacacatcaaggaccagcgattcaacaatgcataaaacaaaatagtttgttcagatttgacaaacctatatttatcatgcttacttttttgttggctttggccccattaaaataattaccacactatgagctatcactaggcaaatactaccacgtgcacaaatacaaatttaatcaacaataagcaggggaagaatatccaagttaaagcaggaaactatagagtttaatgaccagcaagttaacttcaaagtataaattcaaattaatatcatacaacatatcctaaagcacagaaacctcatactaatgacacaatcatgattatattgaagagaagagcaaatgaccaccaacctgcttagcaaggttgcaagccttgtctggagagtttagaatctcgtagtagaacacagagaagttaagtgccagtccaagccttatgggatgggtgggagcaagatccgccagagcaatatcctacatagaaaaacgtgggacagacaatttcagaaagcattgcctgaatcgactaagcagtcaatgaaatgcatttattaccagatggagacatgtactaattagttgctagagtaataaaatgagaagtgaatcagtggtatagcatatatgttatctcagaattaaaataaatcaacctacctgagcagccttgtaagccaccattgtgctctcagcagcttcctttctctcggcaccagtcttaaattccgcaaggtacctgcaaattataaactaaccaaattagaatagtcaatataaactaaggattcagttgtttttatgataagtgctgcatcattcccaacctgtggtaatcacccttcatcttgaggtaaaacaccttagattctgcagcagtagatgagggcacaaggtgtgagtcaagcaacttcaggataccatcgcaaatcttgctcagctcagcttcaatcttgccacggtactccttgatcagagtaacatgttcctcattgccacgaccctcctccttctgttcaatggatgagacaatacgccaggaggcacggcgggcaccaatcacattcttgtaagcaacagacaagaggttgcgctcctcaacagtgagctcttccacatctacagtctttgcaaccttctccatgtactcaaccatctcctcatacctttcagcctgctcggccagcttggccatgtagacattctcctcccgagacattttgaccaattaagggattactgtagccagataaaaaggtactgataagcattcaccaacattaataatctgaaagccatggggtctctccagaaggtataattgtacaaaacagatcatgttcccattcatatcaaggatgttcatttgttgagaaatgaataattaaacaattgtgaataatactactgaatcctacaaattccatcaaatatttaatactaactctttttaaaggctgtaacaaatgaataagccaatatcatgtccaaattcaaaatatttcataatctcaactaagttgtatttgtaatcactaaaaattgttcaatacagaaagaactaacagaaactcaattacagccttataatgagggatatatctaaacattgcagatcaataaatcataaacatggctaggctagatctaaacgtcgcatcaatccacccacgagacaaacactgattttccacaaaccaagaccacctacctcccaatccagataaaaaaattatcaccccaataccgagcaggcgtgcacctttcaccgctacatatatatagatccccacactattaacagattaaacctagatctaatccgtggatcaaacgcagctaataaccgataccatcaacatacttccacaataaataaataaataaataaataaataaataaataaataaataaatctgtctaacttttccaaatccccaacagacgtttgctcaactcagagatgataatccaaaaaaagcaaaaaacaaaaatccccacttctaaacgagacgaagctcgccaaaccgagcggatctactcccctcgcgtgcacgggatcgcagatctcacgaatccaatcccatccaaatcacccatcaccaccgagcacaccagatctagcccaaaaccacatcccacagtccagaacccaccaccccaaaaaaatcgccaaaaaaaaaaacatcgccgcacgccttcccgtgagatcgagcacgcctagaaatgcaaccgcgagaggaagaggaagagaaaaaattccggcaaccctaaccttcggtggcggcggcggcgaggcgggtcgggttcgagtggtctcgtggatgcgaatgctttttgttcggcggagaggaggggttgggaagacgggtgcttttatagcagggaggcttggcacgggagccaatggtgtggcgccacgtgtgcggcgagccaggctggacagcggatgacatgtgggggacgggtcgcgcctgggcccacgtgtcagtggggggtatagttggcgggtctggttggcctcggtgcgcgcggtcggtgggggatatacccttcctcctcctagctcgtgagatacgcgttttttcgtatgatgacatgtgggccctggagttggtggggccgacgtgtctgtgtgatgacctgataatgtgctgaaaaagaatgttttttttttagttttattttaggggctgatataagtggaagcgcaccatgggtgatgcaaattgcaaaatgacctgtgatctcaactcaaaaggggaaaaaataaacaactctggcaaaaaaacattataatgttcatggaatgggagttataaattaacaaattaacagttataaaatctattataataaataataattttataatgtttcctaagctgtattgcacggcatatagtaatggcttttgctgacttcagaattctgaccccccccccccccttcatctgttgtttcaaggtctagagaagaaaaggtcagagaaaagctgtttaccaaataccttttcttatttcctaaaaggattcttttgatgttgaactgcttagtggtctaaaagtcttcctacaaggaaaaatttgtcaccgagaacaagtggagattttgcatctatatatattttttataattctaagtcttaaatgtattgtattagctatctaaaacctgggacggacctagagcaaggaaataatgtacagttgtacttccaaaatttttgacaaacaatatgtgatttaataggtagaagtataatagtacatgtatataccattaggtgggtcaataagagcattgttaagcccaaattcatcctttccagaattttatagtttgcctcgtaccaaccaccccagctagaaaaccaaaatgaacttgtgaacctaaaaaatcataaatgtggcttggtgaattatgggcattgtctagctggcatgcgtttaaactagacaggacaaatatggacagtttgattttctgacagaaaaaaacagaggcctctcgtctttctgacgatccttaaaaaaagttacaatgaaaaatagaaacaggagacgtgcctaaacaaattatttcacccgtacatgttcttgtcaaagaaaacactaaaatccctcatatccaagttgcagccattgcccattgctgtcaatcttctctttcaaactccttacgtgtccctgtccagagacaggcacagcacagtcagctcgaaaatatcaggttagtttccatcttaatggcagaaaaggatgccatttccaccgaagcaaatctggaaagcaatgtgtatgatgcaaatccagaattgacacgtaattgacagcatccatacggcaagatctcagataagcatcgagactcatgtcatatgcagcattgaaatcaaatggaaaataattcttgcatgaggctacagggcacacacacaaagacaatggctggtggcaacagactaactaccctgaattaacatgcacagaagaatcaactctcttaaccggtcaactagcaagaggatacatatgctgttggcacaagaacagaaatcttctcggactactgaatttatttcaaataattgcttgtactacagcttaaacttatcagttctggcttaaacttagcagtagtaacatacagctgaatcattggggaaaggaagccagccaagaaacaggaccagctgacctccatatcagaagaatcacaagcattttagcgcagccataaatgtggagatctgttcagaagtcagatgatactgcaaaccccgctgagctgcagacagtacagaagatgtgggaggccataaacatcaataacgcttccagcatttacatgagaaaaaacaaaaggctctaatgacaacgttcaagcagagaaacaggatacacagctattcctcatttccagtgatccttttctttagagcatcaaagccattggccagttcttcccggttttcctgccagaaacaatacaggctgtaagggaaacaaacatttgagtacaactaaaacatgaagtagatctgggtcatactcagacaaataaaaaaggcacagccacgtatttatctacgtgcgacagtaagttgcaccaaatcatatttgacattcaaatggtaagtagtaggagtataacttttctctaggataaaaacaaacggaattgacttgggatggagctgtgatagacatggcaaagctaggtatgtcaggcatggacaattgtcaattggaccgacgtgatctgtactactgaccccatcaataccaagttgtgcatcctccacggttcaaccaacagccttttaggtttgcacagctaagttaaatggacaagactcaagaaactcgtgctgaatagctcaaaagcagcttcactgacagcccacatgattcaagattaccttgaagagcaggtagcggtacacaaaccatcccgagtagccaagcccaactagctccagtatgttcggaagctacatgaaggaagagtagttagataaacaagtgacaccatgactaggacagcattttgcagcagctacaagtaaatgggggaatagcaatataagctgggcatataccactggaactgaatcgacagctttgacaacaatcgaggatagccagacagcgatgattgctccgcctccgtaaaagagaacagaggacttgttctcaatagcatcccactgtgttgtggtcatagcaatcataagattactgactcagtgaaatacattgtgttctcccaagtgaacataccttctctttgagctcagaaaggatctcatcgtcctcatcagaactactctcttctgaagatcgcatggcttgtacctggagtagagcgatcttcggggaatctgctaaaatttgatttcttagtgtacttgtacactttctcagccacatagtttggagggtggccatcaaacagatgccgcaatattgctaaacaactttgccaaacaagtcacaatcattgtatagatcttctacccttgtatactaagtgaaacgtatgccttctttttctctccttgagaaacaggcttctcaatctttttattgaaaaggccaagttttttaaagaactaaaagaaaacacatgattctttaaattgtatttatattttgtccctacagattcagccgatgagatacttttagaacgtggtttggtagcttgagtttttgaattgtccacaacataaacaacacagatacactgactgtaaatagaaagagctaattacaatcaccacttgttcatcagtctgaaaatatgatgtggtggctctcaatgaaagtaatataagcattttgatatgcacttgatagtgcagtggcaagggatcccatatacagggtttcaactttcaaccctgaggtcccatgttcaatcctcaacacgcttacaatttcttcttaaaaaatgtttggagagacaactctccctccaaatcttttttttttttgtaatacaagcattttgtcaagcattgacaattctctcttgtcagaaatacttaaacaggtagcagtgatttcataccctgaacataggaaatcaatgataaatcacactagcccaaaactaggacgttcttggatgagagcacttctttgaaaatttatagagcagaaaagaaatatgtggtaaccaaaactattaagtaatttttcgccgggtaaaaactattaagtaattgggttgggtgcactcaggtcagtgagaggttttctcatatgttgttgcttaacttgtacattaattcttgatctctacagtgaagcgcaaaggattacatgtgcaaagtgatttttgcagtattttactgtaaagagtactggtggttagcagcaaatacacttccaacattagagctatcatcagtatatatgctttgcccttagtgttcggcaacatgtcaacataatactagacattcaggttaccctgaagtcttctgtgaacaacttgccctcccactttgtagagtaatactcagcttaacaaggatcagaagcaagaacttcaatgtgggtggttactcacttactctacaccaatcacaaccaaatgctgcattctactagccagccaaggcgattctaatatcgagtcccaaaatggagctcaaccgttgttgatccagttttatgcttgcactccagtatccaattttttctaatcccctttcctaagaacgatttgacctcgtgtgtgtcgatctgggatccaaagcatatggcgagaagtggttaccttcgcagcgaagggagggcgtcgtcttcacgcggggagtgagccggcggcggcgcataggagctcgggggacagcaatcggacggcaaagagacgccggcggcgccgcggcggcgaccatcccggccatctcggcaaccgccactacctaccctaccttcagtggatgcaggcgtcagcgtcacggatcgagcaaacgctgcgagagggttgagaagcgcgctgctggaagctgcgggaaggaagaacgcataccgcacggaggtggggtggcggcgacggcgtcgccggcgaggtcgctccggcgagaatggctctcgctggcacgcgcggtgtgaacaaagcaaactcgataagcgccgtccgatcggagtttggcggcccagatcgaccaagggcaagaggtggtaggtgtagggtagggactagggagtagggaggatttgtggctgaccgttgcgcccccaatttccaatccaaatttctcaacccctcagggtcaaaaatttaagattattttttgtttgaatttcgtcatccagatcccgtagctctaaaatctaaaccgaccagtttctgttgaatgtagttcaattgggctgtgtctagtttcacgccaaaattgaaagtttaaaaaaaaagttacaagtttatatttgtagaaaagtttagatgtgatagaaaagttagaagtttaaagaaaaagttaggaactaaacaaggccttggtcaaatttcacaaggtcacgtgaaattcatcatctcattctaacttgcatctcgaccaaaaaaaaaaaacgagattgcaagccttgctcctaaaaacattgattaaataatattaagacagtttagatgtacagtgcatacaactttcaaaccttaataattaactttgcgggaggataaaaaataatatttaaaaataagtttgggaggaaagaagaaaggaacagattacgtcacaaaagttgtcatttctcaacttttgtttttccttccctagggtaatgaattcacttggaaatcattcatagcgagaagatgagatggccatgcttatttatctcagcagaaagaaaaatcccgattcttttattcctccttgtttattcatcactcagctcatacatctcagagatcattttaacattagccttgtcttattgcacgaaaagtactcggtagtattatctgtaccagctccgggatttggctttaaaaaaccaagaggcgatcgattactcgtctgcctccgtccatgtcgcgatggccagcgtgtgcctcccgccgcaggcgacgtacctcgcctgccattgcccgccggagtcgccgccgctggttcccggcggcggcaggtcgatggggacttccatcgggtggcccgtcgtgaccttcctgccgtagcccagacggccatggtcacctctaccgtactgcgagaacagaaggggaatacaatgtaaacacattataagtgattccctggagatcaaattttgttctttttagataacaaatcagaatggattccctgtttaagcaaaacctgtggttgttcagggattacaggcttacagccaggcatggttaaagaggaatgctgtttttaaaagttttactgagattcaagtatccaaaaacacctatcagtacttctctggtgaaaaaaataatctctctaaaatatgcaagtgatctgtattaatggagaaatgtggtgtcctcgtcgccagcatttcatagactagaactttgggtatgttctcaagggtgagcagaaaaaaatgttgcatagctgctcggcaacattgactatcaaactgcaaaaggttgtttcatgatacgatactccaaagcacagaggcataattgagtgattatggacttgcgagtgcttatagcagttctaatcagccattattttggttcactcaaatttgtttgaaatttgaaatatttgtctattttcatttgcataatttacaggtggtattacactcaaatggggtcaagatgacaggaatatgcactcttggtacaaagtaactagtagctggagagaaaaacacttacagaaaacattcgtccatcacgagttagcgcaactgaatgggttcctccacatgatacctgcacgcaagaaaatgagtactggtgctcaacttggacaaaaaaaaatccattacctcaggcacagcataggagaattacctgaataatatcctctccagcaagaagctcaaccttttggggaaccatgtgactacttttatcatctccaaatccaagcctcccatgctctcctctcccccaagcatacacctatagaggtccagaaagtgaacagctattaatcccttgtgcacaaagcaatgtttatttgccatccttctggtggcttggcagaaataagctcaaacatgatgtttcagttaaagccaaaggaaggaaatacctctccctctttagttaatgcagttgaatgccaacctccagcagcaatgtcaacctgcaaacaaatgtacaaatgagcaatatgtatgaaactataaacaagaaggtaagatacaaaggcatgatccagaaaattgtgcagacgaatatttatttatcagcatacagtggtagcctataatcagcacaaagttatatgtatagctagaatcaaacatactagtgtaaatggttaggagtggaggtactgaacaccatggcttgtgagatgaaccgagcacaactgaagtgactgtaagcaaacatagtttaacgcaggatccaaaagactaggttctgttttgggctttgttagtaatgtcttgagaagacaaccaccctgttataaactttatttcacaagttatcagaattagaagaaaccaaatcagtgtggctcaccaatgaaaggtcagataatccttcaacacggattggttgcgatcttggttgagtatctccagtgcccagttgaccatactcattgttaccccatgcccacaaaattccatcttctgttagagccaaattatggaatgcacctacagcaatcacctttacattctcaaggccttgcacccgcactggtgtagatatttgcttgctgaaaaaggactaatggtcaccagcacatatagggagaaaaacaaatttcagcataaagcaataaggcactatacatatcgcctggaggccatggttgtccccatgtccaaacatggccatcttgtgtcaagacgaccgagtgtgtccctccagcagcaacctacaattaacgggaacgattagaaaacccatgctaagaaataaaaggtggaagtgcatgacaaaatattatcattatggaaaagtggagtgcacgacaaaatgttatagcattattctgttacgataaaaatccatttcgggagtgcatgacaaaacattatagcattattctgttacgataaaaatccattttgggagtgcatgacaaaacattatagcattattctgttacaataacaaaccattttgggagtgcatgacaaaacgttacagcattattatgtgacaataaccattcattttggatataatacgttatcacagttgcaaaacatatatcctggcgacccttcaagcgatttacgacctaagaaatgtgttccacaacctaacacttgttgggcaagtagcagatgccaaggtgatagtgcacaatttgttggattcccattatccggttatcccctacaaccatgctgcatcaacaaagacgtgataaaattccagcattctcatggggacaaattgtaggacaagtcaggaatcgattccactcacttgccggactttcagcttgggggcacacccctgcgggatcggaatgtccctcctgagagccctggttccatcttccttcctctcagcctcctccccacactgcccatactcgttgccccctgcaacaacccatccacacgctcacattgcatcaaatccaaccaaatcgggtcacagaattgacagaaaaccaagcaaggcgagccgagctccccgtccccgtaccccaagcgtatgctctccccttgtcgtccaccgcgaggcaatgccatccgccgatcgccgcctggtaattagcaggacacacactcgcattcgttagtgctcactactactgcaggtagctcaaatcgcgattggaagaggaatgatctgcggtgacctgcacgatgctgacgccggcgagggcatcgacgggggccggggagctctccgtcttggtctccggcgggtgcccgagcgtgccgcgctggttccacccccacgtgaagagctgcagcagagcagtacacgatcgaatcagatcagaaacccagcgaaggcctcgatcgagagatggagggagagagagggagagagcgtacgcggccatcggcgcagatggcgagggagttgcggctgccggcgacgacggcggagacggcgagcgcgtcgagcgcggcgactccccgcgcccagtcctcctcctcgtagccgcccatgcccagctgcccgtcctcccccgaacccctacacacaaaacacagagagagagagagaaggcgccatcagcgccgccgccggccgcgggagcgaagcagcaggtcggagcactccactcaccatgcgaggacggccgtggggagggaggaagccggtgggggcgccatgggtgggagaggagaggaggccgccgagcaggggcgcgcggaggcggaggaggtgcgggttttcgtgcgccgcgcacggcggaagaaacagtgtgtgcttccctcgtgtccgagcccgagcaccgagagcgagagagggaggagggggctatctttcggggcgcgtgtccgccgtggcgtgggttttctccctttctctctctgtgcgccgcggtcggcggtagggtttttggggtttgggtggcccaccaaacgtgaggtggattccatttccatccacacccccttggtgactctgactcacccccggccaaatcagtccatttgagcgaggataataatgctcctattgtttcaatcagtcgctgctaaaatttgaattttcaaactcaaatttaaagttgattttcattcaaatttattttttagcattggtatttaaatcgctaaaaacacacacacataagtcttgcatataaattattattgctttcctaatacgtattggctaaacgacgggggtctaagctaactataaacttatatgaaaaaaaagataaagaaaaataagaagtattggttataatgcaagagctagttaaaaacgagattttgagggacatatgtccctctaaatattttttttaaaaaaatatgagtgttctagggattaaacacggaaactcgaagttgaaatcacacacccctgccactgcactaccaagtatatctcaatgcaagagttagttatatacatgtttgttcaagatatttacattaaatttatagtgggagaaaaggagtggagaaaaaaatatagtcaattgttaacatattatacatgttagttgcaatataggctaaggttgtgttcttcccctaccttttccagtgtacctttctcgttttccacgcttcctaaattactaaacggtgtgtattttgaaaaaaaaatatagaaaagttgcctttaaaaaattatattaatctctttttcaagtttattttaactaatacttaataaatcaagcactagctgccgctccattttgcttgttgcgagtgaggttcccgaattcagtctaatagtcaatatttagctttactattaaacttgttgttagagagaggattagtgggggacacggatgcttgctataggtataaagcgtgtgtgtttttttagggaagcatgtgtttatattaggaagtgtattattgcggtgccgtgattaatggttggatgttttatgatgtatgggtggaaattaagtcgagaaaaaaaatggtgtttgctgcgtaatgattaaggccatgtttgtttcattctaagattattataatctagattactgagccaaatgaatgtaagctgaattataatatgccgatatataataagttgtgagctgtttgtttctctggattataagctgtttgttaaatgttagccacccaataattttaaaaaaacacctttagcgtggattactggattatagtaatctggcttatagattgtaataatctatcataatatgctatatgtttgtttcagcttattcctaataatccaaattataataatcataagctgaatcaaacagggcctaaactcatgtgccacgatggtaaaagacggtatggttgggtttagttcgcaatttttttcccaaaaatatcacatcgaatctttggacacatgcatggaacattaaatgtagataaaaacaaaaaactaattgcacagtttgcatggaaatcgcgagatgaatcttttgagtctaattagtccatgattagccataagtgctacagtaatccatatgtgctaatgacggcttaattaggctcaaaagattcgtctcgcggtttccaggcgagttatgaaattagttttttcattcgtgtccgaaaactccttgcgacatccaatcaaacgttcgatgtgatacccaaaattttttttttcgcgaactaaacggcctatgttggttttatgttggtatcgaagtgattgtatgagaatgtccccttttatatggtcatccatccttttcttaacacggtcaccaatgctgacattttatacatagaaaagggtatattgttttaaggagaaaatgagaaatgagactaaaccttggatgaggaactagggtttcgatcttccaataggtattgataaagtcgattatggatactcaacgatgatctaaaggctctgatcaggacgatcgaatccctcctaatcactaaaccactcttcgattggttatcaaccgagccgaaatattactgacctcctcgataagactatctcttacaagcaaatcgagaatacaagcaagtgagtggaagaagcaatctgaaaaatttatgaatataagacgaatctcacaagttggatttcacaaaccgaagcagcgtgaaactgcaatgccataataatataagcaaatctaaccataattcggagacaactactaaataaataagttatatagtcgaccaagaagccctggacgagtctctaatggactccaacacgatacacaacatgttaagacggtgacgtgacactcgtatagattctatatgctctcttgtttcgacgattcatgttgacttagaaggaattttgatgtgagacaaggctcattcgaaagttggtctcattatctttccatacataatggaatccgaatgagatctgggtgacgattttagtgcgggttgctcttggattctgaggtgggcttgaacttgatatgaattaggcctctatttttcaagtctcttttcaagtgcttcttgtttctcctttgtacgtaccgaaagagtgatgttctcatcaatcttaataggaaaaaactggacgaaaatcataactagaacaaactcacaactaacctaaactattgtgccacggaaatagaaatagtcaggttcactaagcaaatgatgttcatcaccaaatttgcaaaattagcgagctaggagatcaaactatagtcatcgattagtagataccaacggtgatacaagctctcctaattcatgtcgttgtgttatctatctccaatcaattttcatggaaataaaatggataagaatcataccattgcaaaattcctacgctctacgcaaatctcgtgtcatataggtactccttccattccaaaataaattatcctaatatgaaatgcgatgatttctaatataacgaatgtatccagattcatcgtaataggataccacatctcgtattcgatcatcgatggcagcagcatcatgtcatatgctacgaaatatattttggttgcattcgttgatggaagagaaatgccactaaaaggggagagagaaaaaaaaggaaagcacgaattttgcacagctaaatgggccagcccgaaaccgtttatactgggccgcaacgtctagagtgcggcccacgaaaaggatggccacactggctcgcctcaaggaagcccggccgcggagagcatcgcgtcccaccccccaccgccgcggcggcgatggccgccgccgccgccgccaccgcgcgctcctcggtggcgccgcacgcatcgcccacccttcgccgctcgggctcatcaggtaccttgccccccccccctctcccacctcatcacgacatcaccctcatcactgtttcatagttatatgatttggggatccccacagatccggctgcctgtttggcggcgagatttttctagctccaagagagaatgccagccacgaatcgtgcgtgatccgcccgccgccttctgtgccgtgcggttgcataaactagtatactgatgatgatgatgatgatgatgatgatgatgatgatgatgcggcactttcgggcttagtggggtgttgcgatgcaaaaaaaggcagttctgtcggcttggcaactttgcgtggcgagattagtaaatcaagggcatgtttttttttgtttcgatcatctagcctttttaggtagtggagaagctatgtctcggtgtttatggaatttcctaaaaccgatgctacagctttgcagcatgctggatggtgggcgttgtgatgcaaaaacgattccgttggcttggaaattggaatagtgaaattaactgagtaactgatgagcaaggcatgtctgtttctgatcataagctttttagatagagaaaaatacaggttgggatttttgagatgaagatcttcttggaccgatgttagcgcttcggaacatgctgttaagacgagctctgaagaaattagagtccattgatgagtcctatttagtgtgagttacctttcgtaacttccctcttttaaacactgaggtgatgcctgtggtcaggctcttattttgagctgttttctgggcaattagaaagcccaagcattgatgataagattgatacatgaggctatttgatattaaatgccatctgagcacttgagcagtagctgaacaagatgtgattttgtcgagggaatatgtagtgaatccaactgaccattagaccagaactctgaagtacttttgggtacttaaaatttaagaaaaataaacaaaagctggaaatcatctggtagtaatactcctgaagcatgttctgcatttttccgagctttgtcatagctgctaagagttatatcctctcgataacttatcttgcatgaggcacaaaatgtgcttgaaatgattcgcgtatccatcgttctttccctttcatagctttagtcatatcagatttggtattgcaacaattaaaccttctcaaggattggatgatgatggagagtgtggtcgatgaccaagataaggagcaaagaaaacaagccaggtctggagagaaaaaatgtagggtagagaaatgttgtaatttatatattagacctgaatttttcacctgtcgacatttttcatgttcattcaagctactgtcatagtttgtttggattctgcatcaacaaatatctctacagctttttgatgcatccataaatatcgccagtctcctcttaagtgatgctttcactttgatatggccacataggatagctctatatgagaaatattggggatttaaaacttttaatatacagaagtgattagttcatgctaatccttctatttcagttcaatcgtggactgttgtcagtagagaaaataaccaggattgccccttctgtttacgacttcacagcattctaaataggttcaggcgacagacaggtgcaatagacagcgacaactaaacagaagcctaccagtcttctcttatccttacgaccttacaagtcatggccggtaattatgatttatggaggtgattattcatgattactcataagggaatagaaaaataaaatcacatgggtcatagcatttatctggtggaaaattgactgcattcttgttagtacaagtagagacttgaccaactattcatcatgtattttggctgtttcagtggatcgctgcacttcctgagagttcttttaaagatattaccgtctctctcaacgcttaccggaattgcagattcgatctatttgcttcgactgcaaaagcaggtatgtgaaccttatccccaagatatagaagttagcaatggcataagttcctctctctttgttatcaaaaacatgtcattcttttggagtacatgcatatcaagatattgaaacctaaatcatttatcaggctagagctgcggctgggtgcatcccatccactcatttttcagtggccatgctagcctgctagggatcacattgggaagggaaacaatcaaataatccgcggtggtctcagctcagctgcatgtgtggaggacaagcaaatcgccaataacacaccacatggggcaacatcgcgcagacatggcatggaccctgcttgccatctacccctcaccgtttcaatgcaccagagttacagcggcagcaaggaggcccccccattgcaattgaaatggccacatgtggagactgccatatgtttccatcagagatgatctctcagttacagtaagacacatccaatttcgacttgttaccctgatgaaggaacaagaagaagagaaagaagtgagtgtggcagacagagacagcagcaacccgggcagacagctccacgcacatttcacacaaaagtccacactccaaacagctccgtgtgcagcagcagcaagcagcaggccagcagcttccttggtcagatttttccatctcgtccaattccatcgcgttcagtttactgaactttcgactgctacttcggttcaggctttgtttcgacgccctatcggacctttgactgacgtgcttgcttgttaggtcgttcagaacactgcaactactgtatcgtcacgtcgggttttcgcttcgcttgcacctcagctaagaatgatcatagcttcatctgtagttacctaaattaccgaactgtaaatttcatgagattgcaggttcttcgacagtaaaattatcaaatttgtacggttggaaggattttcagttaattaacttataatgttacgcacgaaattttcactgagcattgacggtgctggctcacatgctatctgacaaggtggtcctgctatcaatttgctataaagttacaactaatgtcatgtcgtcatgtgttagcattgttattcttttcgcattttgcttgtatgttcatcctcgattggtgctcaaagccaatcaagcagttcaaagttacaataagggctcctctgaatgcaaggataggagaaacataggattgacagaaatataagtgtaaaataaaaggctacaaatcacaaaaaaggaaaaacaaagatagcgcttggttagatggcatgaaaatgcaggattttgaggagagatcaaaatgaaactacccatgaggttggacctcaatattaaatttcctcaaaacctgcgtggattgaatcatttcatatatatttcataattctatattgtccagcctttgtttctaaggatcatttagaaaaaaaaatatagaacaaaaatcctacaaaatttctatgttcatagttcaaatgaaaggggtttacgggtattttctcaagggtactaggcaaggactaggtattttctctactaagctttttttctcatgtctatttgagatctcctattatatgtgttcaataagggattttttttttactcttagccatcctccctaacaacgtgttctcaaatgccatccttccaaacaactttaattatttaccatccgggcccactaggctattgctattttgccacttttgattggtagctcagcaaaccgggtgacaaaagacttcctagccccttatctcctttttcataccttcttccttggcagtccttcccctttcctcatgtcagcgagttggcctaattctagcaaggtcctgcaagctggcgatggaggtgagctcggagacatagtcggtcgggcttcgcggacccaccgggatagggaggatgttgttgttgctggtggttcaccacccaccccgtcccaacaagctccttgtcgatggaggcgacgataaccgacgagcttagatacacggctggtagggcttcacggtgccgccgggatggggaggtggatgttgctgtcagtccactaatgagctctctctatctctctctctctctctctctctctcgctcgtccgagcatgacaatgaaggaggcgtggatgtcgggaagtctctagcaatccaaacctccatccgtcgcctctaaggtcttccacccagtcatccatcgccgctgtctctgtcgatggttgccacccgtaggatccaacatggtggccggccttgcatcccagctccacaaaggggaatggtggcgacgacgatatgacgggggaggagtggagggagaagaacgggtacagttcgtaggcgggaagctcgccggtgtgtaagaccttgccggagccaaggcagctcgcgaaccaaaggaagtgagttggaagaaagataggagagatgagataatgggtgaggtcttttgttacccagtttgctaagttagcaattaaaagtgacaaaatagcaatagtctagtgggcccagatggcaaataatcaaggttatttggaaagatggtatttgagaatactccattgggaaggatggcaaagagtcagaagccctgtttaacgagcacaatatcgactattagtagcaaatacttcctccgtatcattttaagtgtagctgtggttgccgtgtccaatgtatgagtgctcgtcttatttgaaaattttatgaaaaattaaaaacaaataatttgcgcataaagtattgatcatgttttattatctaataacaataagaatactaatcataaaaaataaaataagatggacagtcaaacattatatacgaaaatccataactgcacttaaaatgggacggaggaagtagtgaggtcgtcagtttccaattacgtgcaaaccataaatatggtgtgcagtggcaactgagccagttcatatctgttcatggttctttctattaggagggaagaggtacatatacacatttttttttagcacgcccatttttctaacctaccatagagttgtaaacctcatctcatctagaacatcacaaaaaattttaaagcattgctctagaggtacaaaatgaagctacttcttcacattcccaatcctcacaatcaaccgtaatcattctccatttaactttttcatctacttttccttctcaatcaatcataatatttctccaatcgtttttacttgctttcttaatactcattcctacttaaaaatgcttaaataggatgaaggtactcctagcctcctagatattgtaaacttaaataggatagaggtattcctagcctcctactagtagatattgtaccttgttaacttcgttcgacactcgtttaattgctaaacaatgcttactgaaaacattaaaactccacacatcagtttactaagaaacgtcgccaccaagctcgatcaatgacggcgaccggacaggctgaaaaattgaaaatacggttaactggtaccgatacatccatgtgcatgtggtctcattctttgctctagcaacccaaaaagaattcatggataaggatttgtattcatatttttgtgatccaaaaactgatacggataaataactgtgataagaaaaagcttaaaatttattcaaatgtttaaatcctagataatatggataagccaaaaagttaaatagggtaggcatgtcttcaaatacttctaccagtacataggagtagcaggagtaggagtaggagtacattctagactgcgaggaatacaaaacgtcacgtgtggttaatccctcctaaccatgtcaacgcgaggagagccgggtcagcccaaccaaccaacccaacccaccaccgccttcaccctcacccacaccacccacacgccccccgccgctacgcaaccttacgcctatggcagctggggcccacgtatccgcgggaccaccatgtcagtgaccgggggtcatgggtactccagcttcgtgcggcagcgcgcacgaaggcgtggggtgtggtggtgggcccggctcctggtaggtgagctggatccagcgcggcggggcgggggcggaggcggcatcgggatcggcgatgattacacagatgaatgcgacgctattggatttgctagtttcgaaatgtttgattttttcttatttaaaaaatttaggtaattattaattattttcatatcatttgatttattgttaaatatatttttatgtaggcatacaattttacatatttcataaaagtttttgaataagacgaacggttaaacatgtgctaaaaagtcaacggtgtcgaacatttcgaaacggagggagaacgttttttttttgagagagattttgggcgcggggcatatgtggtattgctcgtggcaagaacagaggggggtttgggttccgagggataggggggcacagagcttgtgagcgcaggggatgggggatgagaaatgggagtatcgtgcacgagcactactactgccgccgcggccgttgtgatgatccgatgacgtcgtcggccactgttcatgtatttcctctatctatatattttaaatatattttaatgtatgatgccgttgactttttatccaacgtgtaaccattcgtcttattaaaaaattgatgtaactatcatttattttattgtgacttaattcatcatcagatattttttaagcatgacataaatattcccatatttacacaaaaattttgaataaaatgaatggtcaaacgttgataaaaagttaacagcgtcatacattaaaatacagagggagtacttagtacctccgccctaaaataaggctgtgtttagataaaagggttgtaaaattttatagtgttgtatcggatatttggaaatatatttaaagtattaaacgtaatctgataataaaacaaattatataatccacctgtaaaccgtgagatgaatttattaagcctaattaattcatcattagcaaatatttactgtagcactacattatcaaatcatgacgcaactaggcttaaaaaattcatctcggaatttacacacaatctgtgtaacatatatatatatatatatatatatatatacacccctccctcctgtcgcccctctctccctcctccctcccccagcgccccctccctccgattccccctccttttttctctccctccttcttctctcttttttagaaaaattaaaaataaattggtgaattcaagacttgaaccaatgatctcatggtttatgacaagcacttctaaccaaatcaccatatgatgatttgtgaacaaatcagttatgtacctataacaatcataccttgttactatgattcggcagtaacattatcccagaaatatagtaacatcatatgttactggaaaaatgtataggttgttactgcacttttggcagtaacaatatgacgaaatttatagtaaacagagaacatgcatagtaacagtggccctatagtagtaatgtttttttagatctagagtattttaaatctcaatatttagagagtactaacatacacgttatgtcttatttttctaacccatttgcatcatggcattcgtcaaaaaaagtgcttaacgaaactagaaccatcataactattttttaacattgttacagcgaaaagcagaggtgttactgcatattggccatcatgttactacgctgtttcagtgagatgaggactaaaaaaaggtaaatctcaatctttagagagcaatatctctcacatcatatcttgtattttcaatccgtttgcaccatgaagttcataaaaaaacgcttaacgaaacaagatccatcatagctactttttgacgttgttactgcgataatgtggtcttgttactgcacgatgaccatcctattactgcacgattcctgcaagacgagagcagcaaagtggtgggcgggggagggagtggtgggcgggtttgaccggtgggaggacgctttgaccgacgtgggaggggggctttgggccctaggaagggtggggggaggtgggtttgacccatgggaggggggtgtagaatagattttatatatatatatatatatatataatacttcgtgcatgtatccaaacattcgatgggatatggtgtaaaattttgctaggggatctaaacaggccttaaagcaacttactccctccattaaaaaacaacttataagtagatgatgatttgacaccacctaaaataatgaatccaagtttattatcctaggttgatttttcttaatgcagagattaaaaggtagtacctcatccacccgaaaatgtaaacattttttaggttggcacgggtattaactaaggaagtatgtgagaatgattgaagggaatatgtgattagttaaaaagaaaaagtaggtaaaggataatggttgtgattggttgagagtaggagatagatgaagaaatagcttcattttgggacaaagtactatgctagaaataactacatattaggatgaagatagtactacgaatttgaacctcttattccctccgtactcgtaaaggaaatcgttcgatatggtctccaaaatataactttgactacttgtttctataaaaatatttattaaaaagtaatatatgtatacttttatgaaaatatttttcaagacaaatctattcatataattacatcttcaaactcaacaacttgatagttattcataatttatattcccaaagtttgacttaaacattgtcctaaacgacttccttcctgtacgagtacggagggagtactgttaaactcattgttagcaccgtacctctaatactccttgttaacagttctatgcatgtgttacacattcaggtgttaaaaacaacaacagtcctaagacacataccatggacgattcttttgagatcaagctagtaaagctttcgcctgcagattaacgtggaacaagggtaaatatatgaggcaaataatatgactggcatccatgcaaacgcttccttatcattaaaaaaacaattaattggctctaaaaaagttactacaagcttcaaaaagaaatagtataaaataaaacatagtactccagagatgttttatctaaaagaaagatctttgcattatcagagatgttttatctaaaacaacatcagatatgtcgctgtggctcgatggttatacagagaaattcgttgactaaattagcagttctttttctaagtctgacggcgcttaagcggatagaattgatagttccttcgttaccaactgatgtactttgacacatttgatttcactattcgtattttttctacctcctccatttaaaaattactttacacgtcttaaaatactgtaatctatatcttatgtccggttttataatattaaaacggaggtattttagataactccctctatttcaatttcgtatattattttattcgttgcaaggctaatttgttttggaggaataaatttgtattttgtcatataagattaatgatgaaaaatagtactccctcatttttcaaattataattcgtttgactttcttcctagttaaacttctttaagttttatttttttatagaaaaatatagtagtattttcaacacaaaactaatttgagatttaatgaaactaatttgatattttagatgttgctaatttttttataaactttcaaatttaacaaagtttaattaggaaaaaagttaaacaacttataatataatatgaaacggaggaactactagccaagtttgcatggttgaatcaacattttgattattttacagggcatcttgaactgctaacaacgatacgaaaactttaaacatacactattatttttagttgcattttttatttttccatgccttattagccgtagctcaaatgacatgtgtgtcgacgtttaatgtctcgactacggtatttgcatggcatgggaatcgttggtactagggtatacgtgagactgaggtaaaagagatggagacaatgatttttatacaggttcgggcccctgaattgtcaggtaataaccctacatcctgttggccgaagccgatattgctcttattcatgataatcacaccagtataatatttggggtagcctatctaactgttgtcgacttggcggtctgaagttctgactcgtagtcgacaacagggtagccttcctcctcgaatccgtgcccggcgagatcagagatagcgctttcgtctctcctgacagtatccggagacaccgtagggtactagccgtgcttatccctgaagtcgatatccggtggcgtgtcttggcgtatgtaggcttctatattgtggcttctatgtcgattgtgttgggtgttgatcctgtcccctctcttcctaggggggcttgtatttatacccataggtgtccccttgtccaagtagaactagggaaaccaatatagatacaatccgagtagtcattgtcgtttccatgtagaactctggttgtctttccttatccggaactcctcctatatccgaacgttgcttccgtataggacatggtacgtagtgggtcctaccgagatttagtcaactactattaggtatgtggtatccataaccctgacagtagcctccgacttcaatgcaaatgaacgagttcatattctcaaccgcagaccttggaggaactgttatcgagcgcacatgaccattctcggtgagtgtagagataacattagacttcctttatcagcctcgtgtgggtacctaaagggttagtctgagtcaatctccgacgtcaaccaagaaagaacagagcatgcgactaagtctcccgtcttgctgtaatcgagaatttggattgaagtcaagaaattttatctcggtgggtacaccatctcttcatttcgtattccttgttgagatacatcaaccgttctcgagtgatcgagaaagcgcagaatctgcgacggagctttgtcgacatttgtcgtactcgccttagtcgatcttggtgtagaaccatagagacatggagccttcgtcaatgtcgaatagaattttcctgaaatcaatactctgaaaagaatattagatagaaatagccctcgagcgaacgctcaaagggtaacatgttataatataacagactagtgaattgaatgtacagaccagtgttttgtatatgagcgtcttctctcttaccgactccgaccagtcagtttgtagagtcatacactctccctagcccccagccttgtcgtcggagaatcgttctcggatgatgaggctcttggacctttgacctgcctcggttgaacaagcactgatcctagcccccagccgtgaagttgaaaaatccaatttccgattacacggcttggttaatacgcacggcgagaactcttacacgaccagatcttacatggtcttttgtctttaaaggatccgataaggccttatcggctctgggcgtccccagccgaagttcccttaggttcctcggaggccttgtcaagacggcgtaaagggacattaggataggtttcaacgctaggtgtcttctgtggtaagggatctctgggtaaaacacttggcaatattgtgtacatgatatcaactttgttgaagtagaggtaatgggagaatcgctacacctctggtcaagaaccaggtagtagtcgtaactcaaccactagaagtaaatgtacgagagatcgctacgattgactggttgagaaccagtgagtaggtgtctctcgatcatttgaagtcgtggaagtttgcggtgcgggagattgctatgtactggttcgagaaccagcgagcgagtagaatcatctctcgaacaccaatggaagttgcggtgcgggagattgctacgtactggttcgagaaccagcgaacgagtagaattatctctcgaacatcgatggaagttgcggtgcgagagattgctacatactggttcgagaaccagcgagcaagtagaattatctctcgaacaccaatggaagttgcggtgcgagagagtgctacgtactggttcgaggaccagcgaacgagtagaattatctctcgaataccaatggaagttgcggtgcgagagattgctacgtattggttcgagaaccagcaagcgagtagaattatctctcgaacaccaatggaggtgctagagttggtttattgcatgtgcgtctcatatggctagcatgactcacgcacccaacttgtagcatatccggatgtccgttcgcaatcatgtcgggtgatcaagccgacgatgttcgcgaggaattatccgttaacaaccttttctcaagtagtccagcgattgctgtgttaacaaccaaatttggtaatatcagcatcggaagtgaagatgggatcgaagtggagtcggagataaggattgttgtgggaacatagtaaggatcggctggagtccagatcggctacgactataatcggctaagtctgaatcagactgggttaggtgatacagccgattccgacgatacgacttgtatccgatattgggtttgagttgacgtgcttcaagatgattgtcatatatggatggagtcctgagaaggcaattgtatctattaattaggatgttttgtgtaatttccttagagatatgtttagggcaaaagtctgccgcaaagacttatggtatcttagagtttgttagagataatagtcgtgtctggtatggacatatcttgtaattctcgggtataaatagaccccaagccctatgtaaattttaacacacacgttcaatacaatttcggcgcatcgccacctttttgctttagttttatttcgacgagttcttgctttcgggttgagctgcatcggtttcgatcttcaacaagaggtaaaacttgttatgatggattgtgttctcgggattagtgcttccatctttacgacactctagtcttgtatatgtaattcgtcaagttatcatatatcttacataatcttcgacaatatcgtcatctaacctacaatcggctaacatatgtcgacagaaggcagccgactaggttaaatagcgacgttgacctagattatataagatatctagcactttatgaaacatccagcggcttgattgtctagatattgttcttctttcttcttttcatacttaatgctgcatcagttaggtttgatctattaagtcatgcttagaatttcaatctctagcctgccttctggttgccgattagggtagtatcggagtttcagccgatcttatctgatttaactacttttatcttatatgctcgattgatatgttagatcttccctttatattaagatcttgctgcgtttaagtatattaagctcctgtttaatgtattctacttgctttaatatcttaatatagagtggtatcggagtattagccgatacatgctagatctatctgatcggctatgctatgaacatatataatcctattattaatatatatttccatctaagtgatttatactatctcggcaaggtgaccgatctatcccaaccacttgatttaagtatatatcgatataaggattacatatgattaatatctacagccgatcgagtagatttagttctgatttgtttactaatacttgccgatcgatgtacatatgacatcggcataagataaatggtatgtcatcggcatctagccgatcggctatcatttatagatttaaccacgaattctttgtctctatttcttgttgattacaggatcaaatcaactggcacgctcatacatccgaaggcgagctttggacctgcacaggagttaagcagatctcctaggcctcgtgttttctgtcaacaggccggcgctatgagatagttcgtcggtcttcgttggtgggttgggcgcgacgattctgcatttgtcgagatcgttctcgataatatggtgtacttgaccacagcctactcgagtgctcaattgttcctgaaaaatattttctagaagacaagacatatatcagataatatcgagtatgtactcaaaaactacatggatcttctagcattatcaggatatgacgagcagatataaatatcaggcattatgtaaaccgtaagcaagcatgatttatacgaaagaaaatagagcgagcccccagcattaaactgtagtcgatttaacattggggacactcgcgcaataggtattgtataaaaaacatgtaataggtaaacataataaattatagatctgacaatattgtatgatctgagtaggtacgataaattgtatataaaatattgcgtacctgtgaagatacatgccggatgtatctacggaattagtagatcaattaaaaattaatcttactaaataccttgtttagccttggtagccgatcttaactgtactctgaacgcacaataattagcatatatcggtggcctgcatgggccccacggtatgcatgctaatatttttgtagatggcgatgcgatcggtcggctggttggttctaatacggcaaattgtctggcttcgacatcctttgctgcggtggggttagtcgaaccatggtgaagcaccacgactgacaaccctaaaatcgacgtgatccgcggtggtgacgtcttgaagcttggtcgatctcgagagatcgaattgttgatgacgatggttccgatattgtcggaagacatactccggtcgtgttagatctccacagccgaagtcgtcgagtagcttgttgtcggagaatccatctcttaaacccatctcgtcgaaaccttgaagcaccaaaatgcccctacgtggcgcgttactgtcgacgtttgatgtctcgactacggtatttgcatggcatggggatcgttggtactagggtatacgcgagactgaggtaaaagagatggagacagggatttttatacaggttcgggcccctgaattatcaggtaataaccctacattctgttggccgaagccggtattgctcttattcatgataatcacatcagtataatatttggggtagcctatctaactgtcgtcgacttggcggtctgaagttctgactcgtagtcgacaacagggtagccttcctcctcgaatccgtgcccggcgaaatcagagatagcgcttttgtctctcctaacagtatccggagacaccgtagggtactagccatgcttatccctgaagtcgatatccggcggcgtgtcttggcgtatgtagacttctatgttgtggcttctatgtcgattgtgttgggtgttgatcctatcccctctcctcctagggggcttgtatttatacccataggtgtccccttgtccaagtagaactagtgaaactaatatggatacaatccgagtagtcattgtcatttccatgtagaactctggttgtctatccttatccggaactcctcctatatccgaaggttgcttccgtataggacatggtatgtagtgggtcctgtcgagatttaatcaactactattaggtatgtggtatccataaccctgacaatgtgtaatactcaagtgtgtctactgaggaagcggaacatatcggattttctttcagcagtggaatacattctgatagtactctctccagtcataaggtttttgacatttagtcatttacaatagcttttactcaaacttttacaatcaataacttcgtatagttttaaactaactagaaaaaatatccatacgttgcaacgggtaaaaacgtattttcactgatatattaagagctaagcaataaattgaaatattaggatcgctatatacattataattgaaaaagttaatgagaatcctaacattgggatcactaacattgggatcactatagattataattaaaaaagttaatgaaaatatttcctgggtttagggtcaatagccttcctttatttttagccctaggcaagtccgctacctcattctgtttgtttggcctgcttcccttcgacccaaccataagtggagtcgaagcgcagctcaaagtctactaccatattcggccagtacgctacctccctccgtttggcctgtttcccttcgacccagccacaagtggagccgtaaactcaactcgcacagtctactactatctttggccagtccgttacttccctccgtttggcctacttcccttcgacccagccacaagtggagccgtaagcgcagctcgcacagtctactaccattgtcaatctcccgaagatagtcccgtggccgtacggttgccggagcaaatctctccccatcaaatctggtcgaatctttcccgatcacattttggttgagggtttttaattcactcgatcttctctttccgttttttccaaaatcagtgtaaaactctcccccatcaaatctgaccgattctttctcgatcaaccaaaattagttcagggtttttgatccactcgatctcctctttccgttttttttccaaaattagagtgtaaaacttggcataaaaacgtccggggaagatcaccgtcatcatcggcaattgttaaatggagattaaatccgatgaattaagaccgaatcgaaagggaaaataatggagaaaatgatggcggaggagtggggaatcgatttttgcaatcaaattggaggagaaatgtacaatcgatatggcggcggcgcagcacggcgctagggttcaaactcgggaggcgtgcggtgaacagatcgtgttaaaaaaccagatgaaaaaaaaccaaaaacacacgggagaaaaaaccggcgtccgaaaaaccaagcgccgggaggcgccaatagattaaaaaacggacgaaaaaaccaagcgcatgtgaaaaaaactccttcgcgtgcaaaaaaaaaaaagggaaaaaatgcctgtgccaaataaccaaatggacttttttttttccaaacggacttattaaaaaaaggttttttttcgatcagatgttttttctttatattttaccgagacagaagctctttttatcgcttttgaatcggactttttttttacctcattgagttcgacttttttttcctcttttaacagacaattgaaatttaagtagtatagataacataaaattaaaaaatcaactcaaacacgaatgacgtatcaaagtaccggcaaaaaaacatctttaatttttataatagtagagatataaatcgtacgcatgtatcttttgtcttgaaaagtataattattattatgtcattaacttactgaatttatataatacaaaattaaccaaagtttcaaaacatggatatattataatatgtggaatacatttttttctattttacgtaaataaaagaaaataaaaataatatgtgccctattttccgttcatcatcttttccccttgttccctccgttttctacggaagtgaaacgtggcgccatatcctgcggtgccttctccgctgttgcgtgtggaacggctcggacgggatccccattcctacacgaatggcgttatcgtcattacgataaaaacggaggggtgatcgggaaaccctctgggcctctccacgtcgtcgccgttacttcgaggcggtttcccttttttgtcagcgtccaaaaaatgagaagcccgcgctcttcgccttttgcagtaacgccccccgtcttatacaagattttcactatgaaccgtgagaaaagtcaaaaccccagtcccccgttcggagaaaagactcaatgaatccgttacttttttaaaaaatacgacaagtgtcagtcatttgtgtatcagactttttgtgaaataaaattatgccgcaccatgttttctatgtgtttattagttacttaaaaaaatgctcgtgtgttgcaactggtgaaatttattttaatcttattattattatatggtttaattaaaatgaaatttaccgtcggagtttgcttggatatatatatttttagaaaatcatgagctacagttaggagcccgatcgtttcaagttagtatgcgagtttttttaaacagatttcttatatgattccttctgtattatcaaaagtgaacaatattaaaaaccaattcaaatgcgaatatgtatttccaaaagcaaacgaacttaaaaaccgactcatacatggatgacgtaccaaaataccggtaaaaatatattcaatttttataataatagagatagagataggttgctcttaatgaattttactgattcggtaagtgttttttacataaaacatggttataaatttaatagactttaacttttttttttttgaaaagagactttttaacatttagtttactttagattcttttattgggtctctttctcttttaactctagtaactccttcagtatagaggacatggtagcgtctagaattgttcatagattgggccaaaaaatgcttaatttgtatagtataaacaaattagcccaaaccattcttttcactttcgttgttttgggctcaacaaaacccgtttaacatgtcttgttattcacaacatcccatgacgcggttgcattccctcaacgtcatgcctcaatgagtcccaacgttattatcccatagcaactatttccccgcgcttgacgagacctcaacgtttgcggcatcgcgctcgatgagtccaatcgatgattctattcctgcgctgatgagggctatacctctaagagtgatgtccctatacattcaggctgtgtttagatccaaagtttggatccaaacttcagtccttttctatcacatcaacctgtcatacacataacttttcagtcacatcatctctaatttcaaccaaaatccaaactttgcgcttaactaaacacaaactttacgcttaactaaacacagcctcaacaacctgcatgcctatgttcacgtggctcgatctgatggaacttcccacacatatagtgatccccgaatgcatgacgactattcctatcccctgccatggccttttgctacttctatgctctattcctttctcgtgtacaaatgaaggagcatgtacatgatttaactgatgcggtatatatacatgacagaactggttattcatgaggcggaagtattatgtgttatggttaggttcagttgagggtggttcttgcattaaagcaataaatggacacaacatgttagatacaaatctgatgaccgttcaaaattctacagactcgtagatataaacatgtcacctataccgtgtaaatggttcctaaaaatttatcttatccgtttcataatataagactttctagcattacccacaatcatctatcatctataatgttacgtcatagatgaatatggataatactaaaaagtcatatattatagaacggagggagtacttgttttcatccatatcgacaacatattctggtagcttccattccatgttatcgaaattttccgggcaaaacatattcccctatttttagcctccaagaacaaaatggtcacaacttgtaaataaacaaaagagcaagccccactccgcaaaacacacctctcctctccttccctcatattttaaccattccacccctcacaaatctcactatttacttacctttactccgccgaataaaaccaaccaacccaccctcctcctccctcgcccgcctcttattttttcttttctctcccccaaatctgatcccctcccacacgcaacacgcgaggccgcgtctagggttagggttcccctccccttcggccatggacgagctcgcggcggcgtcggcggcggcgaggaggaggtgggtgcagtgggaggaggtcgtggtgtcgaacgaccgggggaggcgcctcgtgcactactacctccggggagcggccgcgggcggcggaggagggggagaggtgagggagcttgcggtggtggggcgggagcggagcccgcggcacatgtcgtacgtggtgcaggggcggttcctgcggtcgctggcggcggcgggggtgggggtgggggtgggggtgggggcggcggtgggggcggtggtggcagtgccgtcgccgtcacggtcgccgctgccggcttccgcggagggcggggcgccgaggaaatggaggtcgaggcgggaggtcgtggactggctgtcctccctcgtttccggtaagatttgtgtggttttttttttttacgcctgggcggtcgattcgggtggtgttgtgcaggattttgtgttgttttgtgtgcgtttgcggctgttttgttctttcgcgtgttgtggtttgttttttctgtgttatatggtggctgatttgggaatcgtttttctgaatgttacggggtcctattccagactgcgcgcagatgcggtttgggcatatgtttttccctgtttctgtttggttcaatttgttcagggaatagcgtttttttggatttctataccaaaagaggctgtggtttctgattttctgacgattcgacccgaattcgcaaatagcgttttggatttctctaccaaaagcggtttgtggtttctgattttccgacgattcgacatgaacttgcaagattgtttggcctttagataggcggattgatttgttcccgtgaatcttttgtataacccatgcgtgttaatggagcggatctgatttctaccgtattaggtctatcagggcaggaattcaactttgcatccttttgttctctctgttgcgaggagttcatttctggattcgttgggttcaatctgctgcggcgcccttctcacctgattcgtgaggaggtagacagcttgttcgtatctcgtggttataggagaagagtacaaacgtttgcgataacccatccgcttatggtcgattgttgtatattagaaacttgttgctttgaacccggatttagctattgttcctttctattggaggggtttgattctgtttctatttggagggggaaatatgttctatttagagggcaaagattgacaatttttttcctccaaaggcaccttttttacgatataaccctcttatgacctgcctatgatttgattcggttagacatatcttatgtcagtattggaacacttatgctagttctagagttctttttttgtcaaaataactaatttatatgagttgccttgcggtttattctagaaagctaacaggattttatcataataagatgtataattcagtcttatattggtaacctgtaaatctcatgccttctccttttccataggattatggagaatacatgtgtgacccagtggaagccgctgcaggtttccctttttgggtcgattgtgtaagcatgcgttcggaaatatagagaaaatgaagcggcagcgtgagttgaaaggcaatcaggtgccattttgttcttcccttcttgtggcctcccacgagacacccatggaattaatccgtgtaaattgaatgcttccgtaatctgcccaacaatggtcaggaaatcctccaattagttctgtcgatgagcttttgtaggaactcttacggtgtgctgacgcatcaacttgtcaatgcttctgtttaaatatgaaacggccttacaaattagaagtcacctccaactctgtttgcttccaactgctcttggttttaaccttggtggtgtgcggctgtgcgtttcatcttcgatttttttttgtgttgttttcttcttgtgttgcctttattttttctgaatcacaagtgtgctactatgttttaaaccaatgttttgatgatactcctgttgcactgtcttgtatggtaaatttcttatgtctagtgcttcttttgcaggatgtaattacggatcttcttcaatgtctaataggttcaatgaaaatccatatgatgacattgagttcactgatgttgctgcttcaaaggtatagagctatttcaagataacttgcccttcatccttctagtatgtccaggatatatttctgaatttccccccattgctaattcattccatttttgtgtgcttaggatgtttcacatacatcatcagtaaggaataactcaaaagagttcacatggttaggtcctgcatggctttgcgaaaagcgatggaagcactacagatctttctgccgtaaggggattactatttcggtatgttacccactgatcattttcctgtattttgtgttgtcaccatgtgtaccactgagattttatcaaagaaatgaggacaacatgctgagatgaagtattgcagaacaataaactatgtagggttctaaatgaaactgcattatgaaaacctggaggagttttaggggaaaaagctatgacattctgttattgccctcctgtttggttttatacgttgtatttattagtactactgcacagtgatatgggagtatttcaaactattcaaaatagaagtttaaatgctaatacttgttattactctgaacctttgaaagggaaaccttggttgacacatgtttatgctatctttgtaggtgcataattttgtctacatcctgagtgaggaaaagaagaggctcatcgcccaagtggaggatctgtatgaagatactaattcaaccaacgttgtcatggtacgatggttcgacaaagttgatgaggttggtgtcgaattgccacctgatgttggtgacagagagattttcttttcccctggtctgcaagatctcagtgttgaatgcattgatggattggctgcagtcctgagtgctcaacacttcgagaagttccagagtagtccaaaacatagctattggcagccttatatttgtcgccgacagattgatgaagatggcgtcaaaccttttgatgtaacccaattgcaaggttattggagtcaagaagtgcttaggacaatgttcaatgcagcttcttctcttaaggtacgtttcaaggtcactaaaggtgcttctagttcagatggggcacaaaagaggaagcgtgatgcattcagtgaaaccgatccacagcagtgtgttccttccgctgcattcggttctgatagtctcaagaatgatttggaacataaaactcaaaagcagctatatcctggtagccgtgctgaagtcctatcacaggacagcggtataaggggctgctggtttagatgctttgtattaaagaggcgcggagacaaaatcaaggtgcgatatgaagatcttcaggatgctgatgagacaggaaatctggaggtgagcttagtgtaattctatataatctttttttccccactaaattggatctcagatcttacttgttacttaacctttgtttgcaggagtgggttttgctaacaaggattgctaaacctgatcagttgggtatacgcatccctgaaagaccaatggtgcggccatatcatgtacatagcaaggatccatgctctttcgatgctggttccattgttgatgcatggtggaatagtgggtggtgggaggggattgtattgcagcagggaaatgacagacgccttcaagtttattttcctggtaattacattcttaattaccatcaacatttcaatttgcctctgcatgacattttaataatgtagtttggagctactgaacttacatttgctttgttatttatcacaggagaaaagcagattgctgatttttgtgaagatgatttgaggcattcacgtgagtgggctggtggcaaatggaattccttgggggaaagaaaagatatcacacacctgttgccccccacttcagttcatgaagagggaggtttgcttagcaaacctgtttcacaagaaggcaatccctcttcaaaattagaatctgacaagaggtgtgatgacaaatcattgggcaccaagatttcacatgatcagaagcatcagaagcgtgttctggctgatctcacaaatgctctgaaattcgataacctgaaatggaggccaagaaagcggagcagaagatctggttccaaaaggcagtcagacactagcagtggcagtggcagcagcagccagggcgacatggaggagtccagcccctgcggaagttttgcagtgcttaattcagcgcccgatgaagaagtatgcaagagcagtggagaacctcttttcatgagggtttccaacctggtgatgtccagatgaagtcactccacgactgacatgttttagccttttctttccggatttcaacagccttggcgagatgtgagtttgatgcatccccaggttatttagtcacaactcacaactggtatcctgatcatcttgagagctctgaatgcttattcgctcggatgtccaggatgcaagcatggaggagcacactgttgtatttatgactgatctagatgagttttaccattttgtctcactttagggtcttgtagggtgttttaaccgtcttgttgtttagttggtgttacaaagatagctggctcattccacctcggcagtttccagagtcccttttttgtctttgtttcagcagtccaatatccaatttaatttgttcatcagctgttatagatgttcttatagtatactctctgaaatgataatatttacatcgtcatacgagttttttgttcttctgcctatgtggtgttatttgtgtgaatttattggtctataattgaaattgagtgtattgtcttcaatttctgctgcgtttttgagcctttgaatactagatgtggcggtaattgttggaagtcatgttggttggtgattatgtttgttgtcatgtttaaagtgtaccgatcttaccattttccaaccagctgtaccgacttcaccgggtcaaaattggcgccttagcgagctactgcttacattgcacttccgaaattctagttccattcgtgccttttctgtctgttttttcagacaactttgctctatggttttgccaggtccatggaacgcacaaactttttctagacgacattacgaagatagtagtatttgggacctgattccatccccgcgagggcatctcggcgaaggcaaaatgtccataggaaaaggttttatcatcacaaggaagaaaaggccaacgagaagcagctaaggaaaggaccaccattcgtgcaagccagccactgaatcccagccagcgtcgttgtgaggaccagaatccgattcgattccgacctccagcagcgtccaccatgacaccaacaccccccttccctcaaagcggccagaaaaatacaacggcgagccaccggcatcagcttagccccagctgccggccaccaccaccatttccccttttgcagattcttctaccgttctctcttctccggcgagccggaagccgacgaccggtcgtcgcgcgccgccgccaagtggacagacggtgttcatgagtggcaaggtgattatggtgaattggaagtgcagagggggaatggtgtggtgttttgttgtggagtaactgaagctgtgttcagttttctctgcagttctactgcatgaccgtcaggatgagcatcgactgcaatgggtgctaccagaggatcaggagggcactcctccagatgcaaggtgaaaaaccggaaaatccaccagagattaccaccataaatattccttttggtctttgatgatttgataatgctcagtacagaacgatagcaggggaacaaaaaaatgggcatcaggaacagcatattaagcagcaaaaaacatctatcaagattctcttgttgattgtatttatttactaaaacaagcagaactgcttacctacacattcaacattggttacctgattggctacaattgatgtcctttcgcatcaacaattttccgtgcaaaaaatgtggatttcatctcacatttttaccccctgtgtatgtatgtatgtatgcaagaagatctggatagccacctgatcgaccggaagcagcagcgggtgagcgtctgcggcgccttcgtgccgcaggacgtcgccatcaagctccgcaagaagaccaaccgccgcgtcgagatactggagatcaaggagatcgacgccggcgacggccaccggctgtgaagtcgccggcgtcgcacgagatgggacggcggcggcggccgtaggaaaattctttgtaaataaatcctgtatattatagcgtatatcatttgttttaatcagagccgataaacttattcagctaacccttttaacacaaagcgagaatggtacgattgcgaatcatgaggaaagtagagaatggccagctgcatgcctgcatcagtatctaagctttgagatgaagcattcatcctcccaaagcatccaggtgaggaaggcaagctctgcaagcgtaggaacatggccaattctgcttggagtgcagcttcaggaagggcctaagtagccccaaccatatgcacagaggtggtccaaagatatgcactctcccataccctaacaacataacagaaactgaactagctctacagattcggtaccgacgatgatctcgtcgcaattgcgatcacatgactgacgatactgcgaaaatgacacaaaacaatagcagaaagcgattgcgaaatcgcctcgagaactatcatatcgccataacacggtctttcactacaacagattggtaacatcgagtaccagacagattgattgctggtgagtgagataaatgtgcaaagaagagctttgcatggtggtgtagatcatcaagaacttgagtagcttctacctccatccaatccaccaacaattgtcagaattgctggtcagtcagggtttccttggagtgccattaaagtccgcagaggtggatggagaggagagaaactaaacctgctgatggcttacggccaagacagcaaatgtggccgcacaacacccccaccatttttatgagcttgaacaaccgtcctggctcctccttttgtcacacccagtgagggttctgcaagtgcttcttctccttttggctgagattgagcaaacatgggcatggcgatgaggtgcgtcttggtcctcttctccgtctcccccgtgctgctcctgttcaacttcgagatgctggaggttgctctccatctagcgagccgcgaaaaggagctcgacaccgctgcggtaaccccttctgccagtttgagcttcctctcgaggtttaggataatgctggggatgaaccatcatcggtcgcggggccgaaggcataagagatattcagaagctccagctccagctccagcaccagtcccagcccatcaagcaagatcagaagctcctgcccctcttgttcatgtgcctcgaaaaggaatgccgtcgactcatcgcagccacattgccccagctagaagcccggtgcacaaagtgaaagatggtggtcacaccaagatcccgagatccgccattgttgctctgggtgtggttggattatgcctagttgttcttggagttgtcatagcagcattctcagtcagaagatcaaggaagttcaagaaggtgtgtacaaaggcattcaaaccatttcgtcatggatcaagagatcaaaggtcacctgctgctaccaggaaggtcagttcccaccctagcccagatccacttacactaagttccatagtacagtaccaacagaaccttccaaaccttaaacaatcatctgaatcaaagagtctatccattcagagcactattccgatgggtacagaactaatagtaagtgatcatgctgtgataaacaactcacaatctgatgaggttgaatctttccattccataccttgctctgatttatcagctggctccattacagagttacctcagcaaatttgtgatagaagagctattatgaaccgatctgagtatttcctacaaacacatgattcaccatctgattcatcatatcaatccctttcaccagattgtacatctcgtttgtctccaaaggatcaaactttcactgcttccagtcacctcagtttgcgtagcaaaacttgtccagaaaaatcagatggtgaaaatgctgaaataaactgtcatgatggattggaaataacttgcatttctgggtccatggaacatcaagaagcccctatcgaagagcgggccagaatcaatttcaggaacccaccatcacaacacatcttccctccctcctatcgtacagatacctcacaatccaaaatcaacatagcatttactatgactaactcaaaggttgaatcaagttctaaggaatcatcaaggattgagacctccagttcaatgggtataccaaaaccggcaccgcctcctccaccgcaaaagaaccctcctccaaatctgaaagggcaatgctatggccagcctccaccaccacctccattgccacttcagatacaggttggtaaagatgggtctcccctaccaaggttgaaaccattgcactgggacaaagtaagggctgctccaaaccgctctatggtgtggaatgatataagatcaagttcatttgagttcgagtaaggctatcccccctcataattgtgttcatcacatttcctattcttattatgttttacaataaagctatgctatgcagatttgatgagcagatgatcaagtctttgttcgcatacaaccttcaagggtcaatgaaagatgaggaggctatgaacaaaaccgcatctaccaccaaacacgtcattgagcaccataggcttcaaaatactactatcttgttgaagacattaaatgcaaacaccagtcaagtttgcaattctgtaatacaaggtaggtttcatgatgttttaagtaattataagttatgattatcaagttaacaataataacaatcaacttatcctcatgtctcggctgactcaggtaatggattatctgtgcaacaacttgaagcgcttgtcaagatgaaaccgaccaaagaagaggaggaaaagttactaaattatgatggcgatattaacatgctagatccagcagaaaactttgtgaaggtgctactaacaataccaatggcattcccaaggatggaggtcatgctctacaaggaaaattttgatgacgaggtagctcacatcaaaatgtcctttgcaatgatcgaagtaagtggagtcattttgcatgacttgtttaggacatattctgttgtgcttatatatattgttttatttaatagggagcttgcactgaattgaagtcaagcaaactattcttaagattacttgaagcagtactcaagacaggaaacaggatgaatgtcggaacattaagaggaggtgcaagtgctttcaaactggatgcgcttctgaaattggcagatatacgtgggacagatgggaagacaaccctactgcactttgttgtaaaagagatggctcgttcaaaaggattaaaggctttagaaaagctcaatgaaacacccagctcttgtcatgacacaccaactgaacgagaggagtattcatcaatgggtacagaatttgtctctgagctaagtaatgaactaggcaacgtcaagaaggtagcaagcatagatctggataccttgcgaaactcaatatcaaatctatcctgtgggctggctcaactgagaaatcttgttgagaaggacctagccagtgatgacaagaacaataacttcttgcaatgcatgaaatccttcctaaatcatgcagagaatactatgcaggggctcaaagctgatgaagctcaagtcctactcaatgtcagggaactaacggagtactatcatggagaggtcagcaaggatgagtccaatctgctccaaatattcatcatcgtgaaagattttcttggtttgctggataaggtgtgccgagaaatgaggggcacaaagcataaccaaactctcaatttagtccttccactcaagtgaataggtatagattaaccaactggccactaacaaattgattgttttgcatgtgaatgtttgtataacgatgttagcattaagtgtttgacaagttgactgcttgtgtatgagagtgtttctttgggagtgttagaatggagatcagttagcattaattataaacagattgtttatgtggagtggtattggcatcacggattcaaaatggatttgtgtggcatgatttttcaggcagcttttcattttggttagaatattagtgaaataatgcagaaaatgttgctcttggtaccatatatgcaaatacaattatagtaaaataatgcagaaaatgtttgcaaatattacaaatcaccaatatgacaaaccaattccaaagccagtatgcaaacacaatttgagatggctcagatacacctagatttacatactagcttaatttgtgatctttagagttatttccaagattgtaccaatgctaccaagagtgttaatggaggttaggaaccttatgcaataaagtagttttctccacaaattcaggaatacatttggcttttagcatcatatagaacagaatctgaaggaacaacaactcatgaggggcgaaaaatataccgaattacgaaaaattataattaccaaactattctacagttatagcttattgctttccataacttaatagtatcatctctccaacagtacccaacattcagaaggaaaaatagtacaaacaaccgaaaagtaatacccgatgagtgattaaagatacaaaaatggtattcgacaatagacctccataggaatcaaactaatgattagcgaagatagttgaaacttccaaggaaatcttacaaagttaagctctcaggatcctcaataatctttgcaaaagtttgcaggaatgctgccagatcagcaccgtatacaattctgtgatcagcagtgacattaacctaaaaaaatgtagatccaccttagttgtttctatatacagaaatgtcattcaaataaatcgcagataagcattaacagttcaagacgtaagatatatctgtggtgcttcaaccctacttcctaccaatgaattgatattttttatgagaacaatgctcttaatatcaggtgggtaaataaaaagactggatggatcatgtatacatataaaggaatgatcatatcatatatgaaaatcatgatgtcaaccacctaccacacccaaccaccccaaattatacacatggggtaattcgtttatcactaagcagagctcctgcctttgccactggctatcagtaatacatggggtctgggagtaaatgataatgagaactcagcattaaaaccaaaactcatgctaaattagtagcttaagagagatggttcatccacttggtagacaaatatttcggttcaatgtgtgaatttgtgaatgatcttatatgactaagcaaacagacacaaaacatactagagacgtgcttctatgctcctcggaaaaaaatactgcacgaaaattaaagcacatcaatggttcggattaaaagatgattactagggtaaaccgtcattaacgagggccaatttcgtccaggaagtaaaatcccacatcagaccaggccaatcgcaccatcgatctgggaggttgacacggcaacagggctgggtggtgaagatcggccgggcatgtgcgaggaatgggagggcgacgagctgtgcggggcgttgtttggtgcccgccgtcggcgttgagacggattatatataggacgacgagagaggaccagttctcgatcgaagggcaacgccgcagtggggaggctgcaggggcggcagaccagatggagcatggccggttcatgccacgcgcatccactacggccgccgttcatgatcatgattacgcaaactcccggccaaataaaagcttcttttgattcagtgttctcctgttctttgtactggcgaaaccttgatagaaatcccaactgttctcctgttttttgattcaatgtttttcgtccttgatagaggcggctgggtatggatatggaattttacttcctggacgaaattgcccctcgctaatgaggtttaccctgttaatcactttttaatccagaccattgatgcgctttaatttgtgtgcagctttttttattgaggagcacagaagcacttcccaacatactaatataacaatcactaatttccagtattggctgaaaaattgcatgtgtgaagggcaactaaccagcattttgctcttgacactaaagaaaccatctttatcagccaccactgtaggttttgaggctccgacagccattatgcctccctgtattcatacacactcaaatacttaggccatataccagtaaaggaaccacatcaatatttagcatcaagcagattaggagaaagagaacctcacctggccaggtggaagaattgcatcaaatctatcaacaccaaacatacccaagtttgacagtgtaaatgtccctgcagaccaccaattcttcaggtaagtacaattttcacatgtttttcaacaacgatctacaagactgaaacatcaggttccataccagagctgtactcatttggttggagctgttttgcacgagctttcttgactagttccttccatttttgtgagagcaaatatatatccaactgcatcatgccattgctcaagctattcagtgaactcatatgattcaattcctaaatgaaacgacattaaacacacagatatcctgtaccttatcagcatcctccagaacaggtgtaatgagcccaccatcgattgcgacagccaccgcgatgttgatgttggtgttgtaagtgaagctcttcccatccctgcagctagcattcaccaccgggtgctgcgcaagtgccatagctgcggccttcgccagcagaactgtcatggtcaccccctttgacttgacctaaccaaaccaaatcaaccccaacaatcaacaaaatgaccaaaatgtaataaaccatcacaggaggttaagcactgccacccccaaagtctccaaaggtatagcaccttctcatatagctcatcgagcttatcggtcacaattgggtatcccacacggaatgcgggcaccgcgaggctctccaccatgttcttgctcactgcagcctgcatgccagtgaatggaaccaccgtggcaccgggcaccggaggaagctccgcggcctgtggcacggcgccaattgccggagcagacagcggcacgggagcagcagaagcagcaggcacaaccttcggcttcggctcgatgccggcggcagcctcaacatcggccggcgtaattcgcccgaacggcccagtgccagccaccttagctaggtccaccctatgctgcttggccagcttcttagcttgcggggtggcaatgcccttcgtgccggctgccaccggcgccggagccgccggagcggccgcgggtggaggaggcggcggtggcggcgcggcggcatcggagggtggaggcgcctgctgcgggtgggccttggagagctcctgggccttggcgagggcggcctggaggtcgtcctcggactcggcgagcagcgcgatgggggcgccgacgggggcggactcaccggcggggacgaggacggcggcgacgatgccgtcgtggaacgtctcgacgtccatgtcggccttgtcggactcgacgaccaccacggcgtcccccttggcgacgcggtccccctcggcggccgaccacgacacgatcttcccttccgtcatggtggagctcagcgccggcatgaagatctcccggatcttggcccgcaccaccaccatcctcgcccgccgcctcgccaccggcgccgccgcggcgccccgccccacgaggaggcgcgccggcacggtggaggccgcggccgagagcgagacgggcgctggagtcgtcgccattggagaggtggaggtggaggaggaggaggtggaggcggcggaggcgaggtgggggaggtcgggtgtataaggagaaggtcggcgagggcggagaaagcgaggcggatgagagctttggaaactccgacgaatgctgaaatgggctggggagggccgggccgagcctgacgtcaaccccctcacctggcctctatcagggccgggctcaactttctgttttggatcgggctcgttttagtatattgggccggcccattaacccgcagacgcaagccatctgtcgcgacttgggaaaagtctatatcacctccctcgtctattactccgctctccatctctcctcgcaggcagcagggaataagttcaccagaggtccctcaacttaacagcgagattttctgagggccctaaactacaaaactagaaatcttcatccctaaactcatataaaccgtgcactcaaggtcctatagcagtatgtatgggtggtttcgacgtggcatcctagtcagcaaaaataaataaaaaaagtaggtggggcccacatgtcagtttcgttaccgcacgtagccgcgtgctgatgtcgtcgccgccgctcccacctcgagccgacgcctctgctgctcccgccgccgccccttttccccgccgtcgcagcggcggccgccattcccaatgttgccactcctgccacgtatcgccacagccaccgctgctcccgccgcacgccaacgccgacaccgccgctcctgccgtcacccatgttccccgtcgtcgccgaggccaccgctgctaaccaccacatgttgccacgtccgccgttcccctccccctgggaggcctccgcggccgccacgaccgccgctgctcccaccgcatgccgatgtcgtcgccgccgctcccacttttgcccattctccccactgatacagaggcaaaatgaccagaaaaagggtaggagtacagtacagtacagaggcaacaaccacgttggattagaactccgacgctcgcccgctgtcgccgccgcgctcgatagttgacgccgccgtccgcctgctccggccgcacgttgacatcgccgctccgcctgctccggccacgtgccgcccgcgcccggagccggtgctcacccgccgccacggctgcgctcgcccgctgacgccgccgctccgccttttccggctgcgcgccgcccgcgcccggagccggtgcagttccggatgaggagaggtgggcgccggccgccgctcccgccgtcgcggcctcacgggcggtcgcgccggccacctctctccccttctctggcgccggccgcctcttctcccctctcccgcttcttcccagcgcgccgcagtgcccgctccgccgtcggccgccatctgcctgcctgcgcgtgacggcgtgagaactgagaagttgagaagagaagagaaaaaagagatgtgggacccacatcaatttatctcactgacatgtgagtccccacatatttattttactatttttgctgactaggatgccacgtcatcaaaaccagtcatctatactgcctcgggatccaaattagatggttttgtatagtttaggagtgaagatttctggttctgtggtaaggggacatcaaaaaatctcgttgttaagttaagggacctccggtgaacttattcccaggcagcagtggaggcgagacagaccagaccgctgaagaacagtcatatctcactgacaatctgacatgtgggtcaatttacacttgtttttaaaggtcaagaggtgtaagtgattcgatcaagaataagatagaggaggcaaattagacttactccgcggaggcgtcacgaattttttgtcatttttagatttttttttaatatttacagaaataatctatcggtcaaaaaaattgcaaaaatagaccctgccgccccagtggtgggcggcaagctgatgtggcagacggcgggtcgaccgtgccgtctgccgctgtcggccaaaattgcaattaccgccttgccgcccatacagagagcggcaaggggctaattgcaatttttgccgcccataatgatgcagcaacgggggttcccgatctttcgatgagaggaggataaacttcgatttggggaaggatacgacgttggcggtccgactataactaccacaggggtgctgcgccttagcaaccggtacaccgactccacgttgttgctgttcttgccgtgccaagaacaaccttgaacctgcaagcaatcgaagaacaagcaagaacaagttgacaaggaaacagctcacggcacttgtcaaatgatgaaacttaaacaaaccaaaatggggttctgaatacaagtatccgggtggtctagccgacacacgcgagtacaaggaagtagctgcagctaaacttacatcaaaacaaaacccaaagtgcaaaatggtggctgctaggagtttatataggtggaggaatgaccaggagaggaggtgggagcaaaccctaggttttgtggacccctaatgggctgtaatgatacaaggcccaagcccaagtttctgatgtaaagaactattttcgtcattctgagcagcctgggtcaaagttgatggtgaggccatgcatagctgatagtagacgacgagatctttccaacaagtactcatttgccccgtttgacctccggagtgaagagcattgacttcatcaaatcagcgctgctagtgctgcttgcgatttggttcctctcccatattcctaacaacaagtagatcacaacaaccatttagtagcacctaattctgagaagaacttgtatgattagctaggaatgactttacctgataattaagttcacgagctcgagctctagtcattggtccttgctgtgcaataggcgtggttgtatcgttggaagggatgtcctcatcagataaagaggttgcgctcgtactttttgcatctgg

SEQ ID NO: 9471 - DNA, 12016 bp, Oryza sativa
gttgacaagttctcgaaaaccggtcggtttaggcaaaattccgatcgaaatcatcgaaatttcgatctgtaatactgtaatttggaccaactactaactgggcctagtacatgcaatctggcccatgtaagtgttttcctttttttaattctttattcttttctttcctgatgtaagtttaagtaaatacacacaatacatcatttttttttgaatatttatatcccaataggttctatgaatatcatagtatttataggattttatttgtttttttctttttttatcaattcaaatttgaatttggatcaaagtcctcgaaatcttagacggtttctactttcgagcctcgtcggaatgtcgaaattttgtgaaatccgattttatttcgttggaatcgtaaaccctggtgatagtaacaatcttaggttgagatcaacatatccaatccaacaattgtaacctacttggtacatatgctccataacagtaactgcaatgagttaagaaaaaaaggtcactggaacgtgttggttctctaccctaccaattcaatggtagtgccaaaatctaggtaaattttgacactaccaattatttggtagggtagaattcatataatgtgtttggtttggtaccatttgctaccaatatgcttgttatagtgaagaaagttctagaatgctaccaaattagctatgggtattgccaatactttggctctaatccaaaccaatcaaactactatttgaactgccaaacaattggtagggcacattttggcatcgatccaaaatggcccattttggattgaagccaaaacatgaccttaccaatctattggtatcttgaagatattgtatggttggattaaagccaaatcattggtaatgcccattaacaatttggcactaatctagaactttcttctctatatcatcaatatttggctttatattggtagcaattcaaatatgtaccatgcatctctaccctaccaaagaattggtagtgccaaaacatgccaaaaatttggcactagcaaagatttggtagggtaaagaaccaaacagcttttgtttcagtcagaaagttaagtggggcaaaaagattgcccaaaatattatgaaatacctctcgatatacctttgatttcacaatatgttgtattaatttatgttttacaggcatacaacagatccaactttcaatgacatgtttattgtttagtttagctacaataattgttgggtagttgtagagcagcacatggtacttatgccacaagcccgcaaataaaataattcgcatttgctcatcctaattcatgctagcatctctattgcagaacaattttgatactattttttttttaaaattagccttgaaaatgccacttcccctaaggaatgacaaatgcatttttttttacaaatgcaaaaacttgcaggtagacacatatttggcaggtgaattcgtgtcatatggacatatctttcattggaagatatgtccatatgttggagctatttcaccagttctttcattggaataatgttagcatttaatcagtgatataggagatgattcaccttcaacaagctctcatttatcatcatgacgagtcagaagaatccgattgtcaagttacgccttctaccatatactccccaccaaaaacagctaccactggtaaataaattgctttctgttctaattggtgcctgaatttctgtatgctagatctgattgtttgttgctttcctggtattgtgtagtttttagttatgatgtacataatcctaagttaatccagaaattaatttttgagttctttctggagtttattcagtagtttataggttgtgaccaccagtgtccttttatggctgaatacaactcaaagaatcttcatgttggagttggattcactttggcagttcatacagtggatgctgatagatgcgctcgattattcctgtcgatagcatcctagtattgtgtctttatatagctatatctagcattttcatgtaaaagtctatctgttctgtggatgggtgctcttattggttgcagcaatcaggataatcagctaaaataatgatatattgcagccttgtcagcctttattatatactgggttccctaaatggtcatctagtcattagtgccaaagtgcatgtagtcttctctgatcgttatttataactttatatgccaatggatgttacagacaacgtagtgtatgtcaatctatctggcgttttatttatcagaatactagaagagaatttgcaccagtggttcaagtaaatccctgaacattgaaactagatagtttgggctttttggcccctaatcttgtttgattgatacaaacaagtcaacgggtcacaagtgcttttgactgacagactacatccgtttctctcctttcatcttcactctttcccatcgaattctcctcttatctttcttcattcttccccatctttgaccaaattagccgcatcctatgcctggtggaatattctgacacacaatagcagtgtggcttgtttcagcagaaaatatttgacaggcgttgattgcaaagctgtcacagctgcacccatctgatcagatataggtaaactgagatgtggttctcagccagtgggaatgatgtacaaccacgttgtcattcaggggaactaaaaaccatctactcctgtttttagcaactcacatacagtacagatacctagaatcaacagatatccctactttaaccactttaaacaagtctgaggacatatattcctagtatcaatgttcatacactgaaccagtaatgcaaggttcaggacatacaatgcaatttactcttgttttcttttatagttcatttgtcctcattttggtccctgatttaagttggacattcttatctcactagacggttgggtaagtaatgttaggggtcaaaatatagtggagttatgctatccaatcttgaaagcaatgtagagctttgatctgttactatccagtactacagtgaacagctagacttggagctagtgatttactcccttattggatacggatattgaagtagatatgggctggatgcctatactatgtaaattcacccattgacggttcattggctcagtcagatagagaacatgcctgcttaactgaattagtgaaagcaacgccaaataactaagtggcaactcttatcagcaaaactaatttgtgattatgatctgtggcttgtttatttcaaccatttcttttatatgaattgcgtgtaactcagaatttcatgtgaatactgagtaactagcacatctattttgatttgggcccaatttttcaactggcaagaaagaattggagtacaagatcaaagggtgggagtaactcttagtcttaggcatcgggattgggcaggatttgttgtgcacctaattttctttcatttctcgtacttgaacttgtttgtgcatataagtatgtgatcatccaactatttctaagaggaaattagccacaagcaacaaataggaagtttttatattcatacctttgcctcagaacttgcgttcatggtttgatggggatcttctttcgtctcattgtatctctcaattatggatttcatgctggttgaaaaaaaaaatcaagatcccattagaacacatgtcaacacatgccacagtagtgttgaatgctatcatatagctcctgcaagcttattttgtagtacatgggcatcagtatgtaagatgacaaatgcaaacttttaatgaaggcctagttctttgacaagtaatccacgtggatagataactgtaaggtcaacacaaagaattaagtgtggagtgttttgagttaattggttcttactgcttaatttcctgttatcttaaaacttcctgttatcttaaaactagacactgttctcctaatttgtcatccttttcctatttagtttgttgttttctacgaatcttgagctatttgtatggagaaaaagcagtgacaatggtaaaagatggttttgaaggcactacaagacatgcctcaagttataaccgtgctgttacgaggatccaagcatccaaaacacttggaagattaagcttcaggcgttgtcaacataatgcataattagttgcatacttcagtggatgattgaacgggatgtttggatatgcaaatatttctatgcatccggactgaatactttctgaacacaaagcaagccaacctgccatggccatgacacgatggttctatccatattttcctatttgtcatgtacggctgggctgggcctagcaccaaaactattcgttgttgtttattattattaggtaattaggttattcgtagatcatggttgtttattttattatgaacattttgataacattttttttaaaaaattaaagcctttatttttccgatcatgtggaggacgcacactgatatatacgtatatcacacgttatataagaaacgtgcttgaacacacgggcaagagatagatactatataggagtagcgatgaatccataacttcactaaattaaacgtgcacccatatgtgagtaatcatgagcatcaagatttaaattctatcagagttgctcgcccaccccctttcaagaaaaatccattaattaatcttgttacataggagtatcgttgtgaatagcatggcaaacaatacagttgtctcctgatatgtcctagctccttgtatagattcgttggataatgtgtcccggataatgtgtcccatccagtttcaaattgctatattttgagacaaaaggagtaactttttttcccctttggatttactttgaaacctatttttaagtttcagaaaacaacgtatctatagatgatacataatatcttactatatgtagtttaataagccaggatgaacaatgtagaattaatcatattcttttgtacgataacataatagacttcgacaattgttgagggacataaagtaaagatcttgataaagctgttgtcctagctacatgtatctctctaccaccaggttgattcattgagtagctagtgagggaggaagaaaaaaaaaacaagcgttctttcatttcattctcattcaccaagagatggaaattttgaatattgtacgaatccttatacattgtagttaacgacaagtccattatcgcactaaattcaatttgaaagtactgagaatagtgataaatctttgatcatatttctattaaaaacacacgtatattacacatgtgtaatattattggacatcagaatttaaatcctatcatacaaagacatgcacctagctatgactcaatcttatctatgatagtttccattgattttgaggaaattttagcacgttctgtttgaggattctcctcattcaagggttggaatggtctattgatcgcgcagaaccatccaaaaattacttaaatcaaaccagtaaagtcgatttcagagtaagaatctaagtggtccaatcaccgtacagatctctccaaagcaaacgcatcatgtaccaagttggtacgaggtatctctgctacttgcacatcatcactgccctaaactaaagtcaaccaaagcgttctaacttccaagacatgcttaaccccgtaattagcagatctaattaggagcttagatcctaattaagctaactaatgtgggagtgaagcaaagaaaaaaaacaaatacctggagctggcaaagtcatagagacggctggtgctggagaagacgaggaggccgacctcggcatcgcagaggatggagagctccctcgccttcttgaacagcccgctccgccgcttcgagaatgtcacctgtcggctcgtcgcgttgtcgatcctctttatctctatcttccctctccccatcttccccttcgatctcctcctccttttccctcttacagatctacgcagaaataacaattagcagcagcaacaacctcggctatctttcaagccaagctctctatctatctctaatcttgtgctaatctccttagagtgctctttacaggtagctctatttctctaatcaaggctggttagctagctaggtagctagccctgatgcactacaacttcttccttaagaaagtattccaagagaggacataaaataaaaaaaatatatagttaaacaagtacagggcgcgtttggaggctgcacgatgcaggcagggtcttccaggatcaatcaattaatcccttttttagctttcgtctacctcgtcctcatttgttaatgtgccatgataaacatatcaaaaccttcatcgtatcgatggccgacgcgtgcatgagaggatgccccatcataatgctgcaaattaattgattaattcagctgtgtttgtcgtaagctataggttagcttctaatttaattaggttgctagctaatgcggtttcctttattgtttttctgagtttcgtttttggaaaggaaggtgtgatgactgacgaggttcatgaagatgtggaataattagctaagtaaagcaaatcttcatgatactctgtcaccctaattagtcttgctggctaattaactagctggccctgcctgcccttttttgcaaagcttatggactcatgagttggctgtcttcactggtggagaaaccatctttcgtcggtcggccgatttccacagtagtcccggatgcaataaaaaccggggctaaagatgttctttagtcccggttcaaaagggtaacgggcatatttgatctttagtcccggtttgtattaccaaccgggactaaagatgatctttagtcccggttcgaatgctgtcagggtctgtcaggccctcccggtatctttagtcccggttgataacaccaaccgggactaaagatgctaactttagtcccggttggtaataccaaccgggactaaagatcccggtgatctttagccccggtttgtgctaccaaccgggactaaagtcccacccctatatatatgtcttcttcctcctccagctgcccgagcaagcttcaaaatttcttcaaaaaagaggggaggtcatgccaaaatttctattgaatttattttggtgattacatacaaatcggaggtgcctaaaaggtttgcaacttcatcctccaatgtttttttttgtcatactacatttgcacctatgttttgcacactttttttgtctccaaaatgtagttgtaagttgatgagagagaaaatgtgtgtggggaagaaagaatatatagaaatttagttcatttgctaaacaaggttttataaaatagttgagaaggaaaactctagtgaaagttaatcttaaataatagaaaacaaactaaaatgaaaattaaaagaagtaaaacacattaaaattagtttattacttaacaaatagtttttaagaattatttggtgtaatattttatgatttttgtatgaataaagatatcttataattattgtatgactgtcattattgtaagaataattatttgtgtacggtttttttgactcatgtagatggatcggcaatggatgtacgctgaccggcggtccaaagagttcattgacggcgtgcactattttttgagagtggccgaagctaacaggaaaaggggttttatttgttgtccatgcaataagtgtaagaatcagaaggagtattctgcatccaggactattcatttccacttgtttgagtcggggttcatgccaagctataattgttggacatcccacggagagcaaggtgttgaaatggaagaagatgaagtggaagacgacaatattccggactttgctcaatttgttggatttgaaggaaatcaaacgggcgaggaggaaatagctgctgatggtaacgacgttgcggatgatcttggtcaaatgttgcaggacgccagggaggactgcgaaagtgaaaaggaggcccataaattggacaagatgttggaggaccacagaacttcgttgtacccaggttgcgagcaggggcacaaaaagttggataccactctggagttgttgcaatggaaggcaaaaaatggggttagtgacaaggcatttggcgatttattgaaactcgtcaagaacattcttccggggggaaacaaattgcccgagacaacgtacgaggctaagaagatagtctgcccgttaggactggaagttcataagattcacgcatgtccgaacgattgtatcctatatcgcggtgaggagtacgagaacctagaagcatgccctgtttgcaaagcactacgatacaagattagacgggacgatccaggagaagttgacgggcagctaacaaagaagagaattcctgctaaggtgatgtggtatttccctataataccacggctaaggcgtttgttcaggaacaaggggaatgctagaatgttgcgatggcacgctgaagagcgtcaacaggacgggatgctgagacaccccgccgatggttcgcagtggcgaaacatcgacagaaaatttaaagaatttggaaaggacgcacgaaacatacggtttggtttgagtacggatggcatgaatccttttggagagatgagcagcggccatagcacttggcccgttacgatgtgtatctacaacctccccccctggctatgcatgaagaggaagtacataatgatgccgattattattcaaggccccaagcaacctggtaacgacatcgacgtgtacctaagaccactggtcgaggatcttaaacagttgtggaagaaggaaggtgtccccgtgtgggacgaggacaaacaggaggagtttaacctacgagcgctgctgttcgtaaccatcaacgattggcctgcacttagcaacctatccggacagtccaacaaggggtacaaggcttgcactcactgtatggatgaaacagaaagtacgtatcttaagcactgtaggaaggttgtatacatgggtcatcgtcgattccttgcagcaaaccacccggtacggaagaaaggcaagcacttcgaacataaggccgaccaccgtacgaagcctaaacatcgcagcgggaaaacagtgtttgctatggttaaagatcttaaagtagtgttcggaaaggggcctggaagccagcatatagagagcgaagatggtcacgcggcgatgtggaaaaagaactctatattttgggagttaccatattgggaattcttggacgtacgccacgcaatcgacgtgatgcacctcactaagaacctttgcgtaaaccttcttggcttcctaggtgtatacggaaagtcgaaagatacactggaagcacgtaatgatctgaagcatatggaacaacgcggcgaccttcacccggaaccaaaggagaaaggaagccattacttgagtccagccagctacactcttagcaaggcagagaaggaaagtatgtttgaatgcttggagagcataaaggtaccgtctggatactccacgaatatcaagcgaataataagcacgaaggagaagaagttcacaaacctaaagtctcatgactgtcacgtgttgatgacacaactgctaccagttgtaataaggggtatccttccagacaatgtccgggcaacaataacaaagctatgtgcattcatgaacgcaatttcgcagaaggtcatcgatccggatagattagatgcccttcagaatgaagtggtgcaatgtctcgtcagttttgagttgatatttccaccttcatttttcaatataatgacacatctgctttgtcaccttgtgaaagagatccgtattctcgggcctatgtacctacacaacatgtttcctttcgagaggtacatgggcgttctgaagaagtatgttcgtaaccgtgctcgtccagaggcaagcatcgccaagggttatggaacagaggaggtcatcgaattttgcgtagaatttatcgaagaccttcgcccaatcggggtaccggaatcacgccatgaagggagactacggggaaagggaactctcggaaggaaagcaattatgacggtagacaacaatttattccgtaaagcccatttcactgttctgcaacactcttcattggtagctccttacatcgaggagcacttggctctagttcgcgccaggaacatcggtaagtccgatgtatggattacacggcatcacattgatactttccccgcgtggctacgacaacatctcatgggtaacgagtcgatcaaccaacaacttgccttcctggcgaggggaccgtctgggtcgatcgcgacattccagggatatgagatcaatgggtacacattctacacgagagcccaagacatgaagagcacgaaccaaaacagcgctgttcgtgtcgatgccatgggacacgatggaacaactgccacgtattacggtgccatcgaggacatatgggaacttgactatggtcctctcaaggttcctctgttccggtgccaatgggttaggttgactggtggaggcgtaatgattgatgacagtgggatgacaactgttgaccttaacaaggttggatactcggacgaaccttttgtccttgccaatgatgtaacgcaagtctttttcgtgaaggacatgtctagcaaaggaaagaagggcagagggcctgatgagcctaagcgtcaagtggttctcccaggcaaaagaaaaatcgtcggagttgaggacaagactgacgaggattacgatcagttggatgggcaaccccctttcacggtgacgattgaccctagcatcctcctatcaaatgaagacaccccttactcacgcagcgatcacaaggagggaacaatagtgaggagaaagtacgtgcggtcaaccgtcaccgccgatgtaatgccgtaattattgtgtacacgatgtaaactattttggatgtattgattatccatataaatcaattgatgtatggcatatgttaattacgcacgattattagaggtttcaacaagttcaaatcatgtatatgctagttatatgtgatacttacaatttttaaaagttttaaatcacacaggtggcaatttcatatgtacgttaattagagtttttaacatttaatttactagcattcatatgctaattataattgactagaggatttttaaaagttttaaatcacgcaagtggcaattttatatgttaattagagtttttaacatttaatttactatcattcatatgctaattataattgactggagaatttttaaaagtattaaatttaatatatttttaaaactatcattcatatattagagtttttcacaatttaatttactatctttcatatgctacttatatatgactattcgaatttttaaaaggtttaaatcatgcatgtggcatttacatatgttaattagagtttttagcatttaatttaatataattcctacgctaagtatatatgatgattacaatttttattaattttaaatcatgcagtatgtacatacatatcttaattagagtttttaccaatataataatatcattcatatatatgctaagtatatatatatatattggaatttttattaattataagtcatatatttgcttattacgatttatccacttaatttattacagacaaaaataatttttcgaattaattgtcattaatctttgtactttaaataatgttaatgcattaacttctattttataaacacatatgtaagcgaaaatcatatgcagtgctataatctttagtcccggttcttaaccctaaccgggtttaaaaagaatttcgaaatagcgggaaaagatatttactcccggttgttgagaacaaccgggagtaaagatccgggggtatatatattcccggtgcgccctcgtcttcttcaccaacacttagacgttttcggccgatcgatctctctcagcctctctccttcggccgccactgcctaaggcaaatccccgcgccgacgcccgccgtatctc

SEQ ID NO: 9472 - DNA, 57219 bp, Oryza sativa
ctcccggttgttgagaacaaccgggagtaaagatccgggggtatatatattcccggtgcgccctcgtcttcttcaccaacacttagacgttttcggccgatcgatctctctcggcctctctccttcgccgcactgcctagggcaaatccccgcgccgacgccgccgtatctcgccgtcgtctcgagctcgtcgtcctcgccgccgcctccgcctcctccgctgccgccgcatctctggggtgagagccgccgccgccagatctccctctctcgatctctccgatctcagctcgatctctctccgtctctctccgtcgccgccgccacgccacgccgccgccgccacggccccgcaacgccacgccgccgccgccgccgtcgccacgccaccgtcgccacgccgtcaccacgtacgccgccgccgtcgccacgccgccgtcgccacgccgtcgccacgccgccgccgtcgccacgccgtcgccacgccgccgccgtcgccacggcgccaaccgccgccccgatgccgccacaccgccattaacgaacgagaacgagaacgatcgaacgaacgagaagcgagaacgaacacgtcaacgtacgttgccgtgagaacgtgaacgagaacgagaacgatcgaacgaacgagagcgagaacgaacacgtcaatgtatgttgccgcgagaacgtgaacgagaacgagaacgatcgaacgaagacaagtgagaacgagggaacgaacgtgaacgagctagggaacgtgaacgagcgaacgaacgaggacgaacgttaacgtgaaatgcaatatatatatatatatgtatatatatatatatgtatatatatatatatgtatatgttacttctcatttatcctaatacatctttttgtatcttgcagaaaagacgtgttgtcggagtcgtccgtcaagcctgagtggaagagctagccctagaaggaattggagcaggcaagtgacgtaataatataaatgattgttatatttgtaatgcaattaattaagattattagacctgtaattagacttatcatataagattgtgtagtgttctaatattatttgagttttaatataagattactttatttgtaattagacttagtatgtaattattgactacggaagtggtgcgacaagtagcaattgactattgtagtcttaattagacttagcatatacgcacgaaacacttagcatacatgactattttagtcttagcatgtaatattatttgagttttaatataagattactttatttgtaattagacttagtatataattattgactacggaagtggtgcgacaagtagcaattgactattgtagtcttaattacacttagcatatacgcacgaaacacttagcagacatgactattttagtcttagcatgtaattaatattatttgagttttaatataagattactttatttgagattagacttagtatataattatttactacggaaatggtgcgacaagtagcaattgactattgttgtcttaattagacttagcatatatgcacgaaacacttagcatacatgactattttagtcttagcatgtaatattatttgagttttaatataagattactttatttgtaattagacttagtatataattatttactagctagggttgtataatatacgtcacctagacttagcacgtaaggttgtgtagggttctaatgtacgacatttacacttagcatacatgacttagattgttaaaacataaatgtctcgtgacttagcagatgtttcttgtatcaacagatggctgaccgcgatgaggaacagatattgtacgatacaatcgcggagggaagcagccagtactggaatgaagaagaggggaacgaggatccaaaccagtacttgaacgaggaagggaacgtggagagggatgcggaggggaaccagcaggggcacgtggaaagggatgtggaggggaaccaggaggaggaggctagtggtagtcaaccctccgttggacagaagagggcacgcgggcaacgaggtgcagcgaagaagcttgagggtcggcacatcataacggaagtggaagaagatggacgtcctagtgccccggccgaagccgccaagaactatgtacgtcacagcggttgggttgtgcgggataacgtgcctgtcagtacggtgtactggcgaagaacaagggcacgaggagatcatgagagctttgtcccagattcggagaaagagatgctgtggaccacaatgctcgagacattcacccttcctgcgggtacagaggacaaagtgaaaaggtggactctgaagaaaatggcagaacagtttcagaacttcaagggagatctgtacaagaagtatatactgaaggggcagacaccgaacttcgacacattcccaaagctaagggatcactgggacgagttcgttgcatataagacaggtgaacaagggcaggcgatgatggaaagaaacaaagaaaatgccgccaagaagaagtaccatcaccacttggggtcaggaggctatagcgtcgcgatgccgaagtgggaggagatggaggctagcttgattgagaggggtatcgaaccggcaacagccaattggccggaacgatcgaagttctggtactatgctcacggtggaacgctcaacccagctgatggctcactggtattcggcgttcagatacgagaggctgcgcaacgactaacagatgcagtggaagcctcctctcagggcacgttccgacccgacagagatagggacgagctgacactcgccctgcagactccagagcatccaggacgaacacgagggaaaggggtgattccttggaagattggtttcaaggaggacatccacacgtacaggagtcggatgaggagcaagagagataccgaggcgaagattgcagacctagagttccgggtatcgagctacgaactcaacatgcaagaggaggtggcaaggaaggttgatgaacgcatggccgcacatcggtcccatgatccccagccgaccattcctcctgcaatggtgagcccgtcaggaaaccgtagcagctgcgcctcaacggggcaggtaggatcgcagagcatggacgccatgcaaacactggacgaatcgacctgtcccgttgatgacatcactcagcggacaccatgtgagctgcatattcctttcaagaacttatcaataaaggtaagatttagccattccgctagttcctgcttatatatgttgattactaataaataatctctcacaacatgaaggtggcgtcgggcatggccatcccaacggacccttcaggtacttaccactgcaggccgattccagcaggatactcgaaggtcgaagttgagttggtcgaaggcgcgtacgaggacctcgagctggattaccctggaggagacggtgagacgcatctacgagacacaagccatgccattattctatggcgcaggcggtacatcatcctccctgggcgacaagcggcgtctcgtgcaccatctcctccggctccgccatctcctcctcatgatcctgcaccgtctcctcctcatgctccgccagcaccgtctccacctcaggctccagcatcgactcctcctcaggatcctgcaccgactcctcctcgtgctcctacacctactcccccgcaagctcctcttccggcaccttcaaagtcaagggcccccccagctgcaccgcctgcccacacaagggcaacgaagaaggcgaaagttgacgccgccaagaacaaggacccggggtacgattgcacgcaagaggagcttgacgcttacgttgcatcagaagtcaagagacaattcaagcctcgaagtccagaaaagaagattcctatagaccccagtgtcaggaacttcttcaggggtatgtctgcatctgtcaaggaggccatcaagctatcggactatgagcgaacgctgaagaaagcatcttctggaaagtccaaaccagtccctcagcttggagagcaaccaaaccaggagatcgagccgttggtgaccggtaaagaaatgacgatagaacaatttattactgacaccggtctaactacgggtcaattgctaggagtcgcaccaatcgaaaaggcggaagtgaaatacatgtacgaactcggtaaaccgcttgtcaagcctgagctgctgcagtccctacccacacaaatgtacaagttccatcagctgtacatggagatgagcgcctccggtagagagatgatcggagcgaggatcagggacacggacttcttgcaaggagatgacattctctggatcaatttcacacatatctacgaactataccagctggacgccgtcgacgtctctattatgagttgctggattttgtaagtatatcgtccagttcgatttcttactatacgtctcctttaattaattaggtccttgtatataagtagactatagaaaataatatactcccttttatcgttgtagaatggagattcaaagggcccgacggcggagggttttcgatactggattcatcgaccctcggagagtaaacgtcgcaatgctcgaccaatatccacaagaaacagaggacaatctcgtccatctcctgaaggcgcagcattacaagacgttcatactgttgccgtacaacacagagttagtttaattttactgtcttcctacataccaaatttcattcccgtacgaacttgctaagtgtttcatatgtaatgcatcccacgcacattgcagattccactgggtgcttttactcttcgacctggaggcctgcaccgtcaacgtatatgactcaatggataaaaaagagtctacgtttgacaaggttttcgaacttatagacaggtaccgtcataagttcctttgttaattaagaaaatcttgttaattatgttaattgctattacgaatcatagctttaaactccatgtagggcttggtatcggttccgtcatttggtccgcggcaaatggagagaaagacttaggcggaagttcaaatttcctgtgagtacacatgctctacatttatatttctccgattcaaatacatacaagtgtatattaattagatctctcgttgtttgtcatttatttgtagtgcgcaaagcaaaagcagggaaataacttgtgcggctattacgtgtgcgagtattgccactgccttgcaaaccaaatcatcaccacaagagagctcgatgtacgtacaaataaattcaaaatttcagtacgtagcgatttcttgttttattactaatcaatttcatacattcatatagtttattcgcatgagggataacctgaccacacacaaggaatttatcgcggcggttcaagaacaactcatgggattcatcaacgaagaaatccttgatcccaagggtgaattctactacgacggaaacacaattcaccggtccttagcttctgagctagcagcgagtactactactcgctagctaggacatataatggattgtaattaatacatgactacatctgtttctatatgcatgtgtacacattttctacaatgtaaatatattttggtcatatatttctatatacatatgcatttgcataacatatatatgtataaatacatatatattatgcatgtatatatatacatataatataatataatatatatatatacatatatatatgtatgcatatatatgtattgaaacatatatatgcatggtttatatatatatataaaccatgcagcaacagggccatgcaaaaaaaaaaaaggtcagctagatctttagtcccggttatctcacccgggactaaagataacgatctttagtcccggattggtactcccggtttggaaaccgggactaaaagggggttacgaaccgggactacaaagggtttctccaccagtgcttgtcccaaattaaaaacattttacttatttagtattcatgtaccggttcaatttctatcttggttgatgcttctattcttgatgtgaacttttttacccttaaaaagcatatatggtaaaacgtactacatgttacaattagacttgagtacctaacaacaatttactttaaattatacttgttttttagatgcatttaaattaagatagtggcagagccagcggcgtcgtcaagccccggcgactaatagtgttttacgatgattgattaatttttataggtgtcaacggctatggacagtggagatggcagcgactcggacggttgcccgacttgtccgggaggtggctccgccactaaattaataggacttttatgatataatttaccgataatatgccttgctagtattaataagtacactttaaaaatttgcaaaaaatttaaatagaaaaacaattttaattttatattaaattctatttaatttaagtgagaggacaaatcaatataaatatttggatcatttatgctagtagtatatattgcttgtaaattataaggtaaacgttatcaaattgagatgctaatttaattagtcaaacaacctactatgtgtttcctttcgctacctaggacggaaggattggtctaaacaactgtgctggtaggtacagcagcaagtgtttaatttatagggcttaagctgagtttgtttgagcatattggctaggctaaatacttacatgcaaaacaaaaaaaaagtaattagtatatgattaattaaatattaaatgttataaattaaaaaacagatttatttggttagaaaacttgtatatagaaagttttttttttaaaaaaatcaccatttaatagttcacggagtgtactaacaggttgaagctagttgctctttagaactgggcctattacgtactccatccgtttgaggctatttgacgttttgactttggttagagttaaattgttttaagtttgactaagtttatagacaaatatagtaatatttataatactaaattagtttcatcaaatcaataattgaatatattttcataataaatctgtcttaggttaaaaatgttactacttttttctataaacttagtcaaacttaaagcagtttgactttgtctaaagtcagaatgttttataatctgaaacgaaggtagtatatatatacacagggcttcgctttaattaatttgtaagtaaaaatagcaatgtccagttccttactcattactaatttgcttataaagcgaagatatgtaaattgggataactagcacatgcacgttgaatattaccagtcatgccatgaaagtaaagaaggtttaagtacgtgtccttaatccaccttagagaatctgaataatgtatttatcgtatttatatttttttgcagggtattcataatttatataataataatcaatcactacgtaaaagtataacaagtcatgacgcaatatatgccttaacccaaaatctctcagcttgaacatggccaaacgcatgcgtatctctgagctatacaaaccaccaaaccacatgaacaagggcatatatgcctttttaccgtgaagttaatactattaagttgacttaacggaatagagataaacttatgatttggttaaaagaaaagcgaggacaaaatcataaagttgatgcgaagtgggtatagctcaattgtttaggttccttgtggtagaaccaacccactcggggtcaagtcctagatttgacacgggttatcgtatttacgactatttttctttcagtggtagacgacgtgctcttcgactgcgagatgtctgtggtaaaaaaaaaatctcccaattgccatgcatatatcatctagctatattcatatataacaataacaaatctatatatgttctatattcatatataacaatgacagaaattaattaaagctcattttttacagcttttagacggaaaacttcaaccattacaatggagagataagggtttagtgatcaccatatatatagatgcggttgaccagctcatcaatatcggtcattaagttacttatcattgccatttctcaaaacattgctgaaaaggtatcttttaaatgattttagccctttgttttgtttatcctatatcgtgattcgtggggatatgtggtccattattgatttgtcgtctagttcatatgcatgtgaggaaaccactatattatatctctctcaggtgaagtcaataatacttctgaagtccaattcgtaaccgtgaagcaagacaattcaatttagtataattaaattaatcacttgattttaagcatgcgaaatagtgtatatattacgtaaacttaattacttgtttgggcttgtcagtcaagctaaaaagatgaagtccaaacaaacagataagttttcgattgggattttcataaccataaactcactctcttttcctatttaagctaaaagctagattttaataactttttttcttatgtggattagattagctagaatactatccttgaacttttgaggggcttaaaatctactggcttatgcaccataaaaaccgaaaaatcagcttaaaatcttaagctaataagtctaaatctaaaggtgccttactctaactttaagttttgttcatatatcaaaagaaaccatcatagttagcgtctcatatataaaagggttaattggatccatgccattgtaaatttgcctattagaagaatgctattataattcgtctatttggaaccgtgccactggaattttacaaaattagaaccgtgccactaccgtcacgttttccatccatctcttccttttccatcttcttccttctttctcccgtcttcttccctagcctcctccgccgccagccgcacccttcctcaccggcggttgtcacctctcctattgtctgggcacagcgagagtgagagcgacggtggcttgcaacgatgagtttcgatggatgaatcggcaccggaggaggaggagggcgcgcatccactctgcacaagcacgagaggatccatggagcccgagcacaagccgcactacatctcattcccccgctccaaaccctagccgccaccagctactcttccgcccgggcaagtcgacgcccttcaagcactccttcgctcgcccgcctgtccgccgaggaggacgcagacgagcaaacacctgtccaccggagtaggccactgcgtcggagtccacaccgctagatctgagccatagtagcattaccctcgtgccgtccagcgtttgctgatcctcctcgcgtcgttggtgtcgtccagtcgtcctcctcgtgtcgccgctacaatccgctctccatcctcgagctgccggcgggagcccgtccatcctgctcgtgtagtcgccgtcgtccacttgccatcggaggaggaggaggaggagctccagtggaggcctgggcttcactggacatgagaggggaaaaataagaaggaagaaaaggaaagaggaagaagaggaagatggaggaagaagaagaaaacaaaaaaaagaacaagagatggatggaaaatgcgacggcagtggcacggttctaattttgtaaaattccagtggcatggttacgaatagacgaattgtaatgacaattttctaaataggcaaatttgcaatggcatggatcctggtggtcctcctcgcgtcgttggcgtcgtctggtcatcctcctcgtgtcagcaccactgtcctctctccatcctcgagctgggagcccatccgtcctgctcgcgtcgtcgctatcgtccacttgccatcagaggaggaggaggaggaggtctagtggaggcttggcttcactggacatgagaggggaagaatgagaaggaggaaaaggaaagaggaagaagacgaagacggaggaagaagaagaaaactgaaaaaaaaaatgaagagatggatggaaaacatgacggcagtggcacggttctaattttgtaaaattctagtggcacggttacgaatagactaattgtaatggtatttttctgaataagcaaatttgcaatagcatggatccaattaacctatataatgccatcgaaattgtgcagttgaagcatctgaattttttttgtggggaagaagcatctgaattttgaccaaggccaactgatgatgggagcctagttaacataatttctccaaccaaccactgtgcatttcgaaatttagccatggctacatcatagctcatcgcgtggtaggctggtaagtggcggtgagtgcattttacaatgtagtaatttgcttcgatgtgtagcctcaagggtcctaggataggattgcaggaataggatgaaaccatacttaagccactctcctcttccaacgtatgcctttagttctgataaaggatttttttagtccctaaaattttctagtccgctccgcacaatgttccaatttataggtaaattcagaatctatctattactctctccgtttcatactataagtcgtttgactttttctctatgtcaaacttctttaagttcgaccaagtttatagaaaaatatagtagtattttcaacacaaaacaaatatattatcaaactatattcaatgttaagtttaataaaactaattggatattttagatgttattaaattttataaaaacttagttaaacttttcgatcggacggccgagcaccgagatcgaggcaacgaaaccttagcccgaccttggttgccaccgaaaccctagccacttctcctccctccctcgccggagcgggagcgccggtgaaagtggcggcaccgccgcacaccccctcgccggtgtgtgcactcgcccgagggtgagtgcgccaccgtcgagcagccgtgccgcggagctccggagccgccgtgaccgcgtgcccctcacggtgtcggtgatgtccggtggcggtagactttccgcgtgcatcggccggcaatgaccgacagctgcggttggacttcccgcgtgcgtcggcgatggccgacagcggcggatttcccgcacggcgtcggtggacttcccgcacaacgtctaataacaacaaaaatactaatcataaaaaaatttcaaataaaacgaacggtcaaatattggatatgcagaactatacttatattcggacggagggagtaagttttaaacttttaacatgattaaagtggttcggactaataattgataataattgtagtatgagtagtttaatggtaaagtcaccgttataagtatgggttgttataataaggacaaaatttaaacaatataagatgttatattttaggatagagggtgtaaggcagaggctatatgattagtttgagggctacctagttttcagccaattgaaaataccccaaatttcagtcaatttttttgaacggccaaggttgcatcgagatatttgtgtgaacagtaaatcttatcatctcctcttccctttccactccacaactgcattcaagctcaggagctccatgcactcgagctcgctaacaccaccctttttccatcgcttgatcatgttgtccctagcctcaccagcaagctagaagatcacgtcaatggtgctggcgagccctgccaaactgggatcctcccccttacaactcctcgccttcctccctaagccagcagtgacaccatcccctcccccccaacccagccatccactctcttcctcatctctggaggcttgcgttgtcggattcgctgccactgactgccacatcctaacccatagcctccctctcttccactgccaaccctgcccaccgtcagcccatctccatggctccggtggcacccctaccgcctcaccacctatccgtcgacaccatccaccactgttctagccactgcccaaggccatccctctaaacctggggaaacccttcttagcccccctcctaacctgacctcggccacaaaccctaaactctaaactcaccatcactgccacattgtcaacggagaagaggagctcgctgttgctgtcgccaccgctaggaagtcatcctcgggtgagtctctcctccggcttctccttcctccactggctgaagctttaagacgtatgattctctgatcgttggatttcaatctaatggctaggaagcattgactaagaattgggggaatcacagtcacctgaggagtattagttttatttttttacatggcatgcatgcaatattatattttaactattattttcttaaaattatatgaaagtagtttcaaacacaaattcaattgtgttacatactaattatatataaatatatatattgttaactaaattattattggtcagaatctagaaatgttgatttcttagtaaaaacatgcacggcttatattttaaactaccctaatcttcttcatagcggacttgtctcccacctccgcactgtagtagcatttgatgatttaatcgtcatgatgaacaattgtcaaaggtgagtgtttgttgaaaatatagtgaatagtgtttttggtttgagaacgatgttgtccactctgggaggcagttcagaccggacgggtaccaccggtcagaccggtggtgattgggtggtctgactggatagtccgacagtcaaactagtagactccaggaggaagttggtttcgggttgtcttcgtggattgtctagattgctttatgtttatgacttctagatggtatctatttgtatgtgatactattgtgtgctaatgtgagtgatcaagttggtgcaaacttatactcggatatggagtttctttgttgttcatgtgcaggtgttgcttgaggccatgggagtatagccagcgatggatcgggactagccactaggcttgggataaattgtggtctagacggtcaaggatagcacacgggatgctcagtctatagaacaatgcatgtggagatgaatgtttccatatggcatacacgtggtattgtgtgcacatggaaagatgagtcaaatttggattggagtccaagtttggaaagattggagtatggagttgtatggggatgttgtttcccttgtttggtaggtttcctatgtgattaggagtcctagttctagttggattcgtggataggggcaatcacattgagggtataaatagatgaggggttgagatgggaagatatcgattttttcggagagaaaagttagggtttgcctcaaggtttcaaccctagttcgtcagttgagagaggagtgctttagatgcacttgtagacacatattgatggaataaagttgatctactcacaagagtttcgtcaatacgtgtttttctggatcccgatggtttagactggctaggaggcagcggttagactggcgagacaccgacggttagaccggtgacatcaatctggtcaaaccggcagcggcaacagcagatgacaatagctataagggtggttgaaatggtgcatctacttcaatcagaccagtggcaagggcacgatcagaccagaggaatcacaccggtcagaccgatctccatttgctatacgaaggtaacttttaattgcacaaaaagttttaggtttttggtgttccaatcattcaaccccctctctggttggcttgattcttgtattcgatccttcacgcacctcccaccgagcctacttgtccttgtcccactgagcgcacctgttctcggccatgtccttgccttcctcctcgttttgctgtcgcgtcattgtccttatcattattgccatcgtccttgttgtccccatcatcggagtccttcagcggtggggaatcgttaaaaaaaccacttgtcatctgagtcccactcatccctgagcaatggcagcaaagaggggaggtcatcggaagacgacaccggtgccttctccgatgatggcgagctgcttgtcttctaatccttgtctagaaaggagcgatggtttggagaggaaaggattgcactgtgttttagggctggcgtcgttcgccgcatctcaactaacaaagaagagtaggagatgaagcggcgcatgatcactgaagtggcgctacaataagctgcgagaagatgaagatttctagagaacacacgtggttatgcaaggctcttgtgaaaatgtggttccagaggcagtcagctatgacctatggaaatacaaccattagtgaaaccgctttgcaaaagctattttcacactcggttgtcgtaagtaactaccttcactaatggaacattagtgcatgcggaattcttatgtagccatgtgtgaaaatgtgaaaaattacctgaagcctgtaccaattgtttctgtagcagttacaggtcttataaacatctacaaaccaagaataccatatctacatgcagttttgatgcagtaaaaaaaaaagcaacgggattgaaataagcatggtgtaggctcttctcttctactctggatggctggtcttaaaccattccaaaatgttccatctggtttgcttggtggctacgtacctcctagtcaaatctaatagctctttcttgggattatgttgtctaagtaaaattggcggattagatctggagtgacgctatgtcaaatggtgcatgacaacctagtctcgcaaaccaaatgatgtaaaagtctctttgaaagataatttgctcgaaagagaaagtgacacattttatttgtttcatacccgataagcaatagaagtaaataacaacctaagggagtgctagtttttgaagataaattaactatttgccactcctataatgggccactgatctctagccaattgccacggttacatttgtcactatatatttatcactggagagagaactttttttaaaatgttgtgcctctttcatccatatggagtgacatgcatacatgccgatatgaactattggtgcaaaatgtccattttgcccctagcccacatatgttcctctactttcatgatgctatccactaaaatgagttcttcatccagggacgcgatggctccagcacgccaaccgagaatagtaagaaagagacatcggcccaacgtcacgctctgcatatcaacattcaaggccattgatgacctatatttgcgaattgctcgacaaggcctgcaataagcatgtcatctaatgctctgacattgtcgccccatcatcgatagtgactctgtgcacctcattggagggttgtcgaccagttaaaagtggcaagaggtgggtaggggggtgtttcttattcggaatgctggacaacgttagggccttgttggcagtggagtgggatttgatgaaggcatggaggtggctgacatccttggagtagagctatagagccttgatgccctactccatagagacaaccgcgcgcaacaccattgtccgctatattgcggaaggcttcggcttgtgtgtgctgccagcttggtgtctcgatggttggcatgacaccatagtgctagaggatgctccctgtcgatagtgtccactaggtagcacaccaccgcgtgtcgcgccagttctttggtgatcatccatggcagatgcttctcgacttctggcgagtgagattgagatgataatgatattagttcaaggtggaatgggtatggttgcaggttgcttatgctagtcctacccttgttagtgctcaaagataaaaactttctggacaagataaagcgacaacagaaggagcaggggccaaatggacattccacatcagcaacgacacattggcacaacactctgttaccgttgcatggacgaaaatagcacaaaattataaaaaaaagaatcattccctctcttcgtaaacattagcgcaaaattaagaaacagggccgattctgagattttggtggcctaggacgaaattaaaaaacatgggcccttaattttacatctaaactcccgcaagaaaaaaattacatctaaataataatcaatatagcgctaaatagcacacaacgttttacttatgcataaatatttttttaccgctacatatttaatctgcatccaaaagcaatacttacagaaaacatcataaacatttctagacgcaaagtcattatgatagtatccatatcaatctcatctagtggtgtctcttttttttttacgaaatctagcatttctttgtcaatgtacaaagttgccaaaccgtttaaccatttaatttatcgacgacatggtatgtagaacaagcttagacaatgaaaagttggaatattagtggtcaaactcatatgggttacaaaacttagaaagtgcatagttaattcaaacaaatctttatttgcaaatatgcaaaaggatatattaaaaagaaatcaacatcatgatcagttggaagtcatcacaaagaagagatcagaagccgggatagcagcagactcttataaagaatttaaacaaggggttgtggctgggcggatgtatgatggtagatctgtactcgttggcttgtcaagctcgtaggctgccagcaggcttgtggcgggatcgggattaggtgcccctcccccctcccccatatcccgggatcgggattaggtgcccctcccccataccccgtggctccatcctcagcaccaggcaaatattctctctcttcgcaaacatattagaacaaatacaaaaatgattacaaacagtttaaaattttccgttttaaaagaccatatccaagccacaagggtgacctactgatcgattatcaacttgtcctactccgaatttttctatcagccccctcccagattttgtaggagcatatgcctctcaccacgtggacttacagtatcccgtaccctgcccccctgccctcacgtaatagggcctcagtgcctcaccatgatgccctttatcattcgctcaccactagagcacctacacctttccagtgggcccaccacgccctggacacttgttaacagtttatcaatgtaccatatccatttcatcaaatgccatatctgagagcgagagagagagcataaagctatgggtatggccaataataaagaggccaagcagcagctggtgaaagaagagacaaaatagagtacagtgatgtaaatgtacatgaacacagtggaacagcgacacacacacacacaccatgcactttgctcagcttgtttcagagcatctatcagctctgagtcgtcttgagtcttgactactactcgtactaccactagctctcttgagcttgagcaccagcccaggctctactgcagcagctgccatacatttctagtagctgattacatatcgtatacttaattagcactttgcacttgtgtactagtatgtgaatgtgaccatgaacaccccccccccctctctctctctcgcctgcatctcatctcttcttttactacctctgttttttaatatctaacgtcaacgacgttttggcaacgtttaaccattcatcttataaaacttttttgcaaatataaaaaagtttagagattttctccggtccagcaaaaagtacctcgaggtaccggtacattacggtactgaatcgtttccgatcgttggatctagctggacagtatggacattgttagatccaacaatcgaaaacgatttggtaccgtgaggtaccggtacctcgaggtactttttattggactatagcaaatctaaaaaaattaagtcatgtttagaaaacatttgacgataaatcaagtcacaataaataaatgataattacataaattttttgaataaaatgaatgatcaatcgtatctcaaaaagtcaatgatgtcatatattaaaaaacagatggattaaggtttagttttgccccttccattgatctggtcataccacaacacacaattgcacacatagaattaagaagaacaagaagacgtgtgtacaagtgtagtactccctccgtttcgtaatgtaagacttttgctcatattcatatatatgttaatgaatctagacacatacatatgtctagatttattaacttctatatctagattcattaacatctatatgaatgtgggtaatgctagaaagacttacattatgaaatggaggaagtagactagtagtgacggcaatggtagaattatcactatcagttattgcatccatattacatgtactatcactatgttgtgtacttgagctaggaagagcataattcagtttctgcctgatataaagacacacataatctcaagtggagttgttattggttggggttagtgctatcttcagcttcactaatgatacctccttaccctaacaacaaccttcaccatcaccaccaccattgcagctcaaaccaagaaccacacttaccattacatccaccagctttcctcatgtccgcgccgtcgtcgtcgtcgtcgccgtcgacgctggacgagtacgacgcgcgcttcttcttccccggcgccgacgcgtacaccgccggccaccggcaggatgaggagacgctggaggccgtgctgcggcagccggtgacgacgacggccgcggcggcggcggcggtggagggaggtggcggcggtggaggaggaggcgccgggggatcccccgcggcggcggcggcggcgacgcggaggcggccgttccggacggaccggcacagcaagatccgcacggcgcagggcgtgcgggaccggcggatgcggctgtccgtcggcgtcgcgcgcgacttcttcgcgctgcaggacaagctcggcttcgacaaggccagcaggacggtggagtggctgctcacccagtccaagcacgccatcaaccgcctcacccttcccgactccgccgacgcggcggcggcgcccgcgttcgccgccgctccaccgccggcggatcagcattcctcggccatggccgccgccgcagcatcggctgcgaaggagaaaggggaggcgagctcgtcgagcaccaccaatgcgtcgtcggcgcgggcgagaaacagagaccacgacggatcatcgccggtggcgcccatggacgagcgcgggcgccgcggtgtcgagctcgactggacggcggcggcggcggcgagcaccgagcagccgatggacggattggagtactacttccaatactacaatcatctggaggagataatgagctgcgacccaacgacgacaacggatgagtaaagccagtaaaggtgatttcttgtgttaaacaatcaaacaaaaataggtatgaaaactttgaaggctttgtatttatatggcttggttaatttggccttcctctgtcatgatattttgctacttaatttgctagttcacttctctatgaatcaattatcaataccggtttggcttgttatttgttgttttttttattttgagaaaagacttgttgatttgttgataacttgatatgctaatttcgagtatttgttacttccgatttttggatatgtgctatagtttttttctggctatattttctgatttttggtttgtttctatgtgctagtttttggctgacttaattttggtttgtccatgtgctaactttgagatttttgaagtttctctaattagttctccggtgatccgtggttggccatacgagtactcaattcttaggaacattttgtatcgaaaggtttgagctagaaatttcaggtgtaatccctgcaccctagaattctagctagatagaagaaatttaatactcgatcttgatgtttttataacagtaacagcatgatgacaaaccaatattttgtcctaaaaaatataccattgaacagtaattgatgttgtaaaatcatttcagtttctctgctaatgaaaattgagggttccttcctcgtcatttttctaaaataatggtaaaatttattgttttgcatgagaaggatgtttttaacttgctagcactagatctgcaatcacctgcatcaggatcataagaaccataagtgcctaagttgagaaactcaaaagcatgcataaatatatgatatatgatgatgtatgaaacattttatgaatttggtcatggtcagaaactaacatcaacaggtaaatgtatatcctttgtccaaattaagtttggggacagaggatgaacaagctagttacctatggttttgcaagtaatttctactatataaaagaacctagtggtggtgaatctgccatcccctcaaatagagatgaggtcttctatggatgaataaatatatcttttgtgcatgtggcttggactttttggatggatgtttgcttgctaattctatatatttttttccgagaatatataattctcaagttaaaagatatgatatttaaaaaaaatcattgcaatgcatgtaatttttgaaacctagtacaacataggacatcatgaatacatttaacatatatgtgttatagttgccttcacaaatgatagatgcttttgtagttgcaaaagagtgactataatatatactcctatatctttttagttaccttcacaaatgaagtaatacactgccaatataatagcttatttcatcctaattcttcaacaacatcaataccattatttttttcaatgacattaaccaatgcagtccttattttaattttattgcacgcaccatacatcccgcaatgaagatataaattgtgccttactacgcatacctgaatgcagatatacaatcatgctctttatatgatatgtactaataactgcatatgtccacataagagtatagaaagcttttgttactttcttacagacaaaaagggtaacttgatcatgctccattgattggttaagaatggcaaatatctcatatagctgtatcatacacaaagcagagcaacaccagctggtttagagtaggataattaatttatcccatgcatcagcaaaatttatctaggtggtataatcagttttctatcttaaagtgtataattttttttataacagataaataagcttcggaccacttttcataaatgtttttttttatgtagaggcagacctaattaactttaatttttggggtgtgatttggtattcttccaccagaaaacatttgaatcttaaattgaaatataaaatttaaatatttcctgcatatttattactgtacagtattgactctatataatttattgcaatcacttatgcaatgacaaggacaaattaaaaagtatctggagtcaattaaatcaatttcctttttattgctcatgtatttacatactgcatttctgaattatacagactagctatagtaaacgtatgtgtaattgtcattttcatgtctataaaattatatgtatgaaaaggatatggtaaattgaattgtatttatatatcatggattttttatgcatgcatttttttattccagttccatgaaattatgtatttttttggttgattgcatgacagcatgcagggagggaattaaggtcttgtttagttcacccccaacttccaaatttctatcacatcacatcacatccaaaactttcctacacacataaactcctaattttttttcaaactaccaactttccccaaactttcaacttttttcaggaactaaacatagcctaagacatgcatccatatcagtatattattatatacctaatcttactgatcccgcatatacatataagcaggaggaaattaaaattttgttttgttatttgttttagatatatcggtgcttacactgagatttgtctatggtgcactctacaacaattattattactctgtcaaacggaacataactaaatgtttggatgcatttgtaactgacctttttagcttcattgatcaaggtcttgtgaatatagagattaaaaaaataactcagaataaaactaacgggctaggtgccaacttttttaactactaggtgaaacctcgcacgttgctgcatgagtttagtatgataacaataagtaaaaataatgtataagatagctaaacaacataaacttatataagcactaaaatcaattgatgtgatatggcttaattagagaagagagaaataacattaacgaagtgaggatgaacttacatagattataaaaagtaatgaagatatatattgaaatattatatgaattatatgggataatgatttaacatgctttcattttaaaagctctaaaatgtaataaattttaaattatagataatatagcatgtttgtatgatattaaatgtattgactgttagtggatgatgatgtggcatctttgcatgttaaattttagtagttagtgggttataactttatagtaagataggattgctcatcaagagtgtaattagcatggatacattatattgaactagcaaaatcctcatgctttgctatgggtaaaaggaaatacattatactatgtcatagcaaaaaaaatatttttttattaaatatgttagtatcacttgtttgcttatttaaatatatagtattaactagtttgaattaaatattgggctattccataatattaataatatcaagtcataatttatatagaaactgcagtagtgggaaggcagattcactgccactagtagtaggtatagactatttgatttggttgttcacccttgtataaattaattaatgtaggcttatatctatagtacttgaatataatttcaagagctagcatactttaatatggaaatgatggcttaaatatttctccgctcttatggtatgctctttggcttatcagctgctaccagaattttaaaactcaattttagaattaatttgatttttttccatcatatataattaatttactttccagcattgctttaagtcactaaaaacatacataaagttttactcataaattattttttagacgtgtattagcgttacaacttaattataatcaattgtaggagtaatgatgtgaatggtacactagaggtgattcgatatagctagccagcttgccatgtatagcaaagaagttcggaataattcattctgttgagaggagtgtcattgcataactaaataactatacaaatatttcgaatcttgaggacattcaaatttctaaaattaacaacgtgagtcaatatcttaatttcccccaacatatatatgtacatgatactttctttcgaaaaaaaaatatatgtacatgatactgaaaagagatatgcatgtatgacgatgaaaatgcccagtgtgcatctgaatgctgcatgcatgtggcatattttttttttcggtgttcagaaactgaataaatgatgagtacaagaagaggcaaggaggttcatacatcaccatagaatttcgattgttattactccctcttctataattcttacgatttagacaacgacacggttttctaaatatatctttgactatatttttctattatattatatactataaatagatttttttacttttttttaagtactttgtaaaacaaatctatatatgttgttctagtgcctttaaactaaatgattttaaagttattgctagtcaaagttataaaaatttaatttaaatcttgtccaaaacgtcaagaattatggaactggagggagtaattagcaagcatatgtgtgtggctacgagagattttgttgaagcaaccaaccaaaacagaaaagagaatttgctggctagtctgatcagttcagtgctaattagcatacattctcatgaatggaagaagctagctggtaaataattaacagagggaagatatcttacaggtttaattactgtatgttcagaggagatcgaggaacggccgggacgatgcagctgatggagaagagcgatgtatacgatcgaccaagcatatgataagaagggatgcagaaagcacatcggcgaattgaagttgttcttccagagatatctatctatctatatatgatgtagggagaagggctccaggtaggggcctggccgtgctagccatctcactatctgcaagctgagctcctgacaaaatgctaagtttgccaatgccatttgtttttttttttctaccgtgtcagatcgagagcgtgatcggtgtcaagacaggtcgtagcagcatgagcacgtcgctacccgccatagcatcgtcctcgtcactaggggtgaaaattaacggaatcggtaacatcttttcgaaaacaatgttcgatcgactgataatggatcatatttatcatttaaactactcagtgccaacattaatacgatgaaaaataaattagaaaaaataaactttataaatagctaaaacggtactctttatatacggaaatagcgctcggttgatagggaatttctgtaaccgttttggcccgtagtcctcacggcctcaccctacccttctctctctaagatgaagttcgtgcgcttgtcttaatttctgattggatgccaagctagcgtgcaatccacggatgtttcctctttcgtgatctctccgtgattgatttggacggccacggacggttcagatcgatgtccggtattacgcgtttctcgtttcagaatttggcttagggcagcaccaatagtcccctaatccattcccaaaactggttttgagatattttagtccagaaaacagctccaacagatccctactctcatgcccaagatttggagttccctctcctgaatttgcctctcccgctcccagtcgtgtgctcctcacctctctcttcccattcccgcgcttgggtgcgatctctttccacgcgggaggaagaaaacgaaaatttatgttggtacgtagtttatttaatagaagggtccacttttagtttttaggaattgaatttaggctctcttttagagggagtaattttttcgcttcctatattttcagtttaggaaatgaaaaattaaattttgggaagctaatctattggtgatgctcttagctggatttacagatggtagggaattcattggctatcttggatgagtaaattttgctttgcgccaccctttattatcgttgtttcgatttggtccaccttttaataaatagtttcactttgaactgggtaatttatttttataacaatttggaccacactcaatgattttatctatctgcggctgtgtttagttcgtgtgccaaaatttttttcaagtatatggacacacatttgatgtattaaacatcttgtaaaccgcgagacgaatctattaagcctaattaatttatcattagtaaatgtttactgtagaaccatattgtcaaatcatggcgtaattaagctcaaaagattcgtcttgtgatttacatgcaaattgtgcaattgattttttcgtccacctttaatgctctatgcatgtgtccaagcatttaatgtgacggaaaagttgaaaatttgaagaaaatagtttgaatctaaacacggcctgcatcaacttgtcataatataactgtgggagtttattagtgtgtaggtgttgacgtcgcactttaaatcattagtatgcttgagaaatgagttgggatgatcctaaaattacctgatccaattcaaagagagaacatttgttaaaggttagcataaaataaaacatctggtactaaaagatgattcaaaataaaatttactttttatatgtacagtacgtggctatagatcgaattgaattgggcacagtgctggctggccggttgcggatggaacgttttgtaggttttggcggcacgtcgtcgcagcagcagcagcgattggacgcgcaggacatttgttattaaaaactggctgccggggccgggtataatgtacagtccgctgctagtagctgactgttcaaagcgcactagtagcagctggcagcagcatgcagcaggccagcagctactaggatggatatgatgcagatctctgaagtctacaaacctgatctccgagagcattcaccgtgtgtaacagtggcatttaactatttatcgcttttaagatacgatgataatagatttgccacttgttatctgacatgtagacccttatatgtgtctatgatatattaaaccggtgacaaatctgttatcaccatttataagagtggcaaatagttagttattcctatgtaatacggtaataagataagatccatctactatgcataaagcaatagagagatatgtgtaatgtatagaacacatcaactctataatgggacacatacctatgagtatcaagatggactcatgccatacttataataaaatattatttttttatttaaagtacgtacctggtcttaagggaagagcactacttttgctatgttagtgcttgagacctgtgtttgcaatgtgtagaacttttgctacattgaaaagattttctcagttacaatgtataataaaggttaatttataatgtgggaattagctagacatgtgcttgagacctgtatttgcaatgtatggaggctttgacggcaccgaagagggagggttcgacagtcgcactgatgggccaatatgtggctgctgcagcagcttccagagccagcacgttggtgagaagggaagcaaaatccccgagcacggctaggacgacctccatgagcaagcgctagctactcctaccactccaccgctgcaaaatcctcccccttctcaaggagcaacctgagcatggctaggacgtcctccacaaccgccacctccagagcaccgcttgctgcctcgggcactagaagatcttgccacggctgttgtagtggtgcgaggggaattcttggtggtgtcggcattgaggccggtaatggtgggaggtatgacgataggtgtggcaatttcctcgatgaggatggggacccagtggttacccgcccctacggggccggcggcagtcccaattcctacccctcaagtgagttgggtcgaggtttaagggtaaaatttttttgtcatgtcacatcggatatatggacacacgtttgaagtattagacatagtctaataacaaaacaaaattacagaatctgtcagtaaactgcgagacgaatttattaagcctaattaatccgtcattagcaaacgtttaatgtagcaccatattgtcaaatcatggaacagctaggcttaaaagattcgtctcgcaaattagttgcaatttgtgctattagttattttttagcctatatttaatacttcatataggtatttaagcgttcgatgtaatagggtgaaaaattttagggtgggatctaaatagggccttaggaccggaatgatacaatttaacaaattctaaaacccacatctatgttaataagattgcagtcctgagtttaaaaaccggccatacgctttattcgaaaaataaaaaaaaaacactaacgaaacacttaaggcggccatatatacacgagactgtgaagaccagtactgtggccactatagctagtaggagtatgttggatgttgctagtatagcgctagtacagtactcgatcgtacgtagctggtccgggctagctaggtgaggcgggcggcgaggtaagagctgcggagcgatcccaccaccggtggggcggcgccagacgccgcgacgtgcgtacaagcatatgatgatcatcaacgcgcgcgcgcggtgtgagggccggccggccgccaagaaatttaaggtgcgtgcggcgccggtggcgaggcatggcatggcgtacgtgtggattgcgcgcggagttcgatcgtgcgcgcgtcgtcgtcagagaggtgccgcaggttcgatcgtgcgcgcgggccggctgccggccgacggggctcgcccccgcgatgtgagaaagtactctgggatgccagcgaggatgttgctagctctcctcgagcaaagaacacgcaggatcgcagtgtctcagcagcacgaactcgttgctatgggttaatatggaatccatgtcattgcaaatttatccaattaaacaattccactattttcgtgacatcaattggttgccatcagaattacgtaaaatttaaaccatatcattacagggtggatccagaataaaatttaaaaggagactcatctccttcttccttttaagttcccctactcttcattttctccctattcttcccctttcatctccccttctatcaatggtgatccagcgggccggggtagggggactcaagtccccccagcacccacgctggatctgcccctatatcattatatacgtcgtctcggacacagctggaccaggtttttacctaccatacccggccctagcctttagaggctggcaagtggggcccaccttggcgaggctggtccttgcatgggagctcgaggaggacagcgacaggtctccaagtcttattcatgccactttggtcgtcatattcgagaaggatggggatggagctcaccgtcgtcttcgagtcttcgtcattgctgccacctggcctccttgcaacacttcgctccaagccgctgttgaacccgtctgtcactagcattggcaactttttttgacaagttgacaagcacgattgcaacacctaacgtcttgcggtaatcctagagtcgccaaccacctcaatctagtaaaaactagaccaagatgggttttgataactaaaccgactagcgaagccgatttctagataactacccgtctcatgggcaaaatggaaggttttcaggacaaacctacaaagaggtgtcgcactctcgcagtggcggcggacggtttacagcccaaaccgacaaagatggacaaactaaaagaaaactaaagcaatatgaaaaacgattcgattgattgattgtagattgattagttacaattaaaccggccatgtccctataaggggttggtcttaccctctacaggccctcctccacgttcaactcggggtagaaaccaaaggaaacctgaaacatgccttctcgagcaaggaaacttcgagacccgacaaaacacactcagactcggaccctgccggtcagaccggccacacaccgccggtctgaccggccaacacatggcggtcagaccggcccacttcagaggaaatcggcagacttccaaactttggcaattttttcctattttaatcctaggtgccaaatttgggtataaacaattggatcttctcgcgctactactagaccctccaccactgcgagaagctcgccgccaccaccagatgtgctccatccactaccaaacgtgtgttgacgaaaaatctgcactcgatcgatggtgctagatctgtgttggcgcgaactaagttgacgaacacaacagcctgggagttctgcttagctccagtgcaggttctaaaatcgatgagatgtgggcgtgccagtcaatttgatccagcaactggtaaaatagataaatatgttgatcaccaaagagtcgatcggctaacgagccgatagagcgatactagccgatatggataccagccaatgctgatgggattttgagcaatcggatatatgtccaatgtagaacctgacacttgagtaaatttttttttacggttaaacaatacgagaggctcctactgtgctatattaataaaagaatggatgtacaaagggtggatatacaaggggggaggaagaggaagcaaaaaataaagaaaaacaattaaacaaacaattagatcagctaaagttttgtttctatgattgccagctgggtttgtctgcaacctttcttcatggaagtgctaggaattggatgttggaatatctcgaatagaagaaatgatctcatattcaataatgtgcccatcaaccttagtaaatggaaatccgacttcagagaggattttactcggcatatgcacagagtaaaagttgcagacacttgagtaaataatggcataaagacaatcggctgatgataatgtaataaaacaataatataatccaacataaaccaatcggctaataatggtatgatacaataagcattgatccaaaggttaaagcatatatcggctggaagtttgatgttgttaaatccaaacgaatagataatcagtgaaacctttattgcgattggctaaaaccaatttgtatgtaatccttataagttgatgcaacatccagataactcattggctgaaaccccgatgaaacccttattggtaatcaaaaagtagtctagagactatggttctaagcacgacttagtaggtcaaacccaattgatacaacactaagtataaaaagaaatataatatcttgacaatcaagcctttgattgattttcaaggtggtggataccttagctaatctagatcaacaaaataatttagctgatactggcaaaaccctagaaaagatctgacggatacaagtaaattgaataatcgacttggattaactaagatatatgataaacaggtaggcaaatatatcaaccaaaccatagcgatacaagaggtcgaagcgatgtagtcttgaacaacgccaatgtagccgatacaattactaaagctgacggacgtaggacttaccccttcgccgaagatcgaaagccaatgcagccccgtgtgcaaggtgccaaattctgccggttggtaaagaaaacctcaaaaaagagggtagcgatgcgccaagagtagttgtattgatatgtgagataaatccagcaaccctgggtgtacatatttatacccatgggtagataagagtccttatgggacatgacacaaattttcttaaagataaaaagaaaaacataaaagccttatcggacactaaacacattttcctaacaattaaaggaaactaatagacatttactaattaataaataaacccccataccgcattctccttgaactcggtttcttttagataaacttactttaattgattaattttcttaaccaaatctacccagaatctgaattgcatgttgatatgacacacttgcatgttaagttttaggagtcagtggacatcaaatgtatagtaagataggatatggtatgtaaaaacttgatcagcctatagatctaacaaggtttttaattgtgccgcatatttcactttgttggatcagcctgcaatattaagagcatttgcaataaaaaaattatcatattatggtatctttctctatgcgagtagtttgagtagaccctaaaaagatagtactgtcatactatctcggtcgactgaattaccccccctctcaaatactatatattttacattctcaactatttaaatcggacaaataaccccctgactcgattcatagtggttcagatcctacgtggcagtccaatcagtgctttttattaaaaaaatatggagcccacctatcagatagaagatagaatctaacaggtgggctccaccgatcatagtgttgtgtttatatagttaatatattttatctatatcggtgggccccataataattcctagggatatttatacattgtaggaattttcactacttggtatagttaatataggccataactctaataatatcctactacgagcgctcataaaacaaatataccgcgtgaaaactactctttgggtatgtttaggggaagcttctagctgctgtagcttctcctaggattagaagctcctccaaacaattcagcttttgatccagattctgagaaactgtagttgtagaatatagaaaataaactagaagccagaagctgggaaacccagcttttccaaattctctgtgcatatgccgagtaaaatcttctcggaagttatttcttcgaattttaagctcccgagagtcactttgattgagtgctcataggccacatgtaccccttgttgagctggcaggtcaaatatgacgtggaagtatgaagcactcgcaagtcaccgtactgtcctcatgagaagctgctcagcaggcgtcacctctgcgcctgtagcttcagaaagcttgtacacaaaagcagcgacagacggggtagcagtagtagcacgtcatacctgtttagaagccgagcaacacatgtaccatcacaaaagtctctaaacaaaagcatcatattcataccacttatgtaacacctttttcttaggcattcctattgttaatcactggactatgcacggtatctcacaagcaacatagaggaacacaaaaaccaattagctagaagtagcagtttactacctcaaacaattgcaagatgctagctgtgataaagctccaaatgtacaagtatgtgaccaatgtttcatactgaaaaatgctacgtttagtctacgtgacttacatgatttacatcttcaaaagcggtataccgtgttcatcctgatgcatgacagcaatttttttttactgtaattaattcgttgcggtttatctagatttgatgggggctatctacaagctataagcatcgaaacagcagagcctcttcttcagcagccaccactcgcaggttcaatcgagctccggaggccattgcccctgagcgacgtgcagtgctcctctgcctccgactgagagcagatgatcaccactgacagcccgtttacatgagcctcctgcatgatgttgacggcattgtcgacggtcatcccggggataactttcatcaggacttggacgacgtactcacgcctgttgtagttgtcgttgtggaggaggactcgatacggaggcgtcattttgcgggattttctgcagatcaggggaattgtgttatatcagtattgaccaacaaaaactatttcaacaggtacaagacatccgatgtgaaaaaatattactcagtccgtctgaaaaccgatagaaattccatgtagcctttcaacaaggcaatgcttttgtgtagggacacatgtcttgctaaggcacaatgagcaatattcaagaatagcaactatgtctttagccaatctgctggtctggtcagactacagaacatcagctacatgacatatgctcacaaggataaaatgatcaatgtatcagaagccacttaattcagaaactagacagcgggtccagtaatcattgaaagtaaaactcaagacatgtcactatggtttcaaacagattaaagcattggcaaacaaatcattgtaatggtacttgtgtacaacacataataaaaatcaaacatgtttaaggaaaatcaagcaatgatgacaatagaacatctaaaccacctttaaaagaaaagaacatctaaacgagctaatctgaatatagaattggttcataatgtgctgcaacaatcaactttgtttatgcctgaaaaagatagtaaatgtaaaatgcgtagcaacaaaggtaatcctatcttcctatatatttggtacccactaaggggcatttactcttataaagcaagacatgcaagaagccacatcaacaattttaaaccatcagatcacattagcacaatgataacaacctttggatcaagaagctacttattcatccaattcaattttatttaacccttcctcccaaaaaaggcaatcaacggacatatcagtatatcccctactaggagaaaatatgcagagatggttctgacaccatttaaaggaacgattatgttcccacactagcagttgattttgatggcatgccctacttgacataactctgataagagcaagagggtgtttctgaaaagatgcaaactgaaaattgcgaaacagacatggctagaaaacacttcagtagttcagtttcagtcaagcgggatcctatgactcctgaatatttttgtacatgtgcaattccactatgcctaggaagaaattggctttattttgcaggagggctctcccttttactgttgtcctaacaaactggaatttggctagatgacttttatagtggtttggtccaaatatttgagtcataatgaaaatcttgaaatccgtttggtagcacttaatgaaaattctgtaattacaactttccatcattatctggggtaagttcacaagctcagacctcagagcctagtatgaaattttagttcacatcgtaccatttcttttcagaatcctagagaatctgtactttacacaagatagagaaaacaaatgaactgtaaatagcacattgttacctaacatcgaattcagactggcgaccaggagtaactttctctattggccgatcaagcacgccaccacctttccctggtgcagctgctgctgccagagccataggaatggcaggattcgggcaccttcccctgtaaatcgcatatctttctcctgcacaacatgtacagaaaagatgaacaaacaatcctgcaacagcaaccaccgaccaaaatgacatagcaaacacaccttcaatctaattaaaatcatcaaatttcttgcacataattctaaggagggtaatttgaaaggataggatgatctcccatggaaaataagagcaaccaaaaaaacatatataaccaattaggcaggaagtaactttggtcatggccacagcatatgttgcaagaattaacaggcacagcctattggtgagcagaacgatgtcaacatttactaactgatttcgtcaattgccactaccaagaaccaattaattgccaaggacacacacgccaaggccccccttccttccaggcctccagccaagtgccaacccacccaacaatttccaaaccgaccgaattttcgggcaatttccaacaggagcaaccctaagagcccaattacgcctatttcgggtcagtggcagtgccaaactaatatctcccatacttgtagcgaagaactaacttgcccccatcatccttatccagctactagaacaaatagacagagaggagagggggggttacctcccaccgcgtggtggtggtggttggagagccggctcgcggagagcgccacacggctgggcaccgccgcctccatggctgcctctccctctctctctctctctctctctctctctctctctctctctctcgccgtcgtcggagtgtggtggcctcgcggccgcggcggcggtggtgtggctcggtgggccgtgtggatgcagcgggtgggcgtgcgtgcggcgaggagagtaggggggagtatttgtggcccagttgggttgttgggttggcgtcgccggagccacctgttcggggtccggactcctaggccactgatcctgatccccccctcagattttttttttaatttccttcttcctctcgccacaaagcattgcagtagcaggttcaggttgttgataacgatggactaataatggacatgcgtctgcagggagattgggagaaaacccaaggaggaaaaaaaaagaaaatgctacttaatggtattccgttcggacggaatgatacctcacatgtattatctgatacctgataacctggtagatatcggctgatactctattcgaacgggatgatacctctgagacagtcgatatagctcatccgtctgaatagaataccgtcctcccaaaagaagttgtgaaatgaaatgataatgaggttaattagacagtgatgaggattgaggggggaaatttacctggttaagaaaacagcccctttgggcgatgattcatctctaagataataatacgtttttcttaggttttcgttaactcactttttaaaatgttgaagggtgcattttgtgtaaaaactttctatataaaaactgctatgaaatatcagataatttttttgggttttataataattaaaatttaattaattttatgctttaatggttatttctttcctctttctatgccataacttcattctttgtagaaacgaacagtcgaacaccaaatgcgacattgatttgtatggcaaaatagccattttcgtccctaaactatcgcccgaggctcagtttggtccctgaactatcaaattgtccaatttcgtccttcaacaattgatttcgaactcaatctcgtcagttccccttgatagcacgccacgtggccagctagacatgcgaaatgtccgtcctgcccctcgctcaattctttacatgttggatggctgatggcgtttcaggctccccgttgcctccctctcatcctcgtcttctctgttcgtcatggcaactatataggtaggttagggttttggcttgggggctggggcggagatcagtacaggacgacggcgtgttcgaaggggtggaggcgcaccccttctcctggtggaggcgtgcccttgtccttgggcagacggactgctcataggcaaccaagacacaggaagaggagaggacgtgctgcaaaggtaagatgagtggcacttcactagttttgcacttgagtttgatttccttgtagaatgtttaaatttgaccatatagttgatctatagggccacgaagcaatgtctgaatttgaggtactggaagttcaatttcattttaatggggaatttgttcttgatgagtcaaagatgtcgtattgcaatggggattgtggagtgtcccacatagagaaggacaagatctctatccctgaacttgaaggccacctattggatcacacaacttttcctcaatctgttaggatgtactggttgccatttggtgcagaattgaatagtggtatgaggttacttgtagatgacaagtcatgtttggacatgattcatgagctgggaactgctacaacagtagatacaccgaatcagttgatatgggtgggaatgaagaatctggaacacagtatgcagatgagaatgtatttgccctatttcaagatgataatatcatggatttggatcatgcagaacctattgtcaaggaacaaactgtccaaaatagggacaaatttgttcagggcgataacatgctgtgtttggaaggtccaacccatggtcaggatagtccgaatgaagaagcagcagaagatttagaagcagagagtgatggctgtgatgctacaggtttcacaagtgatgaagatgatgaagttagagagataagaaccaaatacaaagagtttatgtcagaagtaaagaagagaggagatattccaatagacaatccaattgaggttgatggcatacaaggtggagatattccattgggtaataatcaagtcttagaaggtggagatggtgctgaatactttgattcagatggtgatgcatcgtacgatgaggacagtgatggtgtctttacaagaaggaagtgcaggttcccaatatttgacagtttcgctgatactccacagtttgcagttgacatgtgctttagaggaaaggaccaattgaaggatgctatagagaggtatgctctgaagaagaagataaatatcagatatgtgaagaatgagcagaaaaggattagggctgtttgtaggtggaaaggttgtccttggcttctatatgcttcccataactcaaggagtgattggtttcagattgtaacttataatcccaaccatgcttgttgtcctgagcttaaaaataaaaggttatctacaagaaggatatgtgataggtatgagagtactatcaaggctaatccatcttggaaggctagagaaatgaaggagacagtacaagaggacatgggagtggatgtgccaatcacaatgattaagagagcaaaggcacatgtaatgaagaaaataatggatactcagactggtgagtattccaagctgtttgactatgctctggagttgcagcgtagtaatcctggaactagtgtgcatgttgcccttgacccagaggaagaggaccatgtgtttcagaggttttatgtatgttttgatgcatgtagaagaggatttttagaaggatgtaggaggataattgggcttgatggatgtttccttaaggggccattgaaaggtgagttgttatcagctattggcagggatgcaaataatcagctttatccaattgcatgggctgttgtggaatatgagaataaagactcgtggaattggtttcttgggcatcttcagaaagacatcaacatacctgttggagcagcaggctgggtgtttataacagaccaacagaaggtaaatttctatctatttttgtccattttatgtagaggcttttttaatcattaaaataaaatggttaaatcatttgtgtccattttatgcaggggctgctaagcatagtatctacattgtttccatttgctgagcataggatgtgtgcacgccacatatatgccaactggagaaagaaacataggctgcaggagtaccaaaagaggttttggaagattgcaaaagcacctaatgagcagttgtttaaccattacaagagaaagcttgctgcaaaaactcctcgtggatggcaggatttggagaaaacaaatcctattcattggtctcgagcttggttcagacttggatcaaattgtgaatcagttgacaacaacatgagtgaatcattcaatagttggattatagaatcaaggttcaagcctattattactattgacggagcgtggggctcctcaccgggagaccgcactggcccccctttgccggttcggccggggaccctgggtgagactctaagctcccaatctgtggaaggttcgcgagacaggaagcacacaaaacgccggcgatgtatacaggttcgggccgctgagaagcgtaataccctactcctgtgttttggtggattcgtgtatgaaggaactacaaagtatgagccagcctctccctcgttctgggttcccaatctggaaaaatccaaaatcccctctctaagtgggcaaggtcctccttttatatcttaaggggataccacatgcaccatctccccctctctttcttccaatttgacttctcttcattaacagacggagatttgcatcgtcgccgtccgaatgaccttctgacgggacggcccatacctacctccacttccgccggaggcaggcgcgacgtgggaagatggctgtctgctgatgacttgaccattgtcagactggtcacaaatcggtcattcttgtccaccacgtgtcagtttaacaatctgcatgttcgcccttcttcatacaatatcttgcctgtaatggttaggatgaagcctggcatatatctgaccggaaccaacgtgccatctccaggagctaacacgccggctccagctagggacgagtgcttggaggctctcgtcctgacgggatggggcgaggcgtgcgtcagaccgcctgtcgccacctaacccatgatctgaccggtctgtgactggtcacagaccggataaacgagcgtgctgtactgcgatacatgcggcgtgacgcgctcgtcaaaactgcaataaatgtggttaggtgagccccgccatgctcacctaccccatatacgtggcgcaaaacccacaaggggtcggggcgcttcggccctcggggccgagacgggagcggcccaaccccttggggagacaaagagaagggcggccgtatcaccctcgggcccgacccccccccgagggagttaggccacgtgggtgatcgtgtctgcctcaagtctctaagtcatgatactcccggtaaagaggagggcgaacacatcaccctcgggcccgacgccccctgacggtgccaggccacatgggcgattgtgtctgcctcaagcctctagtcatgatactcccggtcccatgtcaccgacagtagcccccggcgttatgccagggcgatcgccctctttaagggaagcggtcgggcgtgacgccactcctaaggcctggtgacaggtgggaccggtctccacgattgggcagaaacccaacggtcacaaatcacgcacatcggcagtggtaactcggctgtcaataatgagcggtctcttcaagactgccacattactcgagtagcacacgaatctggacatggcgattcgtttcgtttggagatatggtaacgtcgcttcggtcggcgagcgtaattaacgcgcgcacgatatgatctatctcgactgccacaaccgcatgtccacctcatgctccgcaagcgggcgaatgggattagtggaagcgtgggcgcgagaaacgagggggcgaaatagtgggcgcgagaagcgaggagccgggcacagcgttggtaagagtataaaggcactgaggaagggatctgtttccttcctttcgccattattccccttgtcttcgtcgcttgcgccctaactccttctttcctgtgccctaccttcaccacacgcgctcgctcttaatcttctcttcctccggggccatggcacggggctccgctctgctcgatggtagcgtgctgccgccttcccgcatcgtgagcgagaggcaggctgggctgccgcgccgcttcatgccggaatctgccaccggccgggagatagtcacgctgggcgagggacgcccggcaccagactacccggggcggtccgtcttctttctcccctttgcaatggcagggctggttccgccattttcttctttcttcatggatgttctggagttctacgatctccagatggcgcacctcacccccaacgcggtgatgacattggccatcttcgcgcatctgtgcgagatgttcattggggtgcgcccatctcttcggctgttccggtggttcttcaccgtgcagtcggtgtcgccgccatcggtagttggtggctgctacttccagccacgggggccggtgctgaaccgctacatcccctgcgccctccgcaagaagtgggacgactggaagagcgactggttctacaccccccttgccgacgaagcgcgcctccgacttccgagccagcccccggcgcaggcctccagctggcgggcgccggtagatctgggggatggctatgacgccgtcctcgaccgcctggcgggcctgcgatcccaggggctcacaggggccatggtgtacggcgactacctccgtcgtcggattgcgccgctccagcggcgcgctcggggcgcctgggagtacaccgggtccgaagacttcatgaggacccaccagggagtgagatgggactaggctcctgaggacttcaagatattggtccaacgggtgctgaatctcaactccgtggaggcgtccctcattccccaaggaatcctccccctctgcagcgatccagactgcgcctccatcctaaccattatgatggcggtcggggcctcagaggagcgagctccaaagggccacgacgacgcaggcgggagccgcaggggggaacaatctaccccgggagggggtcgtacttctgggtcccgcgacaggggcccggggagcagccgccctgccgacgcccgggggaagaggaagcagggaggaacacctcccccatctcctccccgagggggcggggcggtgcgcgccagcagcaggcggccggagggggccgtgccgacatcgcagcccgagggggagcgcaagaagaagcggttccgcaagatgggggagacagaaccatctcggggaaacctcatttcccctccaaagtggtcgtttaaccgaccccctcgcaggttcgtctctcacccatcgtggctgtattcattctctcaacgcgagttttcactcacccatcttgttcgtcttctggtcttttcttttgtttcagcgagatcccgtcgcgtccctcccgccattccaagcccggccagtctgaggccgaggatccggcggccgcagaggcccggaggcgggaatctgaccggcgagaggccgcggatcgcctacgggaagccgaggaggccgcccaggaggccgcccgggctcgccaggccgaggaaaccgctcgggaggaggccgcccgggcccgccaggccgaggaagccgttcgggaggaggccgcccgggcccgccaggccgaggaagccgttcgggaggaggccgcccgagcccgccaggccgaggaagccgctcgggagaaagccggatttcgccaggacgaggcgttggcgacttccgaggcagctcgcgacgaggccgcgggcgcgtcgcttgggcccactccctcgggcgacgctcaggcgacagcttccggggcagctggcgacgaggctgcgggcgcgtcgcttgggcccactccctcgggcgacgctcaggaccaaccgggtccgggggacatccccgagtccggcacttccatcggtggcccgagccgcatggcatcctctccaaggcggctcttccccacgccttctatcgccccactgaacgcagagccccttctgcaggccttggccgccgcaaacaccacggtgttggatgggttaagtgcccaggtggaggccctgcaggcagagcgggcggagctcgatgccgcgtgggcgcatgtcgaagaggggcgacgctcggtggaggccatggtggaggtgggccgtaaggctcaccgccggcacgtctcggagcttgaaacccgtaagaaggtgctggcggagatcgccaaggaagtggaggaggagcggggggctgccctcattgccaccaccgtcatgaacgaggcgcaggacaccctccgccttcaatacgggagctgggaggcggagctagggaagaagctcgacgccgcccagggggtgcttgacgctgccgctgcccgagaacagcgggcggcggagaccgaagcggcgtcccggcggcgcgaagaggcccttgaggcgcgcgccatggcgctggaagagcgcgcctgcgtcgtggagagggatctggcggaccgcgaggccgccgtcaccatccgggaagcaacgctggcggcgcacgaggctgcctgcgctgaagaagagctcgcgctccgcctccgcgaggacgcgctcaccgagcgggagcgagctctcgagggggccgaggccgcggcgcaacagctggcggacagcctgtccctccgcgaggcagcgcagaaggagcaggcgcgccgtaatctagaaggtgcccgcgccgagagggccgcactgaaccaacgggccgctgagctcgaggcgcgggcgaaggagctggacgcgagggcgcgcagcggcggggcggccgcgggcgaaagtgacttagccgcccgcctcgcagctgccgaacacaccatcgccgatctacagggcgcgctggactcgtccgccggggaggtcgaagccctccgcttggcaggcgaggttgggcccggcatgctttgggacgccgtctcccgcctagattgcgccggtcggcaagtgggcctctggagagggcggaccgtaaagtacgccgccaaccagggaggtctcgcccagcgcctctcgaagatggccggggctctccaacggctccccgaggagctcgagaagacaattaagtcatcctcgagggacctcgcccaaggagcggtggagctcgtcctggcgagttaccaggccagggaccccaatttctctccatggatggcgctggatgagttccctcctgggaccgaggaccacgcgcgcgcgcaggtccgggatgccgccgaccatatcgtcgacagcttcgagggctcggcccctcggctcgcgttcgcccccaactccgacgaggagggcaatgccggtggtgcagacgacagtgacgacgaggccggcgacccgggcgcatcggattgagcccccagacccccgccattcttcagttttttcttcttttctttcttctaaggccttcgggcctcttttttgtatagatcaacttaatctgtaatcaaaaatgaagaaatttttgtgtcaatttcatcttgctgtgtgtataagatgaggatgatctgtgccgtggtccttttgtgtcttagcttgattaagggttcatgcccaggtcccagtcctcaaaaggcgcgggtcggggctagtgcctggggagatccacatgtcgagactggccaggccgggaacgtggtgaccgagggttatgggtgacccgattgtgggtttttgccgattcccccccggagttcaccacgccccggggcacggctcggttctgggccccgtttggcgattttagccgacccgagcccccgagggcaggattgagcacgagtgacctatttcaagtcaagattcttcaaaaggaaaaaacagcacagatacagcctttaggaaattgaaactgcttttattgaaatactgaaataagagaaataagaatgtgcatgtgtggcagcccccggccaaccctgcacgcccgagggggtgcggggttggcccgagcccgaaacctgacacccgaccccccctcaggggtagaagcgacgaaggttatccacgggttaggcagctcagtgccgtcgcccgtggccagccgtatggagcccggccgggggacgccgaccactcgatacggactctcccacattggtgaaagcttgctcaatccagcacgcgtttggacgcggcgtaggacgaggtcgtcgacgcagagtgatcgggcccggacgtgacgctgatggtagcgccgcaggctctgctggtagcgcgcggctcggagggccgcgcgccgccttcgctcttccaagtagtcgaggtcatctctgcgaagctgatcttgatcagcctcgcagtacatggtggccctgaggagacctcagggtgagctcggatgggagaaccgcttccgcgccgtagacgaggaagaaaggcgtttccccggttgctcggcttggtgtagttcggtttgcccagagcaccgctggcaactcctcgatccatgaatcgccgtgcttcttgagtatgttgaaggtcttggttttaaggcctttgaggatttccgcattggcgcgctccacttggccattgcttctggggtgggcaggtgaggcgaagcagagcttgatgcccatgtcttcgcagtagtcgccgaagagttcactagtgaattgggtgccattatccgtaataatacggttaggcactccaaaccgggctgtgatgcccttaatgaatttaagtgcggagtgcttatcgatcttgacgaccggataagcctcgggccacttagtgaacttgtcgatcgcgacatacagatactcaaacccgcccggggcccgcctaaacggtcccaggatatcgagtccccagacagcaaatggccacgaaagtggtatggtctgcagggcctgggccggctgatggatttgcttggcgtggaattgacacgctctacatcgccggaccaggtcgaccgcatcattgagagctgtcggccaatagaaaccctggcgaaaagctttaccaaccaaggtgcgcgaggcggagtgggctccgcattcgccttcatggatatcggcaagaagcacaacgccttgttcccgaggaatgcacttcaggaggattccattagccgcgcgccgatagagggtcccttctaccagcacgtagcgtttggagatgcgatggacgcgttcactcccttcgcggtcctcgggtagagtcttatctgtgaggtatgcttggatctcggcgatccaagcaatcaatctaagggagctgggagcactcccctcgggtcccgaggcctggactccgacgggcctcgggggccggtcaggcgcatccgtctcccctaaggggtcgggtcgcgccgacggctgggcaagcctttcttcaaaggcgcccggtggggtctgggctcgcgaggacgcgagccgtgagagttcgtcggccatcatgttatcccgtctgggcacatgccgaagctcaatcccgtcaaaatggcactccatacgccgtacttggcgcacgtaggcgtccatctgcgggtcagagcaccggtactccttacagacttggttaacgaccagctgggagtcgcctaacaccaggaggcggcggatccccagtccagctgccactctgagtccggcaaggagtccctcgtactctgccatattattggtcgctcgaaagtcgaggcggaccaagtatctgaggacgtctccactcggagaggtcaacgtgacccccgcaccggcgccctgaagagacaaggagccgtcgaactgcattacccagtgggcggtgtgaggcagctgcgaggggtccgtgctggcctcggggatcgagacgggctcgggagccggggtccactctgccacaaaatcggcgagggcctggctcttgatagcgtggcgtggttcaaagtgcaaatcgaactcagaaagttcgattgcccatttcaccacccgtcctgtaccctctcgattatgcaagatttgaccgagggggtaagacgtaaccacagtgacccgatgcgcctggaaataatggcgcagtttcctcgaggccatcagaatagcgtaaagcatcttctgggcctgagggtatcgggttttggcgtcccggagggcctcactaacaaagtagacgggccgctgcacctttcggtggggccgatcctcttcgctaggggccgcatccctggggcactcttcgtccaagcagcctcgcggggcgcacttgtcttctgtgctgatgacttcggggtcggaggataacaggggcggccttcccacagtggcttcggggccgtcctgggggtcgggggctcctggcatcgtcggacaagcgggcaaagggccaactccggtcgtcaggagccttagacctccgttcggctcgggggcctcttctccctgctctttcccgggtcgagtcagcacagggttagcctcggggtcaaagggcgataggtgcggccttcccacagtggcctcagggccttcctgggggtcgggggctcctagcaccgtctgacaagcgggcagagggccaactccggtcgtcgggggccttgggccaccgttcggctcgggggcctctcctccctgctctctcccgggccaagtctgcacaaggtgggggtgcgcggaatgaggtttgtcctcatcgcgctccacgaccaacgccgcactaaccacttgcggggtcgccgctaagtagagtagtaagggttcatttggctccggggcgaccagaaccggggagagctgagatacgccttcaactgagtgagggcacgctcagcttcctccgtccaagtaaacggcccggagcgtttgaggagcttaaataagggtagcgccttctcccccagcctcgatatgaaccgacttagggcggccatgcaaccggcgacgcattgcacatccctaagcttgctgggggggcgcattcgctctatagctcgtatcttctcggggttggcttcgatgcctcgggcagagaccaagaacccgagaagcttgcccgcaggtacaccgaacacgcacttatcggggttcagtcttatgcgggcggagcggaggctttcaaaagtttccgctagatccgagagtaaggtttcttggttgcgcgtctttacaaccaagtcatcgacataagcctcaacattacgtcctatttggctacccaaagaaattcgagtagtacgttgaaaagtaggacctgcattttttaacccgaagggcattgttgtataacaataagttcctatgggggtaatgaacgcagttttttcctcatcctccctagccatgcgaatctgatggtaaccagagtatgcatctagaaaacacaaaaggtcgcaccccgctgtggagtcgacaatctgatctatgcgaggcagggggtaaggatccttaggacatgccttgttaaggtcggtgtagtcgatgcacatccgaagcttgccgttcgccttgggaacgaccaccgggttcgccagccactccggatggatgacctcgcggatgaatccggcctccagaagtcgcgccacctcctcgcagataaaggcttgacgttccggggcctgccgccgcactttctgccggaccggccttgcgcccggccgtacggcgagacggtgctcaatcacctccctggggaccccgggcatatccgccggtctccatgcgaagacgtcagcatttgcccgcgggaaggagacgagcgtgtcttcctatttgccgtccagaagaccaccgatccgtgtggtcttggacgggccgtcgcccagggcaacctccttgaccgggacctcgtcgcatgtgatcatccgctgcctcggggtggcgggggcggaggcgccaagcctctcgtcgccaccctcgggcttggacgcagcggcgaggcggtccgcgcgttgctccagacaagcgagcgtgactttgaggtcgccatggacagagatggggccaccggggcccggcatcttcatctgtaggtaggcgtagtggaccgccgccatgaacttcaccaacgcgggcctccccaggaccgcgttgtagggcagactgaggttcgccacatcgaagttcacccgctccgtgcggaagttggcggatccaccgaaggtgaccggtaggtcgatgtggcctaacggccacgtgtgccccggcgtcacaccgataatcggctgggacggccggagcaccatccccggggccttgctggcgtcaaaggccgcaggggaaaggatgttgagggccgctcccccatcaatgaggacacgccccaactttacgttgcagatggtgggagaaaccaccatcgcaatctgccctccccgggcaacgcacggtgggtggtcggtctggtcgaaggtgagagcaacccccgaccatcgcgcccgacgcgtcgcctcatgagtaggggccgcggccagaagctctcgcttcatggccttgaggctccggcgagaaacgtgagcacacgctcccccatcgacggtggcaatggtggccccaggctcttggaaacctaggtcatcatcgccatcatcgatgtcctcggcgggggccttctgcttggcctcacttcgccgattaccggaaggaaccgccggggacttgccctctcggcgctcctgcctcctctcctcctcccacttcctcgtccgctcagccaaacttttgaccgcacggcagtccatgaggtcgtggagggaggtgttgtggacggtgcaccacttgccggctgggcgctccctgctgggagcgccggcctttttctttttgtcgctcgcaggcctccccttttgggtggctcgcgaagcgccctcgacggcgaggacatgaccctcgtcgtcggaatggactgacctcttcttcctcctcctgtcacgccgccctgtctgagcggcggatccgggggcggccgaagctgccacaccggaaccggaggggttccaagtccaggcctcctccttgcgagccactcggtccgcgagctgaaaaagctccgcggtagtctggggctccttggaggcgatcttttcgagcatgcggttgtgccgcacgccccccctgaacgcgtagattaccgcatgtgcagggatgcatggtatggtgttgcggacttgacagaaccgctgaatgtacgagcgaagtgactcatcatcccttcgctgtactgcgtgtaagtccgcttcttcacctgggcgcggatatgtgccctgaaagttcatggtgaactgttggcacaaatcctcccaggagtggactgacgcgggtggcaagttcattagccaaccccgcgcctgccccttcagggccatgggaaagaaattcgccatgaccctgtcgtcacccctggcggcctcaatcccggtcgtgtagacctggagaaactcggcggggttgacgctgccatcatatttttcggcgatggtgggccggaaccttgggggccaacggacattccgaagactcgccacaaaggctctacagccgacaccaccaaccgggggcacggagggctgattcccgtgtccgtgttgaggtgacactctggacgaggaagcgccctccgttgcgtgggtagcacgtcggtcattacgccgccgctcgatgctggtgcgggcgtccggccccccacgcagatcttcccgggtcgaaggagtcgacgaaggagtggtggccgaatggcgaacagcggctgccgctcgccgcgcccttcgtcttgacgacgcggagccggtggtagcagcaccagaggccttggtggcggaggaccgcccaccagcatctagacactgccgtgcagtcatgaccaatttggccacatcgtccagccaacgttgggctggagactccgggtcatgggcgacgggcgggtgacgtaggagcgcgcccgcagcttggagcgcgccctggggcgtgctgccgtcaccatagacgaggaggcgacgctccccatctcgccgccctttttcacctccagtggatgtcgaagtcgcggatccttcggccctctcgagcgcctccccccgcttaggactttggcgtggagggggcggtggagtacgagctcgacggcgtgggttcggctccccgtcgtcgccactcacactcggagagaggtcgtgcgcctttgcttgctcagccatgaggctgaacaggaaaagcttggcgcacacgaaagagtgcaagagctcagaagatcactcgcagagtcccctacctggcgcgccagatgacggagcgtggggctcctcaccgggagaccgcactggcccccctttgccggttcggccggggaccctgggtgagactctaagctcccaatctgtggaaggttcgcgagacaggaagcacacaagacgtcggcgatgtatacaggttcgggccgctgagaagcgtaataccctactcctgtgttttggtggattcgtgtatgaaggaactacaaagtatgagccagcctctccctcgttctgggttcccaatctggaaaaatccaaaatcccctctctaagtgggcaaggtcctccttttatatcttaaggggataccacatgcaccatctccccctctctttcttccaatttgacttctcttcattaacagacggagatttgcatcgtcgccatccgaatgaccttctgatgggacggcccatacctacctccacttccgccggaggcaggcgcgacgtgggaagatggctgtctgctgatgacttgaccattgtcagactggtcacaaatcggtcattcttgtccaccacgtgtcagtttaacaatctgcatgttcgcccttcttcatacaatatcttgcctgtaatggttaggatgaagcctggcatatatctgaccggaaccaacgtgccatctccaggagctaacacgccggctccagctagggacgagtgcttggaggctctcgtcctgacgggatggggcgaggcgtgcgtcagaccgcctgtcgccacctaacccatgatctgaccggtctgtgactggtcacagaccggataaacgagcgtgctgtactgcgatacatgcggcgtgacgcgctcgtcaaaactgcaataaatgtggttaggtgagccccgccatgctcacctaccccatatacgtggcgcaaaacccacaaggggtcggggcgcttcggccctcggggccgagacgggagcggcccaaccccttggggagacaaagagaagggcggccgtatcaccctcgggcccgaccccccctcccccgagggagttaggccacgtgggtgatcgtgtctgcctcaagtctctaagtcatgatactcccggtaaagaggagggcgaacacatcaccctcgggcccgacgccccctgacggtgccaggccacgtgggcgattgtgtctgcctcaagcctctagtcatgatactcccggtcccatgtcaccgacaactatgatggaggacattaggatccaggtgactagaagaatccaagaaaataggagtaacagtgagaggtggactatgacagtgtgtcctaacattatcaggaaattcaacaagattaggcataggacacagttttgtcatgtcttgtagaatggtgatgctggatttgaagtgagagacaaaaaatggaggttcacagtagacctgacaagcaagacatgctcctgtaggtactggcaagtctctgggattccatgccaacatgcttgtgctgccctattcaaaatggcacaagagcctaacaattgcatacatgagtgcttctcacttgagagatataagaagacataccaacatgtactacagccagtggaacatgagtcggcttggcctgtgtctccgaatcccaaaccattgcctcctagagtaaaaaagatgccaggccgaccaaagaaaaataggagaaaagacccttcagagccagtgaaatctggaaccaagtcatcaaaagttggtactaaaattagatgtcgtcgctgtggaaattatggtcacaactcgaggacatgctgtgtgaaaatggtgtttactgaatttaatttttccccttgctgcactatattcattccttactcattttactaacttggtatgtactgtacagcagcaagaacacgctgagtcatataatcctcccgccaccaatgcaagtcactcaagcccattgcaaattgaacctgcacagtcgaagcaaactaaaggaaaatccatagcgacatcatcaagtaagagtaagatgcctgagggttcatcatttatacaggttagtaataattacgacatgtccatgctatagcctaagtaatttgtatatttgcctaaattggctttgttgtttacagtctggccataagagaagactggtatcttttggaaagagtgctcaagcatctgcgaagtcaagtgctcaagcatcggcgaaggcatctgctggagggagtgcttctgttgtcattgaaaccaatgctgggactgctagctcatttgcaaaggcaacaatcaatgtaaaaggtgggcatgcctttgcaaaaatccattcaacttcacttggtcgtggatcagtatctgcccaaagcagctcatcacagaaaaatgggctgctgaattccaagaacaagatgatgtagcttgccaaatatagtcccaaagcaataatgcttttgtatcagttagtcatgatgtcatgaacgcttgcatttgttatgtcaaaaccatgagcataagacatgttaaatttgtttctggacaagagcataagacatgttaaaattgtttttcaattcattccacattgcctcaaatagtggttacacaatgagccatataccacaagcaattacaatgctaaaacaaattaagattacaatgcactctctttgttctctaatagtacattttagttcatgaatttgttgttttactctctgtcgatcagcatacatatcatcccattgtctagatgaatgttcgtacagctccgacatgctgtgcctcatggaaactaggtcctgaatcacccttttcgctctaccttcaaattgttcatcgatccaatacttgaaatcacagggctgctcaacttgggagcatgccaggaaccttcttccagtgtctggaccagaccaacaacaacacaaaattgggaagaatccatgccgacatgtaagccctgtcctcaccagcatcccctctgaatgttcttcaagcaatgtttcaagctgcaccaaatcgacgaatttttatcaaaaaacaaatcaatctccaattcaaatcaaccctagccccagcgccaacagctctgtactcacctccaccgcgcgcgcagctccatgagcgccagaactcgatgctccgggattcggcgctactcccattcttggcatcgaccttctcactctcccctccctggacccatgctccatggggatacaggcacaacggatgccgcctccacaatggagcgaccagatcggggaggaaacgaggagcgagtagatgggggagatggacgagatggaatggatgaagcagatgaggcaaagagaactggggaccggcggctagtgggtcttcctccccggcggcgacgacgacgaacagaagccgcaccaacacagaagacgaggacgacgccgtcagccatccaacatgtaaagaattgagcgaggggcaggacggacatttcgcatgtctagctagccacgtggcgtgctatcaaggggaacggacgagattgagttcgaaatcaattgttgaaggacgaaattggacaatttgatagttcagggaccaaactgagcctcgggcgatagtttagggacgaaaatggctattttgccgatttgtattgtaggagtaagatatttataaacggataaaaataagtcgtgttatgaaattgcttgggagacgaatttgtgcatatgatctgcgtgctaaggaaagtataaacatgaagtgaacagtttgaaatcggacttctaaaactcaaacaaccgagtagatgtgatcaacttccatgtacccctctcaaaatttaaaactaaataaggcttggcaaccaaatttgaatccaaatatatacacgtcagacatggtcacctaaattcaaaatcgtaacctttctttagaagattcagagtgctgactggtggttgggcttaaagatctgtactccatacccttcaacttatagggaaaatatgtggtggaaaccacaaatagagcaaacctggaaactatagttggagcgaaaaatggacgtccgagattcgtccacgtcatcacgagtataaattttactcacagatttactcatgaatactcatgatgacgtgcacgaatttcggacgtcatttttcaatccaacggtagttaccacgtttccactacatatatggttttcacaacatatttttcccagcttataagccacaattaaaatttaatttcaaagttctttcaatcacagtttatttttgagtatttgtgttttaaatgattaagaatataaatataaaataatatttacaaattattctctccgtcccataaaaaaccaacctaatactggatatatatgatatattctagtacattgtatctgtacatatctctattacgtctagttctagttttaatttttttttggacggaaggagtatgctgtagtggccaataaaccgtacaagcccatccttcttttctttttattttttcttgttcctttcctttcctttttcactgggctgtccctctctgctatagcccagttaatacagtccatcacttatctccttcagcccaactaaccagccacctacccacgctagcttgcatcgaagagagatatacacacaagcaggtaagtaccagggttcaccttttcaattgagtttcagatcgtgacatacgtatccctggtggcacgatggttttcactgaatcttaattaaattttggtcaaattcacaattctatatttgaattctcaaaaacaatttgaagttttactaaaaatctactttcactctatgttgaaacctcgaagttactccctccatacttacaaaggaagtcgtttaggataatgtttaagtcaaaccttgggaatataaatcatgaataactctcaagttgttgagtttgaaaatgtaaaacttatatgaatatatttgtcttgaaaaatactttcataaaagtatacatataccacttttcaataaatatttttatagaaacaagaagttaaagttgtgttttggagaccatatcgctgtcctaaacgacttccttaacaaatatggacggagtacattgctttcagtcagtttacatcgaaaacgtgaacctggtaagtactcctttcgtcttaaaatttgcctcagatcaatatatcaacttcctaactagctctctcatctcaaccaatcacaattgtctctaatctaattctcctctaactacttctacatctcaactaattacaactataatttatcccttatttttttaattcattctactttcaatcacaatacaaaactctaaaatatccttgcaaatttttgggagaaggagatggtagaaacagggtagcaaacaaaatgtcaaaataatatactccatatatcccagaacagaactgaatatgctactctcttcatttcaaaatatatatagcgatatttaattggacggagcctattactatcaatctaaatagagggttgtctaatctaatatttccttcgtcccaaaatataacaacttctagcctttataatttatcccaaaatataacgacttatccaccaacattcttttctcaaccaatcacaacccttcaccattcaattttcccacttaccttcacttctccttcaatcacaacactcccccatttaatcctaccaactttcttaataaccgtatccaaccctaaaaatcactatattctagaatgtaaggagtactagattactatagtttataatattttatgacgatggagcattaacctagatctaactcaaccctactagtacttataaccaatgattgccatgtaaacccttcacatggatcaattaaccctgttcccaggtggatcagacaaaaccaaggctccataccctactaatataatcatttgttcttttttttatttagagcatgtagaataataaaagttaacttttagctatggatcaataaagttcatatcacctgcagctaatttagctacgtttgtacaataattatctgatagtgccaccttagttctaaaaagagtttacttttctatacgaatttgagcagtcatttgtccagactccatagaagaattaagtctttatctattacctatccaaaagccacaaaatattgtagctcatcgtgtgctctataattcggcgacaaatctatattctctctttgttccttcgtcacttcttcaagtattccttcgatatgaatctctctatagagcatgttgttccctcgttgatctgctcttatcatttgggccactaacacaatcttcaatgcttgtgctttatcactgtcttttctaatcatacatttacaaaatctacataaaaaccttttaatgataaatctagtaaatcattctcagcacatcaaatcttaacattttcatatgagtaaattttacaaaactaaatatattttcaacaaactatcgtaaaattacagatttaagatgttgtattataaaattacggatttagaaccaaaattatcgcaaaaccatctatttaagggcaagtatcaccatactatatttaatatcgaagttatcacaaaactaaatatttttacagtttaaatccctagcactacccttatgttggagctataaagattgtaattttgtgattgaattagcgctaaacttatagtttttttgggtgacattgaacctgcagttttctaatacaatactttaaatctagattttttcgatatattttgatactccatccgtcccataatataagggat

SEQ ID NO: 9473 - DNA, 3438 bp, Oryza sativa
aatatatatccagattcatagcaataggatgtgtcacatccagtactagattggttttttgtgaaacggagagagtatttgtgtcagaagaatctcacagattcatcaccacaaaaatgcatagaggagacagatcatttttcttgacatgctcacagcagaattcgacagattcattaccaggaaatgaaaaaaagaagtttgttcagactcggttcctcgattacaatacacgcaccatagggtaccagcatctgaatgagctacatcatagaacaagaaaaggggagggagatgcaattttgcattgcattgacaggttctttgatgcaattttgctttgcagttgcattgccaagataggttttagaaattctcactctcaattggccatcaccaatggcctcttgtggtgtccctgcaggagctgcctgagctgctggtacccatggcggtagtgctcgagcgagaagcagagctgcctgatcgcctctcgcttcccctccgcgccatcggagaccatcagcttctgctcctccacctcttcctcgagctcgctcacccgtgctcgcagctccgacaccgccttcgtcacggcatctgcctctgcaatcagcttgacatgctccaggtgcagctggtgcaggtggctgtccatctccctgatcttctcatcacgagctgtgacatcggtcagtaagctagccaccttgttatcgactgtagttttctctgaagaaaggagttcaagctttgtttcgagatcggcgatggcttgattcagatcggagatctgcttctcactgctaatggatgcttctgatttctcggcgtggagttgctggagctgtgactctgtggatgtcagcttgccttcaagagaagcattggcttctttcagtttttggatctcggcaccaagtgaggatttctcctgcgagaattcttccaaattacaggcgattgtgtgttccagatcattgatacggctctccagctgtgatttctcttccagagctcttcctaggtcagctttcagattgttgattgtagcttgtagttctgcgacctcagtccttgaaccctccagctccttacgaacttgttcaaattcgatagcacgttcttcgagcatcttcttctcatttgaatcattgtccagccttctttgcagatccttgattatttcttggagcttcataatctgtgctgatgaatcatctaggctgcgagatgcttgttcaagttccttaacctgggccttgagctgcaatttctcttgtgacatttttgctagatcaccttcgaaattcttgacgatgtcttggagctttattatttctgtttcaagagtagatttatcgtgggaatacttctcatgaacgtgttcaagctccttcttgcacttctcaatttcatggtcatgatgagctagttggccttcaagttccttctgaaggctgctgatttctgagtgcgaatccttcaacttctcctcaagtttttcacattggcagcgtgtattcttttcctcaagtgcctcaagtttttcccttgcttcctgaagctcatcttctagctcggcaattcgttcgttcaatgcaaaaggacttccatcaccattgtcttctctcaattcgtcaacctcagaatcagattctgaagaagatgatgatgatccatcgctccccttcttggaaatgtctgaacttccaccagaaccaaggaagacatcaaagccagctgctcttggtttacgcttctgttttggtgttgtctcttccgagtcaggcttaggagttgggggagcagactgtgtctcagaatcagattcagatatgctaagagagccttgtgactggagtgacgatgggatattcttgcgtaattccccagtcacattgtcataacgctcggcaagagcacgatacatgcggtagaagttctcaacatgagttacaagcaaaggccgccgttcgaaatacatctcggccttctttgcaaaagaatcaccttcatcctcgatgagcttcagcatatctttaacttgcttatccatctctgtttgttgagaaaaatgttatagtaagaatcagttgtgctatgcatagttgttttgcaggatgaaatattagtgaaccacataaataaggtcctaaatattgctacttctggcaaataataaagaatcactagtacatcctgcattcccgaaacatgaggctttaccttctaggttctcggctaaccatttggagttcttgggactaatatggctgtcccaccaccatgaatgggacttccttgttggcatcctttgcatgcgcttcatcttgaccaaaaataagatgactcctcaaatgaagccctaatcatgatggaggaaaaaatgagaaggcgatagatacatgtgaagtttgatgatgtcgagcaatctgcaactaagaaataaatattttctaggcagttctgcagaaggaaaatgttaggactagaaccagtgtagttatgcacataaaacagcttaagggcccctttgattttaggaaaaatgcaggaattttggaggatttcaatcctatgaaaaaaaatcctatgaaggcctttgaaacaaaggattgaatcctatccaatcctttaaaattcctatggaatgggtaatcctatgcacattttggaggaaagttagcaagaggtctaacctcttggaacatttcctctgagtctatctctctcatctgattcctgcgtttttcctgtggtccaatcaaacagccattcctgtgtttttcttgtgttttgtaatcctctgttttacaattgtattcctgtcagaatcatgtgttttttctattcctctgttttttcattcctacaattcaaaggggccctaaaagtgtaacacaatactaacaaccaatgtaattcttccattgcataagtgcctatgtaaaggaaacatggcttccacttctcaaggggacaaggaaagggactaagcatggtaacctccataatgcatggaaccaaggaccataacaatcattggctaccaaaaagaggtgcagacagcaaactgctatataattcatgaatgtcttatcagctaatcagcactgacagagctgaatattgataagcatcagctatctaaaggagaagctgatgacacagtctggaagtaaaatataaacctatcaaacagaaaagggatccctgcattcttgaatagtaccttatcttctctcacacaaagctataactacacaatgtttaccacaaaaaagtttatctggaaactggaaatatcattaacccgaacataagcaagcatttatcccaaaatagatatgatacagagtaggaaagcccagaagtaaactttaaaagaaaaaagcttctaacgactaacttaataaatatgggcagagggaaaaa

SEQ ID NO: 9474 - DNA, 2988 bp, Oryza sativa
  unsure (1)..(2988): unsure at all n locations
cttttatataaacatcaagatgcaaagttttgccaaaagcttatcttttacccattgggatttattagctactttaatttatacccagagcaatcatttggctagtgcgctggttgattattgtatgcccatttaatgagaaaagtgaaattcacctaaaaagctaaccaatatttatatggatcgtactgaaactttttgaagtcatttggagatttgattgatatgtagcgaactttcatcgtccaattctttttttttggggggtggggggggggggggggcntactgcaatcaaaagagtgtatagtgtactagtactagacagacaaaaaaatttttttggacaagatgaaatatgcgttaacaggatgtgctaatataagggtgcttagagagaaaaaaaagagtgtgtagtagacaaaccaaatgaaatatatatgtcgtacataattaaacacatctcttctccagtgcaagcgtcttctcagacaaatataatgtggtgagatttcaacataagctcctactaatcatcgatgcttcatcaaagcatcggtggctcatgacaaggaatttagcaccttcctatcctacaagagaaaacggtaccccctccgtttcataatgtaaatcattctagcatttcccacatttatattaatgttaatgtaaatgggaagtatttggcatgcttcacataagcatgcatctatatgggggcacttgcattggagataacctcggaacgccatgcatccaacaccgtctcaagacttggagatatctactccctccgtctttttaatagattatgtcattgattttcagtcttttcaataaataacaacgataacttttagatatatttttatcattcgtcttatttataaagttatgcatatataaaaaaatctaaattatacttaaaatatcgttaatgataaaacaagtgagataaataataattacataaatttttaataagattatgttgaaaaataaaagttgtagtctatataaaaaaaaagagaggcagtattgattattgggaatatctgcctatgtagtaccggctgcgtattgagttacattgttacatatgtaatgtttataggtatgcacacttggatttcatcactagtatgcgtcgagagcactatcagatagtactatcaactccttgtacggcagagatgtttcctactcaaacggatgtatttatccctcaaatcaatacatgttactcgacttggtttggggtgtgtttagttcacgccaaaattgaaagtttaagtgaaattaaaacgatgtgatgaaaaagttgaaagtttgtgtgtgtaagaaagttttgatgtgatggaaaagttgaaaatttaaagaaaaagttgagaactaaaccagaccttggttgaaccggactgaaccaagcaatctctcctcaatctcctccaagacccctaatgtgttggctacaagtacatttgcaacttttccaaaattttaatttttcctcaaatttttaaactgcacgttgtgcaacattctagctatcatcaccctaagtgcattgccatttgctaccatacatcatactctttcggtcgtaaaataaatatacctattacaggatgtgacatattctagtatcgtgaatttggacagtgtacgagatgcaaacattttggagtttgaaaatgtgaaaaatcattatattagtcttttcggtgatatgcgtgagataagtaaaaattgatatctttcagatgaagatagtagctgagatgacacatgagtcttcaagtctgcgttcgacggtccctctttctatcttccactcattcatttttttaagtacgcttttcgaagtactatattatatttttaataattttttattaaaaaattactttaaaaataaaattaatttattatttacaatatttacgactaattaatcatgtatctttactcccccgtcttataaaaaataaatctagtaggaggtgtgacacatcttgatactacaaatctttatagaagtctattcaggccttgtttaggtccaaagtttttttttccaaacttacaactttccatcacatcaaacctttcgtatacacataacttttcagtcacatcgtctccaatttcaaccaaatttcaaactttgggccgaactaaacatagcctcagattcatagcgatagaatgtgtcgtatcccgagctagttttgttcgaacatacagcctcatcttttcgcatatgttttgcttaccagccaaaatttgaattttcgaccttacatttggagttgattttgggttttttttatcgtagtttatttttcagcctatactcgctaagaacacgtatataaaagttttattcaccgattaattttcgtttgcaaactgaataaaacaaacaatgggcatagtctcaggactcaggagtggtcctggactcgtggtacgagtagtataaatgtgcctgtgaagcctgtagtacactagtacctctgtactagaccattaccccctcctttaattctctcgaactacgactagcttcgagctttcatcactcgtcagcttgagcgcccagcagctatcgtcagcttaaaattagcgccccagcttagcttctgagctgactcgagcttgaagacagattttggtcgcatttcagctaacacaaagcttaacacacgagctcttgtcagctgatcgatccggggttgaagagatattggttggtttctgtgagcttgaaagaaatcacttgctgttccaagcaatctcgttttctttattgtaatccaggatgactgatttttcctttttcagcagaaaaagaagaagaagaagaagaatcaagcttggtgcacggcgtcgccgccatggcggcattgcgcgtgggcacgagggcggtggaagggaggttccaagcgagcaacggcggcggcggcggtggcggcggcgccg

SEQ ID NO: 9475 - DNA, 3570 bp, Oryza sativa
tcgagctcacgctcgagccgttcacctacgagctcctcgtggtggcgcccgtgcgggccatcgtctcgccggagctggggatcggcttcgcgcccatcgggctcgccaacatgctgaacgccggcggcgccgtgcagggcttcgaggcggcgaggaaggacggcgacgtggcggcggaggtggcggtgaagggcgccggggagatggtggcgtactcgtcggcgaggcctaggctgtgcaaggtgaacggccaggatgcggagttcaagtacgaggacggcatcgtcaccgtcgatgtgccgtggaccgggtcgtcgaagaagctgtcgcgtgtcgagtacttttactagtgtggttcaatgctggaaagagactaagacaaaattttcggtctttttattttttattttacttaggtcggaaaataatttgagtgtgtgagagctttgtaagttgcttagctctggttggtttcggttggattatcattgttacgggttttaaacgctggttaatgtgaattaatgcaactatgcaagtgttactttatcaatctcctcgtttgcgcggatgggcttgttttgctttctctgaattcatattgtctttggctttttgcactatacagactacagaacctttgcaaaattgtttcccccttgaaattagaaaaaaaaatggttcgatacaagtcctgtttggtctgtggtcaaatgcaatctttaccaaagcttttgcattggcaagatataggtgttgccaacattttggtgaagttgagtatttggtttgttgctatctttttgaattgttggtgctttacttggttctggttgccaaaatttttgcaatgccaattttttcgagaataaaccaaatggaaacatgaagtatcattcaccaaagaattccacaatagtgttgtagtaattcgaaacttcatcccctttacgtgttaaaacaagcaagaaaaatctctcccggataataggggaaatgagaagcttcttacgatgaaacatgctgctcattcacattcagacttgatatagatacttgtatttatctatttattttttttggtgggcttcatcgatcgtctatttattttttgtggtgggcttcatcgataacgtctacagtgattttgttaatattaagatttgtaaacacccgcgccgtgtgtctaaaaataaaggaataagttcacttcgtgaccctcaaaagtgatcgaaatctaatccgtgaccctaaaccacaaaaccggatatctcgacccccaactcttaaaaccagtgcaatttaactccctcggcggttttggagggtggtttcgctgacgtggcgcctacgtgacattattgactcggtcttctgtccacgtggcgttgacgtggcacttacgtgtcattagaaataaaaaatatgggtgggacccactgacatgtggggcccacataaatcatatcatccccctctctttctcttcgcgagcgttggacgggagccagcggcagtggctaacgcctcctccaaccccatccacagcctcctccccccttcccgcggcggcggtgcggcggcccgcaagcggtggagacccgggagtggcactggagcggcgacagcgacgtgcgcgcaaaggccagagcggcagcggtggcggagatcgaggccgccgtggaaggttggccgtcggaaggaagaaaacaggccacgagaacgaccgcgttctcgccatcctcggcaccgccaccgcactatccaccgctgcgctccacgccctctctgccggccacgatgcacctgcctccgcagttctcccgctgcgcccacgaacacgtaagggccacctgcatctcgccaccgcgactcacgtcggcatcctctcgaagatggcggcatccggcggtggcttcttctgcacctacggcggcggcgttgaaggagggaggagcagcacgggcggggaaggcggtggtaccaccgatgggcgtggttagcatgccgagccagccgacaacggcatgaccacataggagttaggaggcatctgcgtcaagcattctcctgctggttgccgagacaatcggcaaggggcgagatatgagggctacggctagcaagcggtagcaacaagcagtgcatgtgtgtactaacatcaagcgacaagccaacaagcaaagggatgaccgaccgagcaaagctgcagataggcaagcagagcagcagattcgcttggacgatggcgcggccatggaggagggggacgcgagggacgggagcctcgcgcgagcctccagtgctccccaccgccggccctcgagcgctcccctccaccggcgctccagctcccatccctgcagatgtgcgaagggaagggaagagagagaagggagagaaagggaggaggatgaagaggagagaggataatatgtgggccccacatgtcagtgggtcccacccgtacttttggtgaatgacaaataggtcccacccatattttttatttctaatgacacgtaagtgccacgtcaacgctacctggacagaagaccgagtcaatactgccacgtagcgcgccacgtcagcgaaaccgccctccaaacccgccgagggagtcaaattgtaccggttttaagagttagggggtcgagatatccggttttgtggtttagggtcacggattagatttcgatcacttttgagaatcacgaaatgaacttattccaaataaaaataaattcaggtataggatgggccttgaattgagcccgctaattccgggcccatcaaggcccactcagatcaggcccaattaagaggaggcaggcaaacccaaccgactcgcactcgtcgtcgtcgtccccatctggatccctccctcttctcctccaacctcgccatcatttcccagctcgcttcccttcccaagctccaccaaccaaccgccgccccacctcgccgcccgccgccgaggcggagctgcgccgatgaacacgtcgcagttcatggacaagcagatcctcggcctcgcggcctccgcctccacctcctccggcgtcggcgtcggtggcgggggaccggagctcctcgatctgatgagccccaacccgcaggaggagggcgaggaccgcctccgccgccgccacagctcctccaacggcagcgccgacgacgtgctgcccagctacgacttccagcccatccgcaccaccgccccctccgccgccgcctccgcctccgccgcgccggcctcgtgggggtccctcgactccggctccaaggccgcctccgcgtcctacaacttgaaggtatacttaattattgtttcgatcgtggtatggtctccccaccgctagatctgtcgatctatctgcgtttcatgattttgcatcagtaaatctatcgcgaaaacctttttcgtgtagatgagcatctacaactcaaccctacattagtaagaagaagaattttgtttgcgaactgggcttgtgcaccgtgctgagacgcataatcacttggtaataataagctacaagagaattttgtcgatggggctgcaggaat

SEQ ID NO: 9476 - DNA, 1499 bp, Oryza sativa
ttgtaggataggtttagcatttcgaggaagtctaaggatgctaattcttgtggaatgactcctgaaagctgatttgaagatagatccaaagcttccagctgcttcagcccaccaagttgagatggaattggcccagtgaggaagttatgtgacatatttatcccatgagttaaaacaagttccccaacaatttctgggatgctaccattgaatgcattattggagaaatcaatgaatacaagggttcttagtatttgagcaagtgtggtgtcatgacctttgtatgtgagtgaggctttatatctatatactagtcctacacttggcacagcatgatccatgaccaatgatgtatttgtgtctatatgtagcatcgactccaacttcttaaaccacttgtctttgggcaacggaccagagaagttatttgaggatatgtcaataattattgcatttggaaatgcacatgtgctttcttcatcggtgagagattgaacgacatgtccaaatagcttattggatttcagtacaagcacttggagtctacgaagtttactcatccagcatgggaaaatgtcatttatttgattgttcccagcatcaaggatctccaaattttgacaagcaagtagggatctgggtagctgtccttcaatcctattgccactaaaatatagtgcatgaaatgagcagccttcctttatagtatctgggatctccccatcgagttgatttgcatttagatttaatatttgtattccattaacgttctcgatcaaacaagatggtattgagccactaaagttgttgttagagagatcaaggtattgtaattcagttgcagtacagaaagatggtgggatttctccggagaagttgtttccaggggcattgaaaagtgtgacatgactaagatgggcagtgaaattaaaaggaatcgatgagaacatgttgtttgagtaatctagcaatcttgcagaaccttgaggtataggtatagtcccctcaaacatgttgttgctaagatcaagccaatcaatttgtaaaggaataaaagggttagatccaacactagtaaatttattatgtgctaaaatcaaactagcaacgccagaatcattccaagactcccatgcccacgatggtatagccccatggatttggttttttgaaaggtcgagccaaaggagttcatcttgactcctcaagaaatcagggaatttagtgatgttgcaacccgataaagctaatatttgtagtttagggatgtgtgttgatgaagaatcgacttttccatccaccaccacaagattattatcagatatatccaagtaacggaggtgttgtagtccccataatgatgcaagtttcattgtaccgacaagattgtttgaattaaggaagagtgtgctcagattggtgaagtttgagatattttgtggtagttttcctgaaaagttgcattcatacaacactaattttctcaatttcgttaactt

SEQ ID NO: 9477 - DNA, 2549 bp, Oryza sativa
tccgctccctctcgaacctgccattgttgttcaaggttggtatgaggttgaaagcattaagcatgagatcggtaaaagatgcacgaggaaattaagaaattttcagtggctagaagaagagggtgcaagatacatgtacttaccattcagagacacaatcctcgcaaaagatatgcttacagcgcaaaagaatgggagtatgcatcttttcctggcatatagcacacatatctccagtagcactaacctgaacagacacacaagagtcaagtcaagaaaaatagaaaatagagtgtgccaaaagtccactatgcaatgtccatgcaatcttatttcacaggtcatcattactctagacattcagtgacagtgatagccaacaactacttagtgcttcaagcatataatagattacctgttcactagttgcgtatgaaccgtaatggaagtctttatgagataacgctctcaatgctgtcaaaaatgattgaacctgacaaggaaacagctggagttttaggaggcactaagtatcccttacgaaactaaataagggaagttacagtaccttttccacaactgatgtcaacttgaaagtaaggtataatccagtggttagagacgaaaataggcttccatactccttgttcaggaaaaatcggtaccatacaggagcaggcaataatgctcggtacagaagtagaaaatattccacaactgttaacatttggccctgagcaaaaaggaatgattgattactggttgtcagaaacaaataacactgcacctgaagctatcaggaaacggcacacaatgatagatcacagaaaatatagtattcaaatgcataaacagcatacctgcctacgatagctacgccctttgctgttcttgtagtacataagtaacatgcacttgatgatcatagcagtttggcgcaccattgtatctgcataaaattggaaggaacccacatgatcaaaaaccttatgaagttaagtatcatttctaaattctaaatacaacatgactgatttgacttaaggcatcctgtaaatacaaataaccatgcttcaggtataaggacatgatagccacttacaacataaaaaaaatataatttatttgtatgagagtggacatttgagcccagttcacaaaatgaaagggctcacgtgccaaaaacttaaaggccttcagggtttacaaacctttctagctctaaaacataaatgtgttcaagcatcatatgaggagaaaacatgcgatctaaaacataaatgtgttcaagcatcatatgaggagaaaacataccattcaccaaaatgatgaatattgcatgccaaaacggtggaatttcttttggagcaagagccaccagaggtcgtacgaggtcaccattcttgtaacaccagtaaactccaaatacatgaacaacgaataatattgtgatcccaacaaggactgacatttttctctccccctgaaccaaaaagacaaatatcaatgtatcatatgtaagtaccacattgtttatataaacaaattgaaagcaattaaatccacataataatgtaacttctgatcatgatgggaaagccaggaatataaagatacttgcaattctctatataaatagcattgtcaacaaatctcaaaaatcgattagatggtgcagtaaacactcaaaaacaaggaatatctgatttgtatatgtaaataaccattgtgatttcttgacagtataacagaggttacaaaccagtaaacaagtcaacgtcatatccttggacagcagcacaaatataagtacaagcacagcatgacattagtgacagattgatgattggtaatacacaaacgtgaaatgagaacgtgttcggatatagaaaatccatgaaaatgccaaataaaacttagtggccaaaaagctgtaagccatattaccatgaaaatgccaataaaactatgagcggccaaaaaacgtcatattaccatcactgcatcacattatttagagatgatctgcaccccggatattttcattaaaacgaactaaatctaagggagtgctttagacatccaagtgtcacaattaatctatttgtcacttaatattccagcagaaatctacaggtaaattgatccaaatgttcaacaaacatgatggtaagtttaccttcaaagcagtttgcttgcgcaggatatcattagacttgaacatcacggcggcaatccaaatcgtcacgaagaaacctgcacgacacaatccaaagcaaaattagcccaacatttcacaaatagattaatgcaaccctacattcagcaaacacatggtgacgtatatttcacagatagacgaatgcaaatcatacatgcagcaaaacacatgatggcatatcaatttgtgcttgtggatgaggtaaattaaagggggggggggggggaatgaccttgcaagtgctgcctgatgaagacgacgagcagcagaagggagaaggggagtatctgctccacccacctcgccacctgctgtatgtcgtacctct

SEQ ID NO: 9478 - DNA, 1822 bp, Oryza sativa
tttgtgataatttcgtcaattatatataggtctaattttccagagatgctcgtagggataagatttcgttgcgagtgcctacatctctgtactgtgtttcttgggaaaaaaaaatctgtggagctagtctaacactcaaactttggtactaccagtgtaccatctctactataagcaccagtatcccttgatcacatcgacaaatgacaactgactactccagtatactccgtacggaagcatgtacatgaagattccctcaagcattgaaagattccgatgcaattagctgtcatataatttcgagtactattaaatttctacgctactttgaaccctaggcactgtacatgggaggaagaaaaattggatacaaggacaccctcctgtttgctccataaaatcattgcaccgacaaaaaacgcaaggtttcacaaggcgacagattgtgttgactagatgcagtaaaaagtaatttttttcgtaggcattagctatagtttaacctagagatttgggtcagtaattttatttcaccattagtcaaactgataagggatttgtcctataagatggcagtatagaactgtgcagttatggcatatggtcaattgctttccattggttatgacttactgactcacactgccaaacccttaattgtggggctgactgctattttctatatcatgtgggggccttattaaaaaatatacaagctgtcaaccaacaactaaagcaaaaccacaaaaaaaataattctgaacaattgaatcgttaaatgagcaaattttcagaggttctcaaaaaaaaaaactcagatgtagacacttgggttacccaaaaccataaaatatatggactaagttacaaagatcttaagaagagtaatcaattgagtccaacaaacagcaatgatcaagcatctctcatctcaccaaacgaatcaacaaatgcagaggataccatcacaaatctcattaaacacgtggtcacaattagcatagatgaacttgcaataatcaaatcaattaaatgcatcccccaaattatcactaatcacccccttcaaaagtcactaatttacaaatttacaaatcagtccattctcacatcaccactcaccaacccgaagcgaccaaccaagaaaaggaggaaaaaaaaagatcccatttttatataaaagcccctgtctccgtctccgatcagctgcaggagaggcgaggaggcgaagcagcagcagctgaagcgagccgagccgatccctcctgcccctgctcgcctcccagatctccccgccattgccagttccccgccaagattcgcgcgcccttctcccagatccagcttcgcctattccgaattccgcgcaaggtgaggtttggtggtggctttgacccgggagagacccgtttcttggcgtcttctttggtgttctttgcttcgattgctcgatcagaatgtgttctttgtgattcgcaggctctgtcggtggtctgattcggcgggttttggttggggaattttggtgttcctgctcggttttgtgcttgctgctggttgtggtggttcttgggagcggtggagatgggggtgacaggggagaagttccagctggggacggtgggggcgctcagcctctcggtggtgtcctcggtctccattgtcatctgcaacaaggccctcatgagctccctcggcttcaacttcggtatgagatccaatcttgtctcaagatgctttagcttcactagtacttggcagtggctgttttgttggatgcttgtgctagatgtatagcttgtgtattgcgtgtagagac

SEQ ID NO: 9479 - DNA, 9258 bp, Oryza sativa
ctcctcctccaccattatgccacctctcctcctccccaccaccaccaccacgacgccggactcgccactcgcagcagcgacgccgccgtccaccggcgagccaggacggcgtcgtcgatggcgccgtcgaccggcaagccggcggtgacgacggattccgttatcaaccttgaccagtgagttcctcctcctcctttccctcctcttttattcctttcttagctgttctacccatcaaggcatcaatcaactagaaaaagaaaagaaaaggagaagcaaagaaaaaaaatctgcaagttgccatgggtggatgtgtgggcgcgcgcgaggtgttcgtcccaataaagcatgtcattgtcaaggaggaatgaaccaacgaacgccgatctatggcggattttctccagatttacgcgcgattgattcgatgcatgcaccttgttcaaatttcgtctctaaactcgattgaatatcaaatatagatagaaaatggagttctgacattcttgggtgctgcgcagcggcgacccgaccatgttcgaggagttctggagggagaccggcgacgcggcggaggtcgtcatcccggggtggcagacgatgagctacttctccgacgtgaccaacgtctgctggttcctcgagccggagctcgaccgccaggtgcgccgcctccaccgagtcgtcggcaacgccgccgtcgacggctaccacgtcctcgtcggcaccggctccacccagctcttcatggccgcgctctacgccctcgcccccgacgccgccgccgctgccgccggcgagcccatcagcgtcgtctccactgcgccctactactcggtaattaagcgcataaagtattactccctccgtccaaaaatataaaaacccagtaccggtattattaactacgaatctatacagaaaatagacatattgcttagtatcttgaggtaccggtacctaacgatacaaaatcgttttttatcgttggatataataatgtctatcctgtccagttagatctatcaatcagaaacgatttagtaacctgagttaccagtactttaagatactttttatttgattagaacaaatctttaggagtatgaccagactcgtagtactataaaatgtctgatccgttattaggtttatatgttttgggacggagggagtatacaatactaagggtgtgtttgagaaggagaggattgaggagattaggaagatacgcaaaacgaggtgagccattagcacatgattaattgagtattaattattttaaacttcaaaaatggattaatatgacttttaaagcaactttcctataaatttttttgtaaaaaacacaccgtttaatagttcgggaaggacaaaactatctttctctctttctcctgcgcgctaacgcagcctaattcaaccagacagcaacaaacagaggtgacagatgagatgcatcgttgtcgagtgtatcaaaatttttgcatcaaactgcatgaaaaagaaaaatgtttttggcgacaaggatatatagcaaaagcggatttgcctaatgtcacaatcatatcattccccactaaaatgatgtgatagagctgaaattaagagagtggggcagcacattgatgctgccccctaattccccctaattctttgcattggtcacctctctctctctctccatctttatcatatgatggttggtgatgattgatgaagcatatgatgtgtcgctaaatgctactagtaaacatctctgaataatctcatagtatcaagcttgggggatcgaatcaaatcatgtttctttgtagggtcggaagctttgatcatagatggtttgctgcgatttgtagggtagccgacatgtttctttaacaaagggcctgttaattaggcttaaccaagtctgaatcttacttctgcttatttagtaccataaaaaatatactgaagctctgcatgtgcagatgtgctgatcactgatgagaatatctgatcataaggtcacacatggccggccggcacgccgccttatgcgatttctgtttgttcaaatcttgttttagtttatattttttgtggtttggttgatcgatctgtagttgattaacctgagaaaacatagaagtagcgtgtcatgaactcatgattccattgtcatgtgccccgcgacatatctagtgatagatcatgtgtgttcagttatggccctcatgggaggtcggtgtgctaacttcttagtttattattcccttttgcattatagttccaaatatatttttttaactgtaccaatgattggtagaaaagaaaaaaaaaacagagcacactctgactttcttcttttgattttctgaagaatttcactctctgacagtgattaagttcagtttcagtttcactgacctgatccgatctgatcttggatgcagtcataccccgccgtgacggacttcctccggtcggggctcttccggtgggccggcgacgccgacgccttcaaaggcgactcctacattgagctggtctgctccccgaacaatcctgacggcgccatccgtgaagctgttcttgatccaaagaccggcaatggcaggacggtccatgacctggcctactactggcctcagtacacccccatcaccaagcgtgcttcccatgacatcatgctcttcaccgtctccaagagcaccggccatgccgggaccaggatcgggtatgtagatagagcttttcggtcgaactggttggtgcatgaaacacggtcgttttgagtagtgtaaactgagttgaatgtttttgtgtgtgtgtgaaggtgggcgttggtgaaggaccgggcgatcgcgaggaagatgacgaagtttgtggagctgaacacgatcggggtgtccaaggactcgcagatgcgggcggccaaggtgctcgccgccgtctccgacggctacgagcggcggccggagcagacgaaagagacgatgaccactcctcttcgcctgttcgactttggtcgacgcaagatggtggagcggtggagcatgctccgcgctgctgccgccgcctccggcatcttcagcctcccggaggagacctccggcttctgcaacttcaccaaggagaccgccgcgaccaaccctggtatgatttgatggataagatttttattcctcaagagggcatcccctattgtttacatgacatctaaatagttattaaaatttttttaaaaaaatgacaatataaattaatatgaaatatatcactctataaacatgtaagattaaattcagcttttaccagatgaaaaaaaaataaattaaactgaaaatagttatcatacatccacatctatatttattatttttgtggatgttacctcgatctcattggctttgctcatcgtatcaatggcggtgtgccggtgtggatgtggtttgcagcgttcgcgtggctgcggtgcgatagggaggatgtggaggattgtgcggggtttctccgtgggcacaagatcctgacgaggagcggggcgcagttcggggcggatgcgaggtacgtgcgggtgagcatgctcgacagggacgacgcgttcgacatcttcatcaaccgcctctcgtcgctcaagtgaaagaagacggcggagagagagaggacgctgcagcgtgttcgtccgtgcgctagcaagcaaagcatgcccatgactcatgagagcatgagtagaaccgttaactgtgtatctgtatcagtatttggagagcctttttggtagagcttcagagcataaccaaacggtttcagctttactcgaaatgggagtgaggttgattgaagtgctatcacagaatgatctagagatgtagagttggatttagactattttacagctacactttagaaccaactcttgaagttaaatttgtaagttgaagtcctgccaaataggttctcagtagtagtagtaggtagaagaagaggagcttgcttttctctagcttttctttttctcttaaatatttgtttctcgatgttgtgttttatggttaagaatggcctgcaatgtagatcagtgcctgcgtgatttcacatacggaaaataaataaataaatgttcttgttcttccttttttggaagatctaatgtttcaacgagtacttcctttgtccaaaaaaagacaaaccctgagttttcatgtccaacgtttgaccgtccgtcttatttgaaaaaaatatgaaaaaaaaataaaaagacaagtcacgcataaagtattaatcatgttttatcatctaacaacaatgaaaatactaattataaaaaaatttcatataagacgacagtcaaacgttggatacgaaaacccagggtatgtctttttttggacggagggagtagttgttttctctgttagatggaaataaattgcgttgatgggtgtaaataaatataacaatttgcaaatcgctaattcatatacaacttgtcgagtccatgcgaacttgggccaaaatgatgaacacaagcaaaattgatctaacatgagtgcactgatatgtaatattattacacaacaaattttagcctggcaaaatgtgtatttttaagttttatatatgacaaaaatgcaaaacgatcaaaaagcccaaccttgaaaataaacttttgatgaaaatggagtatttgaacatgaaaattaaaatgaactatttcaggagttgagttacttgtacaaaggtatgacaaaaaaattgtcttagtgctgatcataaaatgaacattggacattgttttttccaagacataaaatgaatctcctttgtcctgaacatgaaaaatgaacttttgtacaactgatttgtctttttttagattccaaataagatattcaaacattgtcattacgataaaactgccagataagattctcgaaacatggttcgtaagataaaaactgccacatcatcagggtaggccatgtcagaccaattttgcttatgtggattattttgtcatgggttcgtgcggactaaccaattaatttttaccgaaatgaataatttgtaagttgctatacctatttacatcaatcacgtaagttcacgtccagtcttcgatatctttcagtagcacatgaaggaaaatggaaaaaaagaagatgagtgactcgaactcgaagagaaaataaagcccagttttgctagaggccacctcaagagatttggcccatagcctgcggcaaccctaggctctctgaggaataagatcactttgactccctcaactgaccaccgaatctaaatcgtatccctcaactgcaataccagaaatcttgaccccttgaacttgcaaaaccggtgcaatttaacttccttggtggttttggatggtggtttcgctgacgtggcgcacacgtggcagtgttgacctggtttttgttccacgtggcattgacgtggcgcttacgtgcattaaaataaaaaaaatatgtgggcccatttatcattcacacaaaaaaaaattgtgggacccactgacatgtgggtcccacatgtcatcttctctctcactacccttcttcctcctctctcccttatttctctctctctctccccttgacatgagccggcggcaggggctcggtggcggcatcggcgagtgggtgtcggagtggtggctgcgatgggcggtggacctcgggcgacaagcacgggagcagctcctccttgaaatgggcggtggacctcgggcgacgtgcaacgaaatgcgtcgggggagatgggagcacgctcccagctgccgctcctcgtccccactctgtgtcgtgggcagtgaggtgggcggcggccgcagcgtcgacggcaaggtgggcggtgcccgcggtggaaagggagcaatagcttgcgcgccccaacgcgcggcggcggactggccgagcgctccggcgtcgaccaggccatgatgcggagcagcgactggagctcctcctcctcctccgacacgggccccctccccgaccacgtccgccgcgagaccgcccccttttcctcttggacttgccgccggccgcgctcgcggcgacctcgcagagactcgggaagttggcggcaggagcaggaggctcggtggccgccggggcggcaacgttctcgccggggcgccaccatccctatctccccgtggcactagcaccgctccagtcccggacccgctgaagccaaatccttgctactgcggcggcggcggcggaggggacgcgaagaccatcggctgctgctgcatggcaaagcgcggccctagcctcgccgccatcatcccccgcggcgagcgcaccaccgatgccacgaacgcctcggcctccacgaatgccacgccgccgccggcctccacgacgatggacagcgacccctcctcctcctcctcctcctcctccggcgagtagaccagcgcaccggcgaagcggtagaacgccgggagcaacgcctcgagggagtccctgagtgcgtggacaacgtctccgaatggtggtgggggcggacgagcaggagcgcgacccagtacgcgtcgaatggggagagcagcacgcggcagcagccgccgccatctccatgcgtcgggagcgcgacggaggtgacgctcctcgtgcacaccgacggcggcggctgcggcatctcagcgacggcgaactcctccgccgtgttccgaatctcgccaaagcttgtggggtggtttgacccccactatacgccgtcgccgcattgtccgccgtcgccgctccgtccatcgcccgccgtcaccgccgccgttccggacgccgctctcgcatgaagagaaagagggacagatagagaagggaggagagggaggaggaagaagggataagggatgatgatacgtgggaccaataggtcccacgattttttttttgtgaatgacaaatgggcccgcatatatttttttatgttaattccacatcagcgctacgtcaatgccacgtggtacaaagactagttcaacactgccacgtgtgcgctacgtcagcgaaaccaccctccaaaaccaccgagagagtcaaattgcaccggttttgtaagttcgggggtcaagatttctggtattgcggttgagggatacgatttagattcggcggtcagttgagggagtcaaagtgatcttattccgctctctgatgcgtccgaagagaggcccacctgagttgggcctagtgggcttagttgcttgcgagacttagaagtgggccctaaaaggccacgcggaattgaacgctacagaaaccaattccggccacgttctcttcttctccccgcagcccacagtgtccgcgagagagagagagagagagagagagagagtagactagagacgcctccgcctccgcctccggccaccgcatcgccatggcctcctcctcctccgccgccgcggcggcggcgggggcgggggcgggggcggtggcgttggggcgactcgtcgaccgcacccgcgtccccgaccccaccctgcagcggcacgccgtcgcggccctcttccgccacctcctcacctccgtgcccccgccactcccctccgcggcgcacgacgcgctctcctcgctcctcgcgtcgccgcacccggccgtcgcggcgcacgccgcggcgtccgtcgcccgactcgccgcatcccgcgccgacctcctctccccggagctcgccctcccgctcctcatcgcgcccctctccgcctccccgtccccgcgcctcgcctcctgcttcgtcaaggccgtcgccgcgctcgtctcctgcgcgcttcgctccggctccgccgcgtcgcgcttcccgccccacgatcacccgttcgtccaggcgctcgcctcgggggccgatggcgcgcgcgcggagctgcagcggcaggcggccaggttggtcgccgagggggtacacggggttgtagggtttttgaggccattcgttatgtttgctgcggtgaggaagggggacactgcgttcgtgaaggatttgattggcgcactggccgcagcggctgttgcagcggcaaggccggattctgcagtcccggtgctgaaattgcttgcggagtgcttgctgcattttggccgtggggatggtgaggtatgttgtccttgtctgatgtctcagtgcttatgcttaaacagtcctgaactcctggatgttttagtattgtttaatatgagattagtagatagatcatattgtaggaatgttgctgcatcctgtagtgcctaaattgaatttgtgtgtgtttgttagagtattactttactttgttgtcaaagggatcaacagagtttgagcttatttgtgcttacttttcttcaggaagtgcggctctggcttagctccgtggagtgcttggtggatgcttatgtggtattattgaggaagtttgctcatgctcaaatggtacctctctctcccatttgcttgatttctcgaacggaattcttcctggtttatcccatttgcttgatttctcgaacggaattcttcctggtttattgatattctaagatttactcacattggttatttcattatgaattagagtatcgattaatccatgtacttgtccgtgtttcctgaattagcaacaaacattatatctgtgctcttaatagagctttcatctgctaggatttaggagttatgtaatagattaggaactaattttttggacatgattttttactcagtaattcttaccttgcaaagtttatcaccctccaaaaacacaagttattggggattatgtagttgccttatgtacccacccattttgccaggttttgtttgtggatgttatactgcctatatactgatcactattttttatactggagattgtacttgttctatattggcaatacggctagaaggatctgggcgcattggatgcttactttgttatatttacttgatttcaaatgctattatagtatgagtcatagatatgctataacttgcttcttttaacacttaacaggcaacttatgatgcccaagcaaatagtgtggagttgatagaaatgcttctatcacaatgctcacttcatcaccaatttatgggaaatacttctgttgtacttggattatcaaaacatttgtttttggctcaaaaggaccttggtttatgctatcttccagagatttctgttgttctcagctcccttgctttcattctcagtgggctggagtttgaacatgagcaactgtctggattgaaactact

SEQ ID NO: 9480 - DNA, 5759 bp, Oryza sativa
ccatgccgtgtcattgcacctgtatatgctgagatgtcacagacatacccccagttcatgttcttgactatagatgtcgacgagttaatggtaaaaccaatgtttttttttcctcctctcccccctctgttatatccataagaacaggtgatagtctctaatgctcttctcagtctcatctgttctgttcttcaaccgattttctttaggacttcagctcatcatgggacatccgagcgacaccgacgttcttcttcctaaagaacggggagcaggtggacaagctcgtcggcgccaacaagccggagctggagaagaaagtggccgcgcttgctgacagcgcctgaggcaaattaagccagtgacaatcagacattattgtcaggaaccccaaagttcagttcagagttcagacgttgccagcaaatatcaattatcatcagaggctgtatgttctgctgaggtgtttcttcagacttggttctgtatatccgtcatgagactgtacagtccccgggtataaagtatctttttttctcctgttaaaatcacacttttgacatgccattttggcactattattgcctgattttaccctggtgattagtgatccgatgtatgttgagtgtgaactgatacagaacaatagggaaatatttttactgtaatattgacaaatgccaggaatggctaccaatctgccatgaatccatgatttatggagttcatgattctagtatctgatgggcctttttagcgagtgggccgaatgtatcaccgcacagctgctctttggatatgatgtgggcttggtcggccagtaaccatttgtgacgaacctcatgggtccatgacactgaatttcaggaaatcacaaggaccggccgcagccaaactttgatttttcaaacttaactttgaattactctaggtgtttttttcaaccttagcttttaaaccattagtagtagaaatataaaagtccttcaatagaatcattttttgttgacttacagtttttcttctaatgttttgtcagcttttagccaaccaatgaaattcttcaagacgtcagaattctaatgccatcaatgatatacagagacacataaaacagtacatgttgagatgcagagcgtcgtcattcttgtagccaaccttgccggcacggccagccgctaattaaccactccaatgaatgcatcacagcatcggactatacagtacgtgtggctctgtgctcctgacatgtagttgtacgtgccctacttgtcaccagccaggaccagcttgcacagtgcaagtgtcatggatgattaagatatgatggctaatcctgaattactcgaggatttcacacgcaccattagacaggattgagtttgttttttggtttggagtatgtcgtttgggctctgttataaagccggatcgatcatttgattgatatatgtggtgttaagaatgaaaataaacgaatggattctgattggcgttgggaattgagaaagattaatagcgaaacagacggagaacaacttatatattggtggcggatctagaaagagatagaggagatctgaataaactagataaagctaaacctcttcccatctacatatagcaaaaaaaaatttagcgggggctctgtggggactcccatagtacttgcgccagtagtggtgggctcgagattttgcccagccggccccgtgctggatccgccctcgactatatggatgctaatagctttcaacacgccgtaggggatttacgactttaagtgtccccgacgttcaatgaaaatacatctcaactgattagttttcttatgataaaaataactcatcgggatttaatttttatatttgacaaatgtacttatgtttacggctaattacttttcagtggtagacgatgtacacctcaacaacgaggtgttcgtggtaactttgacaatcttaagatataccgattcagtcttctgaagatgctcataggctcatagggtaaggtgtacgtgtgtgtttataaggatgtatgcacgcgtgttgtgagcacctacaattctataaatttttgaataagacgaatgttcaatcgttataaaaaaactcaaagcgacgagtattttgggagttgggacggagatagtgctgtgtgtcttatctttaataaaaattaaagcacaaagaccacactaccgttattaatacagagtactacagtagtaattatagtttgcctgccttgtcaaccgtggcgatccagcggcgcgcggcatgggcgacgctctctggcgtggcgtcgcgccgcgcccgcgctctctcgacgcgcacgcggcgtggcgtggcgcgacgtcgcggcgtctcccgccacgggtttcgactttcgaacaaaaaaaggaatccctcctctcccgcgcgcgcgcgcgctctctcgcaaacgcggctgtctcgtggggccccactcgctggcgatggattcctggacgtgggccccgcggaccagtgagagataacgaggcttcgtgaaacacaccagtacaccagtacaccacgactagtccaacagaggacgacctgggcccgcgtgcccggcccaacaggagtctcatttgttcccagtgtccagcccaaggtgaatttcccaaactgccctcggcttgctgctggtggtgttaattgattgattgcttctccagctataagctcgcgaagcaaatggacacgctcttctttttgtcatctactgcatggcgcgcgcatgtctccttccttcgtttgaacgccacaagcttcgcgtgcgctttctaatactgataattaatactccctccttcatctcaaattatagaacatactttctccgtctcaaaatataaatctaaaattgaactgaatgagacgtttctataacgtgtctggacatatagtccatctatctggtccgaaagagtatatttttcacacggtttttaatgacatatttgaattgttaatttattttatattgcgtttacaatttatataaaattaacatcacatgaaactattttaaaatatgaatctagtgatagaacatacataatacttacttagtatagatatagttagtatatatattagtcaaaatttaccaagtttaatttttctttaaaaaataccctataatttagaacgggagcactatgtttcttaatatataatgtcattgatttttaacataatgtttgtttgagtatctctcttgtaaaagaattatataaatgttattattttgttgtgactttttgtctaaaaaactctaccttaacttatatatttatatatttatattaaaatttattaataagacaaattatcaaacgttacacgaaaagtcaacagtgtcttatataaaaatatatatatatgaggtggtatatagttattctcaataggaaaatcatttctttgtcattacccttcaagactgttattttttaatggcaggaccgtgttattggttgcaccgtgacaaataagaaatggtggagcctgatctgcccaagaactgcctaatgttttctttttccgaacacgcaaaaggattgcacgtcaatatattagaaggaaaaaagtttttgttatacaaagcaatcagccagactggcttatgcctaagggggaggggagaaaaggcaaaataaaaaaaacttgaagataggaactactacgacgttaaaaacgcaactccaaacagcaggagggggcagaaccacgctacactcccaataaatccccaaaaaagcaacgccggctaaagaccacaactggccctccaagcggatggactccagaaccattgcgactgaagcgagcgcagagtcgaaaaccctaaagtttcgttccttctatagctgccaggaaactaggagtaccaaggagtcgaagccgctacggaggtgcttaggtaaacaaaccctggaggatgatcaccaatcctggagccagctgccacgagggagagagagggcagcccaggaggggtcatcacacggagccagacctgccgtcctgaactgcctaatgcaaaaaataaggaatactttgtaaaagaaaaatagtgtattaataagcgatttaggacactaaaaacgcccatgtgtacgctcgagccgtatcttgttatcttgttggaattcaataataatctgtcaattttttggtaggccaccctcctatcacgcacttaaacagttgaaataaaaacgtgatgagttgtgaagcatcagggtggtggttgatgtgagctgtttgctccgcgtgctgcatgcagatggcttcaattttgctcagtcaaacactagtattatacactaactaatacttcatccgtcccaaaataaatacagttttagtactattcatatccaatgtttgaccgttcgtcttatttgaaaaaatattatgatcagtacttttattttattgttattaaatgataaaacatgaatggcactctatgtgtgactaatttttttaaatatttttttataaattttttaaataagacggatggtcaaaacgctgagcacgtatatctatggctatacttattttgggacggaggtgtactacacatcatgtggagccaatgaaaaataatatcggagcataaaaaaaaattagcatactatgaaatacacagtactgcaggtttgagcatacaaatgcatgggatgatgggaatatcgggtgaacccaactgaggggttgttcggtttttaggaattacaatcataaaaaagaaaaggtgaaggcatagaaatacctatacaattcaaatcatataggatttttacaacagatttaattaatgaatacaaaatttcctactgtctcaccctctacaattggtagggaagagaagaatttcttttttacttcatcatccttgcaaattgaatggtactgaaaaaaatatttcattttattttcagcaaaccgaacaagacctgaaaattcaaaacactcaaatcttcttcctctaagcctctgccgctgggcccctttagctgtcctcgccgtgtgggtccctcacccctctgccaggtgggcaccacccctcgaattgattattcctaacaacattccgcggattaattttcttaccactaataatctcactcctaataaatcctatctcatcgtttagtctaataagtcaaaaatctaaattttcaaacttaattttaaaatgtttttaacctaatttttttacttttaagtcgctacgaacaaatatataatagttttattaataaagttaataaactaaattctattatctaataaccgttttgatctaatccacctgctcccgtcgcgtaaacgcgtccagctcatcgtcgccggcgcctcgtttcaccagtcacgccatctaccccaccgagggcaatcttgtcatttcactcacaaccatctcctcctctttaataacagcgcactccactctctctctctctcacctccctgacactaaactggtttcattaaggccgttttgatctcctctccttctccaggttgggagaaggaaggaaggaaggaaggaaggaaggaggctttgcctcgatctcgctctctccggtaatctcttctccttctccagcccttgctcgcttgcttgtttgtttcctggcgctgtgttgcgatttaggaactggagtttttttttttcgttttctttttctggatggtgttcttggcctgaga

SEQ ID NO: 9481 - DNA, 4383 bp, Oryza sativa
ctgtgctcttattgattgccacacgttgtcagtgtctacatcgtctgttcctttatgattgtgctgcttgcttagcctggagtagtactagcatatatacttgctcatgcatatgagcggtcatgattactttataaccagccgcactggaggaaaaaatgcttgtttttaagcttatgtattacgtatatcactctcttatgatactgtgttgaaataattactcattccttcgtttcacaatgtaagactttttagtattgtctactcatttagatgttaataaatttagacacatatatatgtttagattcattaatatctatgtgtatgtgggtaatactagaaagttttacattgtgaaacggagggagtactgcattactatataaccttcgaattctcattaacttcccgttgtaggaagtacctttttctttggttctaatcgaggctaaaacaatgcaaacgttgcattatttaatacttgtataattttaaaatctttggctatgaataacttctaaaatatgtatattagaaatatgtagattgttttattaatgtatagattagttttaaaaagtacattaataagatcatatatttcttaatattttatatatatatatatatagaaaataatggttaaaattttttagattgtgtcattgttcaaaacgacaaatattaggaacctggatggtagtaaagtacgtacgtacatgatgattaaatccgtgagtatatactacgtacgttggtcaatatgcagttagttaggtgtatgttggttgcatagagcgatgtttttttaatatagtttataccttgtatttgtatacatgaactctatgagcacgcgtacgctcgcaggcagctggaactatttgcgaatgatgatgagatgaggaaggcactgtggtagatattcttacgagtagtggcaatgtcaccctcacactttttcttgtactgccattaatcccgatttgtccttatttatctgtttactttctccctcgctctctctctctctccccccatgtcttttttgcaacaccataatattcttcaactctcactccatcattcaatactgggccttgctttttcatattttgttgcctctacatctcacctttcccttgtgctgcagttgtgtatagtaggagaagctgatttctatatctctcttcccctctctcctaaagatcactaccagaaagaagtcatgctctcctgcttgatcgtatgctagctcatcctacagacaattctttgattcgtatccaaacagacaagattattgatcttgtttcattttccgtttctactgtttctcctctattttccattctgcagcttggatatcagtggatcttggaagaaacaagcagcaactaagaaaatctgccacatattgctgttgtctttcttcgtcagatcatcagatctatcctcttcgaccacaaataggtaaggatgagcaggttttgactagctggctagatccacctgagggaaatttgagaaaaaaaagagcatgattcagtctctgtctctcttcccttaggtactaatatatatattaatatctattcgagctctttgagatttgagcaaacatcaggttgttttcgcttcgaaatttgtgcttttcttgttgagagtcgcacacatgtgctcatacagtggatcattgtccaagcatttgtttcaatcggaccattaattctcatcggtacctatttcaaataattctacagcataaaatctacagtttcaatgtccccttgtttttctatagtttttctgtaagaaaagcaaagctaatttccccatttcttgcctccaaagtttttaaaagatcagatcaaaacaccttatgctctgaaaccctatcctccgcccatcttttcagtacaatccttgctgccatgaaaaccctaaccctagaagaagttgcacaaatactcatgcatttgtttgagaaataactgacaatttcagtaccattcttcaatttgcaggtgtagctagctagctcgccggaaatggcatcctcgtcgagcaccagcaactccgccatctcctcggtggtcgcgtcggcggtggccacgacgacgccgggcgccggatcgccgtgcgcggcgtgcaagttcctgcggcggaagtgcctgccgggctgcgtgttcgctccttacttcccgccggaggagccgcagaagttcgccaacgtccacaaggtgttcggcgccagtaacgtcaccaagctcctcaacgagctgctgccgcaccagcgggaggacgccgtgagctcgctcgcgtacgaggccgaggcccgcgtcaaggaccccgtctacggctgcgtcggcgccatctccgtcctccagcgccaggtccaccgcctccagaaggagctcgacaccgcgcacgccgagctcctccgctacgcctgcggcgaggtcggcatccccaccgcgctccccgtcaccgccgccccgaggctcgccgcggcaatgccggcaccaggccagctcgccgccgccgtcagtgccgggatgtacggcggcggccggaggctcggggtcatcgacggcggcgggatagcgccgccttccccccacacggccgggtgctactacgcccgcaacaacaacgccgggagcatcggcgctgacgtggcgcccgtcctaccttacgcttccgtggctaattggacagtgaacgccattagcaccaccaccaccaactcaggatcagagagcattgggatggatcacaaggaaggaggagacagcagcatgtgaattgaagcgcggcaaatagtaagtaacatttgagtgaatttgttgcattgcaatcatgcacgtatatgcatctgttcgctgtatgtatgtgttatcagtgtgctactactacttcttcttcagatgtggagatctgcgctttggccttgatgagagaggatcggagaggcttcaggaagatggcagcccattcatcccaggttaattaagagttaagaagcaacctatctatctatctatatatagccagcatgaattatatatatcatctccccgtccctttttgcatgttgtgcaaaaccatactttggagttctatatgtaatcgaatcgagatcttgatctctcgtcttttcatgattaattcgcgtttttcgcaggatccatcagtcattagtacgtagcatgctttgtgatcagaaaataaccacctttaggccgattaaacaatgcaccgaacacatctatcgataggtgaaaagatcctgcggcttgcatgcatgcatgagtaccaagctagctaacttggttgggctaattaaaggctacatgatctgcatcttatatcatatgtcataggcaccagtggcctatatgtttgcatatatgctccagatatacaccatcttgagatgcttaatagtcttgggggaaagattaaaacagttgtttattgagagcatcacatcgtttggtttgaagacattcttcgcttctatatatgttatagtaaactgtaaaggtaggaaaaaagcagtattcccgtcactattcttataggccccatctttttatggatctcactgtggtgcattgtacatgtatcatgtatttattctatcatctagaattctcctctttggaattaattgcctttttcactcccttgaagacttagtttggttaattagctattactctatatccccaccaaaaaaaatatattactactatattcttatgtgtgcttgcctgcttatatatatatttgtcatctttttgtggtcaatttactgaattgttgttcataggtattgaattttactcttattgcctttctgttttcttcctaaccatccccagttggaattcctggctgtacatgatgctgtcgttgatctgttttgaccacttgaatctactctcgaatttacctctattattgcaacaccgaagctaagtttcaaacttcctgttctctttcacaaaaaaattgaaacatctcatgggacgacctctctatcttgtatttgaacaaagtggagctccatttggaaaaagaaggtatatatttttcccttgttccaatctctgaacaatttcccttgaaattgttgcatttgttccaaattttactgaaaactatgtcctttcttgatatgtcatcaaaattttgttgccattaatttttgttttgaaagatattcttttgctgtgacatgatctttcattaaactgcatcgcaccacaatctcagctagagactttttttagtaagatggaaaatttagggagacaggtgtggattccatcgtacgttaattggacctcaagtatccagcattcttta

SEQ ID NO: 9482 - DNA, 10347 bp, Oryza sativa
agcccctccggcaaggatctgatcaccaaactcttgccgacggtcaggagctagctagtatatggatccagtccggcacccccggtggcagtaatgtccctgaaacagcatataactattacaagacacatacaaacaagtcattgtatgaggttgagatatgattaacatattgaaggaaagaatgattctctcaatagtttttaagtttgtggatatactactatataacaagtgtacataatttttctctctttcttttttcaccaaggttttgtcctagtacgtacttcggtatcgcaatttaatgccactacaaaatgattatactctctgtagacacacacaacaaacctcaacaaaaacatatgctgcaatgaatatagacattaataaaacgttcttcatttatatagagacaaacataatgcactatacttagagaacaatggtggaatgtggattgatataaacatgtacatatatatatatatatatgaagtaacggacaatatatatatggagctgattgaaattaagttattcactacaggttggtgtcccggccggaatacaagtggatgatagcatcaggagtcaagagtgtcggctgctggttcacatcaatctacaggcatatgtttatgtacgcaattttaaagatcttacgtacgatatatatatattggctggggttaggtaataacggccctacattagaagagccctaggttaacatatggatgtataatatattccagcacattatttgtagtacgtactctgaaaattcaagatctcggtgacgccaatgtgtttgcacaatggacaagattttcctgtatttcatacttcagaatgcatatatatgcatgcacatagcctggcggattgcaagactgactagctagctatatttcttagtctcctttaaattttgaatatatatatccagttatccttcaactcttaaaactggcgagatttaatctgaattccacattaatttggttgtggtagcaaaaaagaacgaagataggggcgaaacttcacctatcagatagagaaaataagtgtatgctccagcgcttcactgagcaacatctatgacacccaccaccaccttgaatcccagtacttgtacaccatgtggatgccttgcatggtcaaatatattggtggaaggacctgtcctatccaattttgagagttgatgaatgagttttattgagtgttgaaatggatatacggaaattaaactgcaccagaattgagagatggaaagtagatttcttgtaataaattgttatagctttctactatctccattctcaaaaggatgacgtctagatagtgttccttttagattatcgatggatgaaaactcatgaattctgattatagagataaattaaatattatatataaattataaaggtccaaataatgcggtagacgaaagcttttcattttggagaaaatacattttttaaattgtggagtaaataatccgcagcaatagatgaataatctaaaaacaataagtggctttaaataggatgcatgcagttgaacctcaaaatcttgaattattaatagatgcaaaactaccatgatttgaaatgtgaaaaaaaatcatatcagtagatttaccatgaaaaactctttcatagaatattattaatcatttttatgaatatatggtttgagaaattaaattaaagataaacacgcgcattggtcgccgtgtcaatatataaccaggggacatttaattatttgcattatgtgtctatgacatgtgggttcagtgacaaatcgtttagaaccactcataagagtggcaaatagttaattattccatatcctaaacgtcatcctgttgagaacataggtggtagctagctaacaaggaacaagtaatgcgaaaagtcattcgcaaaaaaggtaaccccaataattaaaccaagtatgattgatggtccaggataaaaactattcgttagacttgatagtttacctggccatgcatcgaacgatcgagatcaagcaaatataatacatatgcatgcatatatatactacatgtaattcaaacatatggtcaattggatcaccgtcccagcaaacacattggcttgcaaatcgaaaaaaaaaacgaagatatttagacaagaactcacaccaatgaatctgtttctcgcattgcatgcatccatgaataaagatgagctcgtcatctccgatgattagaatggacgcagctagagacagagctagtggttgttgaggccaaaaaagcttctgctgtgacagcagcaatcacacattcacacttactaatcatgattcattgggcacctttacagccaataatgccagttttaaacctcccaattacaccattaactatatggcacaatcagagatcctctcgagacagctatcaatcaatggcgatcgaattaaacttaattgttggcactccatatatccagcagcagctgtagcagcagccagcagcatgtgatgtgagctactactgatactgatactgagctattgcgatcgcatgcgaagaagattcagtagaagttaattgcaagcttaatcagattcagtagcatttgagctgagctgagctgagatgatcatggggagagcagtggagcagcagcagggtggatgctgctcggagaagaagaagaagctgaggaaagggctatggtcgccggaggaggacgagcggctggcgacgcacatcgcgcggttcggcgtcagctgctggagctcggtgcccgacctcgccgggctgcagcgctgcggcaagagctgccgcctccggtggatgaactacctccgccccgacctcaagcgcggccgcttctcccaccacgaggaggagctcatcttggctctccatgacaagctcggcaacaggtagctagattattgctcgattaattgtttgctggattaatcatgaaacgattgatttgatcaatggagttcgtgttcatcgtccgtgcgtgttgccgtgttgtgcagctggtcacagatcgcggcgaggctgccggggaggtcggacaacgagatcaagaacttctggaacgcgcggctgcgcaagaagctccggcagacggagtcgtcgtcgtcggcgacgacggcggcgggggcggcggcgaccggacaccgccgcggcgaggctgaccggagtcgaccgccgccgcctgcatcgttcaacaccttctctcacgacgaccggacgactcctgctcctgccgcccacattgccgccgccgccgccgtcgaagcacccgcagcgatgacgacgacgggcggcgccgtcggcggcggtgttctcgtggacaacagtggtggtcaccgtgatgcggtggcggaggcggcgcggggacacgtcggcagcggcgacgacgatggcttcttggccgtgctgcttggggagtactacctcgacgccggcggccacggcgacggattcagcttcttgggcggcggcggcggcggccacgtgttcagctaatttgtaattagtttgcttgctttaatttgatcgtgtaatgatccatttcattggtttggggctgacaataattagcacacaagctcttgtttagttgtgtttgtcaaatcaaatgtgcaaaattaatctgaataaaattgttgatgatcgatcgatctctacttattcatttctcgtctctctcttgaaaatctagggagctccctatttcaggctaaatcactccgagagaaattcaaattccaaagagaagttttgaatgttaagctgtttggacacaattaattcaaccaaatttgaagagatgattgacaaaaaaaaaaagccctcgggagtgtcgagatggcgacatctcacaacatatcgcccaagaaactgatcctatatgtaccactttaagaatttaataacacgatttagacgaactaattatgcaataaaagtgtatatcagtatatgatatgctacgtgctaattaagtcattaacaatttgattaacaaattggtattgctactgagaaaggcaataactaaaatttaatttcctgcgcaaccagtttgatggagataccggggaagatactaataattcgagtaatccatggagtacaaaagataaactaattaagcaagcatgtcgagtggttggctactactaatactaatttatattcatgaatctatttacattttgtatatatactcaaataccaaccggacacctaatttcttgaattagtactacttgataccctttttaaaactatcatctagaagcttcttttcttaaactagaaagttcacgtgctaaattagccaaccctctatacacttgtatttgggccgacagcacagctagcttttatctgtagttgggctccacttctattagggccgaatgctagtctgggccttctatctctagcgctcttgggccgaatctgacgggagaatgcttccggcccatttcgaagtttgcactgaggtggtgagttggatatcaagattcgtgcaggtgcagctggttgagctgggtggcgacaaatcgaatcccagtcaaattgcacagatcttggagtggatctccctgcactgcattcgaaatttctagcggctcagggtgcagatctcgaggaaatttaacgtcggtaacagtgctgtcaaatgcatgggatcactctacctgcgacaagcgacgacgacgacagatagaaaacgatttacctgactacataaatttgttcttttttttaaaggatgggggagtattctgctaaacaaactaattaaccaaggaaaccaaggtgaaatccatctcataatattaatcataaggaatttcgatgtacttgtcacctccatcaactttaattcaattttctacctattttaaaccccaattatcgactcactagttagaaccaaatctcatttaatatcggtattctaatcttttcttactatccttaattttacccaaaagaaaataataatttatattatgacacagagagagtataccttcattcatagttttatgatgtgtctcatctagatctacattactatattttaaaacggagtatcatatactgctgcagtaactacaagctactataacaacttattgagaattctttcaagatgataatattgtttatagaagttcagaatgagacttctgtggtcaacgtttatagtaagcttggaataatattgcaagatacagatagtcagctgacacttgtgagatctaactctattataattggtgcactaatacccaagacttctgataactactagttaaactgtgaaatgtgtcagctagctataggttagcagatcgtcaatcaaaagaaaggtaatgattgtgatagtaaatctgccacccttttctagttccattgtaaattttacaaattagcctttgaatttcttattcatataaaaacaatcaataattaaatggcagccacatatttcctatagcaaaaagatatataacacgtttcatgagaaataaacttttatttattttagatattactataattttttttatctgtaacaaaatacaggcatttagctagtttatagagaagacaataatacctaggtatagtttcctagtactttcttggtgctgggctgctggcctccaggcttccaggaatccagttccttcacttgtataaataccctccctttggctacctcccttgatcgccaggcctacacattttcttcatctaattaagcctacacaatcaagtagagtactaacaagtagctccttgatcaattttccatttttttttcagtggcaacaatgtgtggctcatttgctccaaggtcatcgtctctgctgctgctgctaatcactctgctgcttgtcgttgtctcacgcccacaatattccttggatgctagcgcattatcaggtaaatgcacatattgttgtttacaacattgttcttgacattctgaaaatctctgaatatacatacatatgctgatctgttcatgcatatatgtatacgtacatagatcacctcgccgtcggcgatgcgccgccgccgccgccgcagcacggtgctggccggaggctactcagcacgcagaaccaggtgacgccgccaccgccggcgccggtgtcctcgccgccgataggccctgcgcctaccctgctgccgccgccgccgccggcaaaataaacggcggcgacgtatttgcaacctcacgacgaccagatgccacatgcatgtgtaccagaaacagattatgtcaaattgaattgatgcgtgtgtaatcaatgaatttatcttgcgaattgcgatcgatcgaaagaccattttctcgatcagctagcttgatgggatcatattcatatcctagctcaaaatttcatgaatcatttcgaataaaatcccccctcttctcatttgcgaggggctagctggaatcatggagtgaaatgcagttgcgacgactgacaggccgtcactttatgttccatgtacgatgaagagttgaacggcagcatgcgtcagcgtgtgaacagtctctactacgaaaaccatctttatgtacgaggaccctataaactacagacggatcataattagtcgtgtctgcaaaaattgaattacattttcgcatgcagttacaaaaggggaaaaaaatatgtcgtttcgaagatcggttgctagaacacgaaattaaccatgataatattgttataacatgccagataatgtccccgtttcaaaggtagcgaaaattcaactaagggcatgtataaaggtagagtctaatatgagctctctatattaattaatatcactagagactattctcctacaatagtagagacaataagatttctaaacaattaatgcactaaataatttttttattatacttatttccttttctctatcctcatgcaacaaattttccgttaataaatactaagagttgactctgagccgttgtcatgcgtagcaacaatgtttatccttattccctctctttcttccacgttattaaatttacttgcatgacaataaagagagtccgttattagacactattgtacatgcactaattccattgagaatgaggagttactatatacttgtgtgattttaattatggaaaaatcggtccgatttaaactaagagtatcaatacaaaattacatttaaaaattctcttaaataaaactttcaaatgtagttgtattatagtaattgaaatgtaactatattatagtttatttatttctaattcgcaaataactaagtaaaaacatgtccatacagcgatggctagcattattgccagcttgctgctagaaggtcgggctatatatatacggagaattttccacaccagggaaggaattgaacatgcccaacaatgaaatacaccagcgatcgctaatttcgtgattatttgtctgatttttgtgacgaaccggcgacaagtggaatctatagccgtgcccccaagctcgagcgagcgcgaatctcgaggcaattagcccgaccacctaggccggactactgcgccgatcacatggcgaaacctcggctggaacaaacacgtacgtacaacaatctggctggctgtccgatgcagcgtctccatcatcgttcgttcagtctatgctcccttatgagtatttccgcctttctaatataggttaatttttttatccatctcacacgtatcaattgaaaaaacttaaaaaaaacttcatttcttaaaccacaatacaattattctctattttatctactcctgatgcatttatccatttttttaaataatggaatgagtaacatcccggctacagccattattacaatctagcactttagaagagtatagttcaaaataaagcgaatcacaccaaaccaaattaaaggaaaaccaaacaggacaaggagaacattattccaatctattattgaatctccatccgtggttggcaaaaagttacataaccgtcatctcaagcttacgacatgcaacaatcaaaaactctccatcttcatcacacttcttttgtaactgagcccactgccggagccattacttttatatattctagtgtgtaatattagctgaaaaataaatttattttgggatcaatgggagggatgaaaaatgaacccactcagagacggaggaattaataagacaattttctttacacgtgtactagtacttttgcaatgcttatgcattcaacctatataatctgcctaaatgcctaattaacatttcagatgtaactacatactccctccgttaaaaaaaaataataaccaacattgagctatgaatctgaatgagccgaattcatagctaggagtcgttctttttttttttttacttacggagttgtgtattgcggcaagcttgctggctctgaactttttagcttgtctttaatccattctgcatgagtacttgtgcagattgggtagcagcgcgacgggcgtctcatcgtcagcggcaatacagcgcggcggcggcggtggcttcagcagcagctctccagccagcctccctcgtctccggcgaccgtaccgccgccgccgatgtgcctgacacggccggcgtgcagcagcctgaaaatttaaactcaatttgtgtggttagttcgactgttcatgttggagaattagttgggcctgggcctcccaaccagaatgggcctaatgtcgagcggcccaaagctagcccaacaaccagttgcatccgagagtaatgctcttttcagagcagtctctctcgcagaaagaaaatggaagagctagcagagaaatcttccagctgcagcttgcagataatgatgatcaatcaccacccctacagtgatatattgtactactactcatctgcagccaatttggcaacttgatctcattatctcgacttctttagttagtactgatccagagattcccttctactactacctgttgtgatcttttcaactaaccggcagtcagtcatcacaaggaaaaagcctggaagtctacatgaagtgcatcactgcatgatgcttcttctacttgcctgtcgatcaaaagttgatgacggaccagccaagaatgaagaatatatgcatatataaccggataagtttagctttagcctgaaagaagttaagagatgcatggatatgatgagaatgagagaccaataatatgtactctatgtactattactatactcaagcagacagaagaagagacaggctatggctgcttctctgaatgtgttacagtagtgtcaagcacctgaacattggagtaggttccatggctgctttcttcagagttcagggactctcctacctatagcaaagtgtagtagtagtagcacttgatcagactgcatgctttaattatgtcatcagatgctctagcttgatgctagctgtaacctcctaacacttttggaagtgactagaaagatctgacaaaggttactaaactggagtagagctaaacccagtcaaagaaactgttagctggccggcatggccggctttctgctttgctttgccatgccatgccatgccatgtactgtgtgcaccatactactcctactactactctatcaatgctcttatatacgacaagcgatcactaaagctagctagaagaagaagcatgggatctgcaggcccttgttagttttgggcatttgctagctgctatgtacacttgttttacttgtctgcatccatgctttgctttctcgttctttcttgtgactcatgagaattcagattcagggtcagtttggtgttttggttggagggatgaacatggagacggcatctcacttttgctagtgtttcgatctggtcgatgcgcaccgcccattttgatactggccccaaaattaagttaccacttatttgaactaggttttaatgcacattccaatataataatcccatcacttaaacttgattttgaattaggagagatacagatcgtcaaacttggagtcgttgaaatgctatatttataattagacatattattattgataaattaatactgattttattaagagatttgcttcggtccaacaaaaagtacctctaggtaccggtaactcacagtaccaagctagatccaatgatcggaaacgatttgataccgtgaggtaccagtatctcgaggtactttttgttggaccagagcaaatctcttttattaaacccaaaatggaacacaagtatcacccaataacaaaacgctccattat

SEQ ID NO: 9483 - DNA, 5056 bp, Oryza sativa
tcctggctatactatgacactcgtattttttttatataagtactaacagagttatttgatgtatagagttatatacagtggtttgtaatagttctgtccacactgctatgaggtttactctgttgcactataattatttttttgcatcacatgcaggtccaagctggtgtgcagattttgcgtgacaaacaggaaattgttgagacacagctccatcttgcgaagctccagccacccaagtctgatgccctggcatcagataatgttggatcttctcagacagattcgcaccagcatgcagtagctccacagcaggcagccattcaaccacagcatcaagccctcacctcttcacaaccactagcacttcctgcccttcctgctccaaatgcgcctcctccacctccaacgcttcaaagccaacctccatcacagtatccaggccatctgccacattcacaagtaccaccggttcctccttctgctccagttccttcggtgccagctttaccacgggatccctactatgctccacctgctcagccgactgaaaccatgcaccagcagtatcaggcccctccagttccacagccacaggcacccccagcgccgcctcagcagtaccaaaccccaccccaatttcctcaatattcacaaccgcctcagtctggaatggttaacccttcgaccccactcccacccgctgcaccccagcagccagaagaagccatgtcgtatgcacctccacagagctatccaccaaatgtccgccctccttcaccttatatgccaccgcctagtggacctgcccctcctttctatgggcaaaaccaaagcatgtatgaacctcctgtgggcaggccaaactctggcccaccaccgtcctatggtgctggcgggtacgggccacagggaggaagtggtttctctgaatcatatggttacagcggatccccttcacaccgtggcaatgcagggatgaagtcgtcaccctcaccttttgctccctcagggccatcatctgggggaagtggcaactatggcaggctccccacagcccaaatactaccacaagcagtgcctatcaattccagcccaagtggttcctctggcaacagggtgccggttgatgatgtagttgagaaggttgcaacaatgggattctcaagagagcaagtgagggcaactgtgcggaggctgaccgagaatgggcagaatgtggatctgaacgtggtgctcgacaagctgatgaacgacagcgatgtacagcagccccagaaaggatggttcggtcgataagttgtgatgcgcatcattggtgctcgatgttctcatttctcagtctgtgtataatactattgaatatgcttgcttgcgcacaacctcggaattcttcagatttttatatggcctggaactggaagaactgaacaggcaattataggttggtttgctgcctgccctcagttgcttacccttggtgaaaacatgcaactacagtcaacaggtgttgttaatgagtttggtagtgtctctctggatacccttgttcttttctataaatctattatatacatgtaatgacggtatattaaatcataaccatggctttcctgtgttctgtcaataaaaccatcttgagcatattgctgagccccatttgtgtccttcaaatccgtactgtcaaccaactgttatcaatcaagttgatcagcacgatgtgatttctgttcaccttcaagatgtcgcctgaacatatgaatatatgatctccaaatttgaaggtggcaaaactgtgccaaggtgtcatactagggtgacatgcactaatacacaagttgcaatccatcaaagcctccccacaatgtaggcacaggcccaactaggtccacaatgtaggcacaggcccgtctcccagttgggccgcgaggactggtggcccaactttaccaccatccaagctggccgtccttgtcgtttctggtttctgaccctactgttctgatcaagaaaaagaaaatggtttataagcatttctgccgactcgagctcaaaagcttaaaaaaccccggctttgtgtctgcctgacccaccacctgtctgcacgctgcaagccggatcgatgcggatgtgtgtactttgcgcagacacagtgcgccacgcgacgcaaacaggcaggcagcgtgccagccatgtgctgcgttgcctgcctctgcgtgcgagcagccgacgggggggacggggacacagccgcgtcgccgtgatggcgacgacacgctgctgccgatcgatacgcgcggatccggtgcgtgtgcgctgtgggtcgtcggggtttaccaaatcggtattggtaggattatcgctacctacgctttaacgttatcatgaacatcatgttattatcatgagatattcttcgagtttaaaaactgataaagctattgtatatgatacccgtgatagatatgcacttgatagtacagtagtgtatagtttcaactctaagatttcgtgtttaatcctaatacacttataattttcttttaaagaaaagttgttggagaatcgtttcatcctctaaatattatttttttaatgataaacacgataatagtgcggttttataaatcctcgctgcagctctcgctccgatcgatggtccctccctcccgtccgggtccggccagccagccatgggcgcagacgccgggtacagtgaaagcacacgcgcccgcacgactgtcatgtgtgaccttgggccagcgtcgtggtggtggtggtgatgaggcgtgtggaatggcgtgcgcatcattgctttttccctgtagagaattaacaaagggcatatatgttaccacaaacctcaaaggatgtgtgtgttcgcgcttggtgctttcttcgaaacgatacacgtcaacaagggactgttgtttatacagtcgtggttgtagccgaatagccgattctagttttaaactactccaaactcaagatttttcctttttaatttaaaaattacacggtacaacgcagacactcacaatacacgcacactcacccctatgaacacacacacataaatcctacccatatgagtatcttcgaaaactgaaccggcaaattctggagagattgacgaagtcaccataggcgcttcgctgtcgacgggcacgtcaactaccactaaaagcataacgccgttaaatcctaaaaaattcgcttccatggggagtcgaacccagaacctcatgtgctactgaggctctttatcctttttaatttagttccattcgcgtaaagcttttgaatcactataagattaaatatataaattattataatttctatttatatttaaggctctattcgactgcgctggctgttgcatccagccagccatttttaaacacggccacattcagacgtgttatatgtattggtttatatataaaaaaaaaacctttaaaagcaccttcgttagcaaatttagctatctcaatatactaaaatggctctctctctctctctaaatattttagttaacatatttgatatctactgtatgagtccttttatctagactctctaaaatgatggcgagacctacatgtcagtctctctagcccttgtcttcccctccaccgcctcgctctattcatctattagcggagccatcgaagcgggcacttccttctcctttgctacttgcgtcgtagctaacccacgccaccactctgtaatgtcacgcgagaagatggcgactgaggctactgattgcttcttctcctacaatggtagcaatgtcgtagactacctccctcttattcctaatttaccgatagaaacggtctgatccgttggtggttacgtgctatcataatgtattgtatggagtatctccttatgtgacttttttttattcatatcatctattcatcgagtaagattatcgttcccctatgttgtctatgtgtagataaaacaaattttagaaacactacatacgtttgtatacttaacaatattatgaattgccatataacaataacataaaattcaaattccagtcataataacattgtgaaaaatttccagttgtttaaaatttcatcgagggagaaaaaaagaacgcttccgcggtccgcactcccgacaagcacacctggaagcaacatatggcctctaggtacgtacaaacacggcaatcatccaaatagttatgttcccctcattcctggcacaacaattccacaaagtcacaaacacatggatcatcagctccatcttctggtcatcaatggctgcaattagctagccaatttggcacagtacagtgcactagcatcttgcttttttttttctctctctctctctctcagagaaacctttatgcacgcggtgaagaagtagtgggcccacatacagtgacaggtatcgggcttgttcactttgctactattatcaaccttaccaagttttggcattgtcaaattttggtaaggttgtcaaaattttgataagattgccaaattttggcaagatttcatatgtacttactaaaatttagcaataaactaaatgtagctagtttttttaaaaaaattgctaaataaaataagattgaaaatggtagcaaaatgaacaatcccatcgtaccttcaatccagcaatctcaaacaaccccggcaactttgccaagaggattatcacaattccagggaattgaggacaaaaagaaagtgagaaaacctcggccccgacaagattctatcagggcagtggacagtaagaatgcacttgatgaaccttttcttcctcttctgatcaagccttttcttctttttctcttctgatccgaaatgtaaagatgtccttttgtaaaatcgttgcaatccttttgtaaagtcattgcaatctgtcgtttctggctcacatatcagtgacattagacaagtactactacttttaaagatacggtgtcaagtagtagtaacgacaatagagtatatatggagattgcaataagccaaatagcatgatcccattatcaggctag

SEQ ID NO: 9484 - DNA, 9039 bp, Oryza sativa
tctacatcagtatgatcagagtcaagagtgttacactgcccctaaacaatggaaacaaaagaagcagaagaatggaatgaaatggaaaacctgaccaactaactaatcaagaattacataagtataactgatgggagaaatgagcagattggatgctcgtctcttctttgaagtctgaacccgttgatttggagcttcttttcagctttatttctgtgagggaatccagttataaacatttgagatgtcaactagcctgtacctgaagtaaattctcggtatgaaggaagaactctggtcagctgtacaaaaagtgctcgcgtcgactatggcagacgctgcaggaaccaatattcatcggttgggctgcaactttcagaaagcactatcacaaaatatctcttaatccctcccttgaaccaaggcattcttggggattagcatagaaatagtcctcttccttgggccggccagggatgacctttctttctgtcggctgacccatgcgatgctggtgtgccttcttcacagcagcagagaattcattccaggacattgcacctccttggaaactatccaaaagttcaacaagtttcaccctgtccaataggatggtcttgcggaagcccgtgtatctaaaatggatgaacaaaaagggctcctcagcatacagaacattgagttaagggcctcatcgtttgccctatggcttataagccaaagccaaaatttgaattttaaaacttgaatttgaatttgattctttttcaacatagttttttttcaactttggcttttcaatcactaagaacatatatacaaaagttttactcacatatcattttttaatcgctaataagacgttatggcttataatatgactagaccaaccgatggggacctaagtagttttaaagtcactgatttttttttcttttttgtagttatttgtaagaattcagaatgcacaggagcccaagcagttctttactaatgtcaaaaacaaaccatgagtgaactctagttggattagattccggagaagcaaacctgcgatggccttcaacaacccttgccatatttccatcataactggggatgaaaacatcgcttgctattgaaaccatgtagtccagtgctgccatctgggttgagtggttctggaatggctgcaattcctcaggagataaaagtttctccttccgtacctaacataagatcaaagtgagctactataaagcatccatgataaatctaaaggggacaccttaaatgggagaacctgctcaccaatctaggatatgcagccttcaaagctgccaaccgcctttcacctccatagatttcaccagaggctatataaatcagtgtatcctttttaaatcctagagctttaagcaccagagtaatttcctcgggtgtaaggggacaaagtccctgaaacctcttaacctcagagtctatctccttttctttccaccatggatatgcatatctacagttcaaagacgattcgttcatatctattaaagtagcaaatcagtacagcaagtcagcgttaactagtaatgcaaatcattacagacaaacctcattctagtgagctcttcggtttcttcatcagaacaaccgtgtgtgcagcccgaaaaggaaagcatatccatttcatatcgtaagtgtagaacaacaaattgcccacttttttgaagggtggagataagttttcgtccaagggcctcaatctgtggggtgaatctcaaagcctcaaagttgacacggcaacgcagcctttggagcttgacaggaagaccgttgtttgcaaggcgggcatctgttttattgaaatggatcactttgtgcttccttgcaagacgtaatacctgcatagggaatctgtcagatgacagtttttttaagtgctgttaaacacagccagaacaaacaaacttttattacccgctttagatagtatgtctcgttggaccagctcacaggtggcattgagtaaagtcttctcttagtttttaacttgagtttcataggaagttccttaacaatcatcagctcatctcttaacgaattaatgaagtgactgacgtcaaagatatctccaaattcactgaaaaaaaattaaaagatacttttgaaatagaaacacaacagaaattactgtggttcggctacattttcacttgcaaaaatcatagttcattctcaaatatggagatgaatgctgtttacaatagcaagggatgataactcatgttcacaacagcaaactaggataaaattgttcatcaaacagacatgctgttgatattacagaaatgaaggttatgtgggaaattataccttgagtcagcccaaaaagacctcttatccagttcaggcaccactaatgttagattcaaatagcgagctatggtcaccatatcacatatctgtaaaacaacattataagaaatttatattcgaatttaaaatgagtggatgagctagctcaagctacaatagctaaggtacaaaccccagctcgcatttgattgagtcctccattgcaagtcaccagtaaatagccattgctcttataaattcctgcaaaaagcaacaagatgccaatcagctctagtaccaacaaaaggactgagacaacaagatatgtgaattgtcttctagttatgtgtttctacaatgaagctgctagcaagctacaagcaaaaaaatcaatttggcaataataaaggagtagaagtttgcatcaatcggagcttgtttgacacatcgttgttgaaaagcttacatcatgaatttatgattcccacttcttttctttttatttgacagaaaacagtaggagaggctcctactgcgctatattactatatgattcccatttctcatggaacacacacgtctaataataaatatataataatcccttttaacttcaaagcaaataagttcatttaccaattcacatcacctattccagagcccatttcatgcccaaagcgctgggctatatgggagttttctataagtaaattaaattaaataaacaactactaattatagcatacgagcaacagaggttgaagatatgaacccacatttgggtcgaggttctgagaagaatctcattcgagctaccaaaggatgacctccgctaaataatccatgatatatcccaacaaatcatcgcaaatttagaaagttctcgcccaattcaaccccccgagatccccaaaatggcacaaaacctggtcaaaaccgccaattcgagcccgagatcgaaccgaaccagcacgaaacgcgcctcctttgaccaccaagcaaccgcatttgactcgccccaaccgcccgaatcagagaagccacgacctcccctctcccacacagatcgcgcaagctcgagtactactcctatttgctaggagcgcgaggggaggagaagcagagaggagcacgaagaggaggaggaggggcactcactcctgggcacgagcgccggcggcgacagcctcgccgcgacgcggtcctcgccggcgagcgcggcgagccccgtggcggcgccgcccccgccgccgcagtcggcgagcacccgcggcctccacagcccggcgatcgacgccagctgcaccaccgccgtccacaccacggcgctcgccgccgccctcatcgcccacctccacgcccgcctccgccgcccgccgtgccccgccgccaccaccatctccaccacctacccaccaacgaagctccccctccgcctcgccactagccgccgcagcagcgactcagcgagattaactagcctcctctttcgattagtttagtgggaaatccgccatgaaaaggattggagaaatggagggaggaggaggagagatggaggagaggtaggcacgacgttagcatttggagaggaggtgggtagtaagtaatagtagcccttaaacacgccggattaaaattaattaggtgattaaactaatccaattagtctctaatgacaggtagcactagctgactagcccccggtttgcagtgcgcacaatttgacagtttttatcattttgtcagtgtctcgtattagaaacgggcttaaaaaccgtagttgttttcatcattggcgtgtcgggtattaggaacggattagaaacgtatttagtggcttgattaaggtagctttctgagccatggctgatgatgcatcatgtgagctgagactgagttcgaaacggaagttggggtgagctattccatcgtgttttccgtgagcacaagcttcttgattagtattttttaaaaaaaaaatattttcgaatttataatagctaaaacttaattaattattctatccgtcccaaaataactcaatctagaagattagaaaattatacggcttcttctaaaataacgaatgtacatagatttgtccatcctaatataagacacatattattttaggttgaattattttgggaataaagagtacgtactaataactcatcttttttattaaaaagtaactcaatcccaacctctcttttaaactcagaagcttgagaatgaaagaacagttgcgtgatagaataacggtattgtatcgtactttcgttgcttttgcttggttctgaatcttcttccctctgattattttttttctttgtttctcccagttttcagtgatgaagaagctgcatctgcaagtcagtgtcgtggctgatctcgtcgttttaacactaaccgacggcgatctgcaggtttagtctagactctagagggacgtgccatctctcgagagcgtgtgtgtgatgaaatgttgctttttggatcttgctggcttgatttgggccttaatctaatgaaaaatcatcggtttcttctctgatcgtttaatttcaggataagataatgtgtggtttttgtagctgatgataagttgcaagggcggcgtggtgtggtagcgacggataatgaggcaaaccgatgatggacacggacagccctgctcgtgaccgacgtgaaggatttgattatacgtatcatcagagagacaagtagcaactggtcagatgttcttttcaccggaaattttgtagtggactccacaacagtgtcgtgcacatccatctgatcgacattgatcgagttgttctctgcgagttatgtacgcagatttgatttcattccattgaaaataagcagcttctttgacttcagaacacgcagaggtaaacagtacaaagaaaataatcaagaggggtatcaatgtcaagaaagcaacgtaccatgaatacatggatggacacgttcatgtattgacaattttgagatgaagcagtatcacacaacatgcagatctgagacttgctatatggccttgcagaagtagaactacaatataagctcagatttgtatttcattcttgagcttttatgtcatatatatatatcagtgaaaagttgtgttcatcgaaaggaaagaaaactaaaatcaactagctgcaatttcgacggggggacaaatgcttcagaatgagggtggaagtaggttgcgatcgaacacccagctctccttattccggctacctagaactttgccggcgagaggacggcatttatatacaatggactgagcacaacctttatatatacaagttatcaaggtgatatgatttcgtcacgcagttcagggggccgaggtcctcaggggggtgaggtcagccttgataaaccggaaatattccttctgcagcatctgcccgccattaacctggtcaaagctgcacctgtagaagctgaaaaagccaaggttcgactcaattagttggcgaaaatttcaaccaaatgcagcaggaaaatgcagagatagctatctgctataggaaaatatctaataaatcaaataaattagctaagaacaactttttatactgtactatcctgcaccacgtattgtcctctttctacgagtatatttgtttgcttatgaatttctaagtatgtggtattatgaagttaatacgtcatgtacagtatacttgtgcaatgactgagaacagcaaaggttgactgtacagctgcttagcctgctatagcatgcactggggatgtatattccattcatgtgttacgttgctgatataaaattcagtgtagaggcaagtacctgccatccaggccaaccatcatgacagtgttttgagcaccaaacgctactatgtaacgtgtgacttctggtaaatggaactgagcaaatgaccactctgaactgaaatacttcggcagaatccctagagaaatttagcacggttagtaacttaattcttcaagaaatgaacacaaatttttcaacatatatacagatagagaaaacaatagcctgaacaatcaacatattgagaaactaatgcagtacaagttttaaagagaacaatagagagttgataaataacacgtgttcttgctgtcatgctgagctgctgactacgtagctttgtacagtaattctttgcagcagtgttgcaaaagtccgaaaatgggtatcgaacagacaatgtaccgtcaaggcatcaagcaaatagtcataatatggttgattattcagaattctacggatatttaacgttcatataaattaatatatactccctccgtcccaaaataagtgcagttttaacactattcatgctcaacgtttgaccgttcatcttatttgaaaaacaattatgattagtatttttattgttattagatgataatacatgaatagtactttatgtgtgactaatatttttaattttttttcataaaattttcaaataagacagacggttaaaacgttggacacggatatctatggctgcacttattttgggacggaggtagtatttgctagttgtttgttattggagatatttaaatacattttcttgtactagccatttgtactgtaacaaatcaaatagggaaatatcatcaataatctgtaactaatgatgatactcagtaacaagatatgggtcatacatacacaatgttttcaaccttcttgttgactatgaaatgcataaactattttttgctgcacatcatgctatgatcgtacattggaatactagaaacaaagtggaaagcagcaccataataattatgctgcaaaacaagtggaagctagccaaggaagcaacgtgtctgctaacttgccctaacttagaattaattgggccagctgcaagctacaggcccatacacactagagaagattacttgtcttaatgcgttgattgagcggattaataagacgattaaccattaattgaccaattaattggtccagttggccactttggcgttcactgagcaaaatcctgcactgaattacaagtacatgacgctttccttttcacacatgaataaatggccaattatacaggcgtatcagctgacttttaccacactgcttcacggtaataacttgcctgattttatctggtcatgcattccttaaacatttcacaccatttttattttttttaagaaatcgtcaattaagttattaagttaaaaaagtttacattttcagatgcctttccagcaaaagctaacttgaagattcatcacatcatttcatcaatcatcagaagcgcaaaactttaaaaaaaaagatatggaaaaacagtcaacgtgatatgcagaacagcttcttgaactgacaaggctaatccgtacaggagttgaaaaattacgattcaatctattccagaagttccatgtcctgagcagttactatgaacggtgaaaacagagagatatactaacctttcatgaatgacaatgatgagctagcattggatccagtgttcgtttgaataagaggatctatagaactagaagagttctggtgatccatccgtggaccttcaagactgcgctgttcattactagcatcttcccctgcaactctcactcttaaactgaaaatatgaacagttcctttgtcactggacactgccaaccactgcacattgggtgatagcgcaatgctgtatatgtctgctttgtcaagccctctgcgcacctacaagttattcagattgatcattaaagattcatgccaattgtccacgattacatataccagaaacacttctaaggcaacaactcaggaagcaatggaatagagaagacacccttctgtttgtctacgaaagaaaaaaagaaagaacatgttgttcacctcttgcaggcgagtaccatccattgtgttgaatattcttatcaaagtacccttcatgcttgctgttgccagcaggaggccatccattgtcaatgccatgcaagaaatgtgagaatcatgagctgaaatcatccttgtcaccttcaacccaaaatgctcaacccggacatgcccttgatgcaccccagggcaggccaacactgaagtgttggaatgatgagagaggcagcacaatccttttggattggactgggtctcaatctgatggagcaacttcaaatctgtgaagttataaacgtatatcttgcgctcaagaacaatgacaatgtagtccttccccaattttacagcccggacatcagagcggaaggcaaactctccaatacaatggctccggtgatcatcccagatcattaccttgttcggtggataatgtgcgttggagccaccacctacaagagcaaggatgttgcaacggaacagcatttcaacaatcccaaatccaccactcttcagatccctcctgaaagtctccttaaaagggtcacaattaaagatcctgaagccattgctggttccagcagcgaagcaaccaaagtcctgattccaagaaacagacaacagcctgatatcctggtcatcgctgctaccagcttcagcctggcctgtaggacctgacatttgccatgtgtgaggggactcaaatgtcccaagcttgcttggggagggcaaaccccgtgatgtggagacttgtgagctcatgtgaggggtggacaagccagatcaatcaattg

SEQ ID NO: 9485 - DNA, 8353 bp, Oryza sativa
aatcagatggttcagctcccttgcacgctcagtttcaacctaatggtttttacttattggcagtttggtagcagagaagtatactctatgatagtattagaagatagcatcatctttggcaggtccagtagtataatgtgacaacgattcctcgatggttcattgtcattgtgcgtgtataatattgtggaatccaatgtgtgttttgtcagtgcaagtttcgcggataaatggatgatggtagaattttgccagtcattttctgccggtgtcaaaaaattctcttgaatgtgaagtgtggaagaatgtcttctctgctagtctgtcctctcttcattagatatgatttgccttagggcaaaagtctgtaactcaatgcttgtactattaaacctctttaatcttaatggaagatacaggtgggaatctctcccctccggtgattatttcaaaagaaaaaaaaaatctcttgttgtttccaaaacttagggagaaacaacgggcatgatgaattcgtaaatataagggcgaaaggatggtgagttttcggtttggtttagagaatttgaaaaaaaaaatcagaagggcatcgaatttgcatttaatctcatggtgaaattcaaaatttttgctggaaaaaaagacagcttatatatagggcccaaccgggttcgaaccggtgacctattgatctgcagtcaattgctctaccactgagctatggacccattttgacatcgaagatctttataaattcttacattgagcgtactccaaaataacttcgcaaagtagctgaaccaaaacaaaacatttcgatgtctctcctctctcgaccatgataaattcaaatgcaaccaattacacaattcgaaatttaagaaacacgaatcaaagatcctgaaccattacacccgagtacccgatggccggaaaagcagatcgcattgtataattgtattagcacacttgattattttgcaccattggcgacggcaggagaaggcagcaagaacttgagcaggatatcgttgaacatcttgggatcctcctggtgcgccaggtgccccgtgttcggtattatcttcaccgtcgccttctccccaagcatccttcaaattcaaattcaaatttaatttcattcgattaattgttaaggcaaataggaaactgacgaaatgatcatatggtaattaagatcaaggcttactctttcactttgtgtgctttctccacagggaaaatctggtcgaactccccccagatgatcaaaatttcctgcaaattcagattacgatcattacatctgaatgttcagtcaatgcagtgtgttatcagttggtgttttcttcttctctgaactgaaaattttacgcacttgagggagaggagaattaagctgcgagtcttgttcctcggtgacgatctctttgatcagccggatcttctcctctcttttgtccgcgaaatatttctgcaccacacgcagtttgcaaatttgcaaatcaaaatttaacgaaaaagttatctctcgtttcttaatttctatctgcatccaatcttctcggtgatatcatacagttgaaacacaatttctgcaaatccgatcgaattgaaagagtcagggcatgaatgcaagatgctgacgtcacgctcacgccatggagacgagtcctaacctttttcgtgtgtaaatgcaactatttatatttggcgggaaaagtgcgatatgccggtgggtgatatgatttgccaccaaatttgtcggtagaaaagattttaattggacgatgtttgtatgattagtcatctactactagtctactagcttttgggacaactcgccaacaaatccaaaaattcctagcttagctaagagtccactacactatcatggcatccactgcagaatacgtaatgagaacggtttaatcattcggtggacgtctacccattcaactaaataattatgaaaaaaattaaaaagaatgataagatagatacaccactctcaaatttaaattcaacttctataaattataatagaaaataataaatttgttattaagttgtagttatatacagaaaacaaatataaaccttcatgcctgtgagatgatatatctcatattaatttatctcattatcttttaaaatttttataaatatatttagtcgacatgcaatgaacgggtgaacattcacccgggttattaaaagagttttcgtatacgtatacggtgaggtacgtatacgtatgtatgtacgtaggtacccggaggaggtcgcggacgaggaagtcggggatgtacttgggcgggcggtggacgcagagcgccatcagccgccggaacgccttcccgtccgccggcgccatcagctccgtcacctccgccacgccgcccttcgccgccagcgccgcgtcgtcctccgcccccttcgccaggtcggcgtcgcacagcaccaccttccccacctccacctggccgtcgccggccgacgtcgacagcgcccgcgccaggtgccgcgccaccagcccgccgtagctggtgcccacgatgtgcagttcccggcgttcgccgccgaggcctgggaggtgcgcgccgccgctggtgaggagcgcggcgatggcggctgcctggaacgcgtcggagcgcggcgcggcgctggtggtggaggcgccgaagaagaggagggtcgggaccaccaggtcgaagtggcgggagagcgggcccacctgcgcgccccactgccacgtcgggtccggcccgaagccatggacgagcaccaccaccggccgccgccccgccgccgcggcggcggcggcggcgccattcttggaagggaggatcaggagagaggagtgcgcccagaagtggagcgtcgtgccgtcgtcgtcgacgacggcggagcctggccggaggccggcggaggcgaacatccgccggaacatggcgctgatgagagacacggcgaaccccatggccgccgctctctctcgagagctctgagctgtgtctgtgactgaacgatcagtttggctccatgaatatcgaatcgtcgaaatggatttaaaattggatttataatcacctgctagctgtaaatgacttagtggagaataataaattcaaattctacacaatatttttctccccttttttctcaaaaggagtttgaaaattgcagtatattctctttgctggcttgctgcaaccacttcaaagaaaaggagagttcatgcattgctactactacaagtacggtgctctgataagctctcactacctaacaggccccacctgtcagagagcgagactgtctaacagtagtagttagagtgggtgctttagctagctagtgcgatgattagattagctagctaaagcttctagaaggttagtgagttgggccggtgaaagcggaagcccaccagaaatcagttagatttggatcttctggtgttaggcccggcccattatgtaggatggcccaattggagtggtgggttgggcccaaatgctgtcgtctctaggcccggaccaggaagctctgcaacagcttaatcgatcacccaaaaaaatgattcgaatcattttccagcatctccgttgatcaacagcatgttgaattaaagatgcttaaatatttacaaaagttaaggtactaatattagcggtagttgaaatgtggaattaattagccacgtagtcgcagtcaagtataattctgcagtaggtgtgatacactgatacagtgatacaacatgcgtaagcatgctgatcccagcagtacatatataaatccggattaactagctgatgacaattagtagacatattagtcacatttcacgcatgcacggatgtaaacagtagggttaattaagcacagttaattaagccactaagcagaatacatggcatgtagatacaacaaattaggtggtgtaattagcatatatatgcacctggggcatgcaggtctctgcaggttaagttcaattgttaatgaccacatgggcagctactttgatttaactagtgtcattctcagctgcacctgggcggctagctagatcaatcgatcaaatcgatcgatcttacgttggaccaaataaagctgtaaagcaaaacgatgatttggagattaattatttaattatatattggctaaaaagttactaaattttctgtagcatgttggtataattatcttgtgctgcatatgcatacatgccctttctgaagaatctatcagctacccatctatgcagtgttgtgtgatgcatgcacaccatgcatgcttgtcgattgcactagctagggggttaaattagcaaatgatcttaagatttgctaatccatggatgtgtgcgagttaattagtggcggaaaaagaattgtttcaatgtttcaaaggagtaattgtgtatgatgatgaagacaacactaattaatcaaatcaaggtgtagaggctgaattagaactctgaataatgaatttgacctcaattctacaggagaggaggattctgtatatcccaaaaatctagcaatttcatacatatttgaacaaatatataagtacagcagaattcaaccgaattacaaaatcaacttaatttgaacatcatcacttaggatggctggctaggtagcttctgattcaggctggctggctgcgagctgagctagtaatcaactagctaatcagtaatcacactcaagatgatcatcaattactcatcgagctctactcgtcgaataatctgcacggtacagctcgcaatcccacgcatcaacgtcgagcaatccggggacatcgacgagcaagtcgaggtcatcgagcgcgaggaggtggaccatgtcgccgtcgccgtcgacgtcgccgccggagaagcagtagtcacgggaggagtcctcgccgccgccgttgccgccgcaggcgctcacctcgctgatatccgatgaaccggcgttcggcggcgactgtgtggtggcggtggcgccgccgctgccgcctccgtcgagcagttggcaggagaacatcgggagccgcgccgggataggaggaggaggaggagatgccgcctccggcgccgccgccacggtggccgcattggccgtcggttctttctccatgaccgtggccggcgccggctcgcctttagctccggcggcggcggactgacgcttcctgatgcgggaattccagtagttcttgatctcgttgtccgtcctgcccggcatcttcgccgcgatcaccgaccacctgcagcccacacatatcatccatgatcaaatcaacactgataactaaatcgaaagttcagctagagaatcggattaaccatgaaaatgaacacggatttcggtactgaaactgaagagaacttttacttttacggtacactatactgcaaatatatactagcagtatatacaatctaacggtgtaaaagtcctccaactgaattgctacctgttgccgaggagtttctgcagggagaggatggtctccgcctctcgatcggagatgggctccttcttcaggtcaggcctcaggtagttcatccacctcagcctgcagctcttgccactccgcctcaatcctgcacaatggaaggaatgcaatgccaaccttgtcagatcaagaaaccaaatcacctgtctagcaatcagctgcagagaaatcaatcaaattacaagctagacagactatcgaagcatgattaattaagttaggtgtcaaatgaattcttgcctgcgagctgagcgactgagctccaggtggagacgccgcggtgggtgatgtgggtgtagagccgctcgtcctcctccggcgaccacagccccttcctctccttctcctccgccgcgccgccggcggcggcggcggcggccgcctcgccgtttctactactcgtcggcttccgcaccattcttgagcttagctagctagtactactcctgctgatgtctactgtgtgatggagaattcagagagaaagattagcagctggagcttacttagtatgtgatgattggatctgctgaagaatagactgcttacttaagtgagcctatgcacacacacatatatatagtagatgcatatatgtgtataaataatataattaattaattgtatatacaaatatatgtgtagctataggctactgcacattgccctacctgtaggagaagctagggaaggggggcaggagtatctgtacttgcatgcatgtatgaacagacaaaacaaatcctgtgttggcattgtgttaacctgatagtcttattatattctatgtgtttgtacccaagtatggtcaaggtatcccatgaatttgttgtactcctacattaatacatatggaccatgtgtgtgtagttctaggtatatgtattgtgatgatattctgaacatatccatcatgaacaccctgtgcatgagcaagactgcacgcaagtactagtacttggcttgtgtaaaggcattctaggtctttgagctagcatgtgataaattgtttgtatctgatcgagtatttcttttatcatgtatatatagatatgtacacatgcgattagctgctctgaattctgaatataggacttatactgtgtgcatgtgtaggcaggacaagattgtggtggctccaattagcctaatttggtactaaacctctcattaagtacttgttcttgcaagatgattggtcaaggtatcgctgaatccaacatcgcaactgctcatctctactgttacggcgccattactaccaaattacaacttggtatacagcatctagatgcatgcatgcttggcattaattgattagctgcagggatggccctcgaaaacataattaattaaggtgacactgaaaatagcttaagatcgagagggcacatggttttagtttctgaaaaggacgggatatattattttagaaaaaagattagacaaatttcaattattttagtgtactaatccaatagcatggcaattaagagattttaatatttctgcatgccaatttttttaatggaacatgcaagtcatcagcatcgatttatgctttatctctttgtttttgtgtgcatagtgcaggaaattatgcagccatgagccatctatctggtgcaggcttgcaggacatgatacacagcttggtaggagatcacatcaaggacggcaagggtgtggatgagtggatcccctgtagttgccttcaaatccaccaggtggatttacttaatccaagccgtccctttaatttgatggattagattaaaccaatcccttctcccatggttactactagcctattttctttcaaaagaaatataatgtagagtctataaaaaatataaaaaaacattatctagtatatagtagagaacatgttaccttcaaactttctgataataattagataagaacaaacaaaacaaaaacattgcaccagtagaagcttcatgttctgtcaattattaggatgaatgagtttgatacaggtctcaataccgttaatttcataacaactcaattaaaaggtttaaagataattattttttacaccatgatgctcttctgagactattgatctgaatggacggattacgaaaaaaatagattgaattgtttctgttataaatgtgtaattggaaagaggtgatatggctacatctagcccgtagaaacaaagtaaggggtcagattggaccaaattcaccggttggagttggaagccaattaactccacggggatctgcacccgtaaagtcatgtactatatagcttacagagttggtagtttttatctagtaagttcaatgcaaacaacaatgaatgattagaagaagtacaactccatcccatataattaagtaaactaaatggtctatctaactacagtgcgttattgaatttgtgcaactaaccaccccgaaaggactcttgactatacataggtaccctcctagtcaaaaaatatgagaaattatccaatggatgatcatatagatacagaccctatagtaccaaaagaccacactagctggccatctgtttgtcagctactacccctgatcaaaatgctgtcaattttaaggtcacaaatgggctggacagttggatatattagctaggacccaactattcccatctactgtaagttggtgatccctgtaggaagagacagaaagcatacaccctgagagccaaaattctttggcacattcagaagatgaggttcatgcataggccggccatcatgtctaattaagctaggtcaataacctacttcatcagcactactagaatttccaccatgcaagtcttg

SEQ ID NO: 9486 - DNA, 10142 bp, Oryza sativa
cattgaatcaggccattgaaaatctgaaatccaaactggagagcattgctaaggagaaatcgttgcttaaatcatggtttgctgacctagagcaagtcgtggagcgaggaaggagaattttccccgaatagccggaattccgtcagaaaaaatcatagcttgcatttagcgaattagaacttttttttcttcttctaatacaccatgatacacacttgagaagtcctaccatgcatcagcattgtacttttcctgtctgattcttttccttgctgaggcgatgcatggtggtgatgtgctgattgcctgcgagtcttttgcgcggaacgtatttccctcggcaataaaatggttctaaatccatgtaacttgtatatgagcaagcaaaagcgatcatggttgtttgaatagtgctttagcacagacaaaagtagaagtataaagtcttatactattattttttattcagttacatgtcagcttataagccgtagaagccaataccctgttctgtttagctcatcagctgattaactgataaattaatacatggattaattaaatatgatatattataaggatttttttaaagtacccttgagcggatgtgagccatccgttagaatggattggatgggtgagatctaattatactacaccttgatagcaggtgtagtatgcgtagtaaaagggcaattaagaaaaaaagaaacatggcattgttgtagatttgtagttggcgcgaggttagtctgtaatctattagttttcatttttcagatgagatgatccaatcattagtttatcacagttttagacttttagtgcacacataaatatcgtacagtcaagtaatgatgctgctgtatatggagattgcatccaactcagactaattttgtaattgctgtcagtggatttataatttacaaatcactgaactagtggactgtagttctgttctgatgaaaaatccataatcttaacaagtagagtaacaatattaatccactcaacagaaaatgtatatagaaatatatcattttaattttaactaaagagaagaatgtaatagtaatatagaagtacatatcagtgaacagatgcatatcaggctatcagcatatgctagtgaagtacatagatacaaatccaaacttgtcaattgtcggttatccatttgggaggtacagattcatccagtagatttgccgattcacgcgagctgcgaggcggaacgacgagaagcaggacgtcgggcgcgagatggggcggcacggcggcgggcggcggctgcctagcgtagagtctcaggagaggaagggcgcagaacgcgacttgggcggatcgaacctggcctgtgttgacctcgcgggagcaccgaaataggctaaaatgccctttcccgttaatgttataaaagtctaaactacccattacaatcaatggttagatttgatttttactacactactaccttctctagtgggggcaccgtaaaaggaccatattataaagttaaataaaatatcatccgcactgtgtttttttaaaaaatagctgataaaaagtttttgaatttttgtttgaaagtatgacatgaatgatcatgcattaatcaaccaaaaggaaatgaaaacagacaaaaacaatatcatttctacataagtggttatggattggtcatgaatttcttatatttgacaatttaattatttactaaccacttgcaccgataaaaatggaaaaaaatgactaaaatcaagagtagttgaaaatgaaaatacttttttttacgaaaatgatactcgatcatttgggaatttttgtagcctaagagggaatataaccccttaggagggtcttctagtataacgaatctacataaatgtagattcgttgtattggatgtgttatattatttctactgcttcgtagcaatattgtcgtacactcaactcaagtgatgtattttccatctgtcaaaacgctgagcagcccagcgtggatacggaacgctaggtaagcaagcgctccctgcgtctgcgtgcgccgaacgaaagtcggaaagaggaaaaaaacgctaaccacgactccgtctcttcccccaaacaaaaaccaggtgaaaaaaagaaagccgcgttccccactcgccgccgcgccaccccgcgacgccgctgccgccgcggattccttcggcgccgccaccgccgcggtaaggtaagccccgccgcactcccgttcctctcctcccctcccgaagcctccgtcaccgctcgcggtcgcggagataagatccatttggatgaacagttcatctacctttgttccaccagttcagtataggtgatgcccccccgcgccgccagtgagcatcgagaggaaattttagctaagctgtttgtcactcgcatggtgtagcttgcgttggtcactatattaccctttttttttcattgcgaatggtgtggagtgggtttaaaactaggtttgagcatttgagaattgacatgttgcagttcctaggatactacttgtaagagcatttcttgggttttctctggttggtatggtacctcagttgagtggataacttgggttgattttgttatctaagtgcttcgtattcgtttaacaagaacttgttcgtatgctcctcatacatcatggactcattgttcatgctatagattactgaaactggatttgaggctttgagctgatcttgaattggggtgcattcatgtttggctgcagagatggacagatttgtgcgagtttacagtggcggggagctggtgaagggtccaaacggggtggagtttggcaacctcgccgaggagggtttatggttcaaggcgaagcctgcattcgatgaactgattgatgccgtgtacaagaagctcgggtgggtgcctacgatgctcagcattcgtgcgcagggaaggttgaacgttggtggtggtgctcatcggcacttcatcatggtgcctatcgatgatgacatgtcatggagtagctatgtgaaagctgttttcaatgggactgagtggaactgcctagagatttttgttcaagcaagaatttgttccttgacagagggcatatcctcagagagagcactaatggctatcaaaccgctttatgcacaacgtcaaaatggccaaccgcagaatccagaacaggacatgtcgtttgttatcccttcaacggtgaatgttagtccactaaatggacatcctcagaacacacggcaacgaaaaccaagaaagagcaccaggaccttctctgatgatggttgtccagatcagaatggagcttcagaagcagttgataccacttcctatgatttaattgggcagtatgatgctgatcatcgggctcgtgctttagcatcaggccaggtagatcaaagagtacctatagcatttatattacaatcttttgtcgtgtaacaaactgttgatttgcaatttccaatgtttggtacagcatttgactgagctcaaccctcgtacccgtgaacctcttcgctttgacaggaggtatgagcgttaccttaggcccgctggcctgatgggactggcaaacatttgtagggctggtctgccctccattgatcgggcactcgtctctgcactagttgataggtggagacctgaaactcacacttttcacatgccttgtggtgagatcacaatcacactacaggatgttgcaatgattcttggattgccaatcgctggccatgctgtcactgtaaacccaacagagccccagaatgaattggttgagcgataccttgggaaggctcctccgccggataggccacgtcctggattgagggtttcatgggtcagagctgagttcaacaattgtccagaagatgctgacgaggagaccatcaagcagcatgccagggcatacatccttagcctgattagtggtctgctgtttcctgatgcctctggtgatttgtataccttctatccctttccactgattgctgatcttgagaatattggttcatacagttggggttccgctactctggcatatctctacagggcaatgtgtgatgcttgcaggaggcagtcagatggaagtaatctgactggttgtcttttgctccttcaattttggtcatgggagcattttccaattggcaggccagacctggtgaagctaaaatacccaaatgtggaggagctagaggatgagagggatagacccacagttggtttacgatgggttgtgggggtgtgcgcccgtcgagcagctcccgcacgttgctatgagcacttcacgaatgagtttgacttgctaacggatgaccaggttgtttggtgcccatatagggaggaacggatgaaggaactacagctagcccctatttgtacccaggattctcatttgtggctaacccgagcacctctactttacttctttatggtggagatctacatgcctgagagagtgatgcgccaatttggcctccatcaggtgtgcccacctccattgcgggacactagtgcggagcttcactggtatcttcaaaacagaactttgctgtttttattcttattatttcttgtacatgactgtgtgtcctggtaaattatagaatcatctacaggtagccgaatcataaaattttctaatgttttgcaggtgccgtcgtggaagggttcataatgactgggcacagaagcacaagtcttttgtggatatgtgggaagcaaaggagcaagatgttgtcatggaagaccggccatatgaccacagcagttatatggattatttgcggtggtacagaagatcaacacgtattcgcctgtgcacaccgaagaggataagtaatggtcacaagggtggggcatctggtgggagtgcaatttctgattctgaagatccttttcgtgcttctcagcttcgttacacccccagggctcatttgatccactcagtggtaagacatcctacttgtaaaataaatcatgctactaccatgcaggtgtgatcgtgtgagcttcattcaggttaccttcttttgatatttactagccaaatacccatgcgttgcattgatctagaacaagtatatcataaattctgaacttcaaaagctgcatataattttcaattgaacatgaatcactaaataattctattgcaaaccgcatgcacggattacataattattttgtgaagatttttcaactaacaagaacacgtatgcatgtatctatggtgatgatggttggatgatagactcgccaccaccagcaggatactttgatatatctctgaaattcccatcgtttgccccagaccgacaaactcactgtccttgcgaaggaggcagcttctcaaaaaagttgctctagaggcaaatgccgtgcttttgttgaccaagtcaccagaacatgtgtagaagttattggggaacttggtggatcatcactttgcgacattgtggatctggttccatgctcatcgactgctgcaacaactgcagctgaaccagaggcagagcaacagagggataaagaggaagatatacatcattccatggcgcctgatcaggaaactgagtctggcctcggttctgagaagcgatctcgatcacggactcgccgcacacaggcagacaggacagttcaaacaagatcaaccggaaagaggaagaggggcagatcaggttcgagatgagaattgcacggtgagttatttagcttggtttttctgctctttctggataatcactctacatttcctttagttttatcgtgtccatgctgcttgtttctttcatggttaagccattttaaatttctcatggactgttatctgcttgttctgcttgaaattacagccccgcggtttatgtaccataagaagctgtgggatgaaggaacggcatggtgctcaaaccagcttatcatttcatgaccctccacagttgaagacgaacaccattgaagacaaatttgttcttctagacagttgtaggatgacattaggaaatttatgcttgcatgctatacagtaattatttcagccattttgctgtcgatggtaatgcaaagccactcccagacatggtcaaattctgaactatggtcactcccagacatgggtgatgtttgttcctggtgtaaatgagctttgttcagatggcatttgagctttgttcagcgagcagcctttggtttaatatacacgattcagcatttcagctaaggtgattgtcagttttagctgaatcatcatgtatggttaaaactatcatcattcattcattcctgatccattcagttaccaatggagagcaggagtggaaacggagttttgttctgttattctgtcagtgaaagcattgaactaccagttgcgtcaggaaatgtattcagagtttcaaacaaaccttagctttaggtaaaccgaagactactcataagtcataatcggtctaaatttaggagtaaagtttatgcatcataaacgaattgaactgcccataatcatttataaatttaaacttcttgaagtgtccacaaattaattctgaaccatctgtgtttgttcttcttttgcatgagacgctctgatgcctaaaagtctaaaacccctccttgacaaggtcagtgtccacgtccctcgccgccgccacgctctctcgtctgcctgaacacgctcgccggcgatgtcccgcccgcccccctccgccgcccgcgtggccctctacctccgccgcgcccgcctcatcgactcgctccgcctccgcctccgctccccttcctccccgccgccgccaccgccacccgacgaccccgtcgtcgcgctccacgccatccgcgccgccccgacgccggcgtcggcgatctccgtcttccgcgccctcccgccgccccagccgctcccactcttccaggccctcgcgtcccgcctcgccgccttcgccgcgctccccgacctccgctcccacctcgcctcattcctcttgcccccgccgcctctcgcgcgcctccgcctcctcgccgccgcgggcgaccacgcctccgcgctcgacgccttcgcctccgtcccggccaagccgcaccgccccgccgaggcgcacaacctcctcatggggctccacgtccgcgcggccgaccatgccgccgccgtgggggccttccgcgccatggtccgcgagggcgcgctcccgaacgcccgcacctacaccgtcgtcatcgagcacctcgcctccgcggggttcgtggaccaggcggtcgaggtgttccgcctcctcccgtcgctgcgcgcgcggcggaccacccggcagtacaacgtgctcgccgaggcgctcgcgtcggcggggaagttcgaccagctccggtggctcgtccgcgagatggtcgccgtcgacggcgtcatgcccggtccgcaaatgcgcgccgccatcgccgccatgagggaagcgggacacgcggagggcacggaggatttcgtcgaggagctttcacccaacgaaagaatcggttacgccgtggacgacgtcgacggcgagggagatagcgacgacgaggaggaggagggcgacgacgacgatggcgtggacggtcgtgacaagggcagaggcagagcgacactgaagccatggctggacccgcgcgagctcgcgagggcgctggaagggtgggagccgagggaggtggccgagctggaggccgccgggatcgtgtggacgccgcggctggtgtgcaagctgctgcgcgcgttcaagaaggcggagacggcgtgggagttcttctgctgggtggcgtgccgccccggcggctacgcgcacgaccggcacacggtggcgaggatggtcgccatcctcgcccgcgccggccacgtcgagctggtggaacgcctgctgggcaaggtgcgggccgacggcatcgtcctcccgttcgccaccgtgcggctggtcgtcgacttctacggcctctccaagaaggccgacgcggcgatcagggtgttccgggaagccgactccatctgcggcgccgtgtcgaggcccaacctggcgctcttgtgctcgtcgctgctgcggacgctggctaaatgccggagagcggcggacgccatggagctcctcgaggagatgatgtcgcgcggcgtcctccccgacctgcagacgttctccggcctgatggagcacctcgccggcgccggcgagctcaagggcgtgcaccggctgctcgggctggtgcggcagtgcgagctgcagcccgacgggtacatgtacagcgtgctgatcaaggtctactgcaagaaggagcgcgccgcgctcgcgctgaagctgttcgacgaaatgcgtggcgccggggtcgcccccgacgcgcccaccaaggcgctgctggtgaagagcctgtggagggaggggaagctccgggaggcggcgcaggtggaggagaggtgcgaggaggcggccggcgacggcctcccggaggcgtcgccggggcacgtgtggacggcgagcgccgccgacctgaagaaggtctccgacatctactacggctgcttcactcagcctgcagcacagacagtcagtactccatagatgattccctttggtatcaagatagcaaaatggccatgtcaatctgattgttcatgacaaacgggaattaaactgattttgattttgcgagaatccaaactgctttctacaaaattgttgcaaactgacaaagcagcagagtatcaggcaaatcggaggaatgtatggcctggtttagttccccagcttttttccctaaaaacgtcatattaaatctttgaacacatgtgtgaagcattaaatatagataaaaataaaaactaattacacagtttgtagagaaatcgtgagacgaaatcttttaagcctaattagtccattattagccataagtgctacagtaacccacatgtgctaatgacggcttaattaggctcaaaagattcgtctcacggttttcagtcgagttatgaaattagttttttcatttgtgtccgaaaatctcttccaatatcgagttaaacatccaacgtgatacccaaaagttttctttgcgcaaccaaattactataaacacaccctatatatggtagtataatataggcttcgcagatggatggtttggggcccagtacaggaggaggcccaaatactccacggcccagcagcccagcgtctcctcttctgtgatttgctcatttcgttccccaaacagggcgccccagtgtagcgcgtcaccgtcgtttggagaaaaaaaatttgcgaatccaatttcgaatttcaatttgcgcgtcgccgtcgtctccgcttctcctaatttcgaattccaatttccaagcaatccatcgcctccacctcctccaccgcctccgcctccgcctccaccgatcgaggccgccgtagcttctcgatccgcggggagctcgagctccagcacctcggcgggcggcggccaccggaattgccgcggaatccgcgcgcgtcgccagtcgccgcggcctccccgtcacctctaacccctcccgccgccgccgtccccttctccgcagcttcgggagccgccgcggcgctctctcatctcgtcggtgcgtggaccgcggcccgcggcttcacccacctcttcctgaaacttcacgcgcttacactcatcgtgcccatttcgcagccgcgaggttagattgctcgtcgtttgttcactatgctgcaatggatgggtggttcgcggaggaaggtgtatgccgtgagtaccccagatctccctccctccatctctctctgttgtgcttcctcgcaattagtttgggcttggtttccatcattttttactgaaacagtgaaacggttggcgtgtaaatcatcagagcaatcgctgcatttagcactatttgtcgtgacaaactaacattcggtcatgtttgggcgtctgtgttatgcatgtttgttcctgaattgggagcagtccaggaaatcaacgcagagcaggtaacttagtttcgatggcgccatcaagttatgttgttctgctagttaacatccttatgttgatagaacaatttgtgctactcttgaacaatgctccgtaggcagaggcagtactcttgagcaaaag

SEQ ID NO: 9487 - DNA, 11423 bp, Oryza sativa
tttgcttattggaatggatacgtcaagttgaacaagctgtcctgagcttgaatgatatacaacattatagtacttttatgattcaattattgtaagaccgtggttctaaagtgtgtgacaatactaggtaacgtaaaaagttagtacataaatagacgtgtttcctgtccaaattactcaacttcggtctgtgttttgcagccactactttgacaagctggcatctcctcgttacattttgctctcttcacgtggcattatgtatgaagctctttgagcacaaaccttttgatgcaaggactgtcatgggatttggtgtgctcaatggcatttcaattggtcttctcaacttgagtctaggtttcaattctgttggtttctaccaggtaggcattgtttttgctctgtcctgatcaaaacttaacaggctatcatctggtagtgttgtacttaatgtccttctaattgttggtacccctgctgctattttttcactcacaaacaacggcttaacaaagagggtttcagttaaacttattgcatgttgtgagatgcagttatcactccaccttgcacactaaccactgcaccaaggtcatgctaaaatgctgaatgctctttgttttcagatgacaaagctggcaattatcccctgcactgttatacttgagactcttttcttcaggaagaagtttaggtttgtatttaatacttcatgtcctttattcagtttgataattatgaagtttgtatttaatacgtcttgtcctttatgcagcttgagaaattatcttctgattttttttttatttttggctttactgtgcagtcggaatatccagctctcccttagtgttctcctttttggtgttggagttgcaactgtgactgacctgcagcttaatgctgtgggatctgtcctgtctttgctcgcaatcattacaacctgcattgctcaaatcgtatccttttgacagcaagtgatattttcgtttatgaaacgttatatgtttgccaaataatctgcacatcaccatctaaagaaaacagtccacatgtattgcacatgtagctggtttattactaggatagatgttatagtgtatatttattcatatatacttcttgtgcacaatgctgaaatcctgaagcaccatttcatttgagtatagtattgttctatggtgtctgatttgaatccttaattagctatcagatgacaaacacaattcagaagaaattcaaggtatcttcaacacagctgctgtaccaatcatgcccataccaagcattgaccttgttcatcgtcggccctttccttgatgggtttttgactaaccaaaatgtctttgcttttgattacacatctcaagttgtggtaagcagtaaactgagttttggagacttatgttgaacgtagctgtgcttcatctgactcggttctttacggtatctgcagtttttcattgtgctgtcatgcttgatatcagtctcagtgaacttcagcacttttcttgtgatcgggaaaacctctcctgtaacttaccaagtgcttggccatctcaagacatgcttggttcttgcctttggttatgttttgcttcacgatccatttagctggagaaatatacttggaatcctcattgctgtgattgggatggtatcgtactcatacttctgcacaaaagaggctccaccaaaacccactgaagcctccccacaactcaaccaggtacctagtttaatagttttgtcttgtgtcttaacactggatattcttgtcatgttttgagcagaaaacattctctatagttcgaatatcaaaatctgatgaatgttgtggattgtgatttaggtaaaagaaagcgaatcggaccccttgatctcggactctttgagcactgctgaaaatgggggcaacgcaggcgacgacgaggctctgaaggtacctatgtggagctccaagtactcaaaggcatgaagaaactgctctgatgatactagtgtatggttctatacagagttcagcttagtaggcagatagtactagggttggaaggaagccaaccctgagtgtaatgaacgatgtctgttccatttttggtcttttttttttctttttgcttaccatgtggtgctgtcagtaaatgaaatctcactttgaagaggaaattatttacctctacactccagatggcagattggccttaaagctagacacaaaagggctagatctctttgtaatatttttcatgtgttcaacttcagcatctgcttcagcattgtaacaacttgccagcaggacataatatcaacacgtagtttacattcttttttgtacccgagtgccaggtggattcaagtttgtggtgaaagatgatttattttgttaaactttaattatctctagtagcatgagatgaaaagaacagcgcgggccgcaacgtttcgcttcggcaaatttgcaaacgaaaaataatttgtgaataaaacttttatatacgtgttcttagcgatctaaaagcaaaggctgaaaaataaacttcgataaagaaaactccaaatcaattttaaatttaaggttgaaaattcaaattttaactgatacgcataagcataagcgaatagacaagaaattcaagaatcacatgcacttcaactagagaaattcttctctcttttcaattggatgttcatatccagaaatatgtgtcctgtgtatacatagttatctgaatgcaaaatatctctgagaaaagattgtgaaagttgttatgaacaaattttcagtatgaacaagtataatctctatctggttgcatcagtcagagtaggatatgttattgttcttactagtactcacatgaattaaaatagctatagataaaactatggtgctgaatttattccgaatacacacaaaatctaacatttctactcaaatcaaatagcaaaaccatcacaaatctaacattttattggctcaaacaaggagaaaaaaatccagctgcatcaaaatctagttcccatggtggaacagctggagcgccctcgccgccgtcatcccgccggggacctcgacgaacagcaggatccccaccgtcgccgccgcctcctccaccgtgtccacgcccatgtccctcagcggcgcgaacctcgccggcggccgcgcgtccgtgccgagcatggccgccgagaggacctgccacccgttcacctgcttcctcatcgcggtggtgatggcgccgctcttgctcgccgccttggggtgcatgagcccggcgaccagcctcgacacggtctggaaccgcgtcgcctcgtgcaccatcaggagcagcgccgccaccgcgtccatggcgcgccgctgcgccgcgccgttggcgaggtcggccggcctgcgcgcggcgagcgcgttcaccgcctgcgccatctgctgcgggccgagcgtgacgacggtgagcctgtccgtgtcgccgaggaggtcgcggtacgagccgccgaagccgacgtaggtggcggcggcgccgccgggggcggcgccgaggatgcccggggtgagctcccaccacctcccgtcgctgctccggaatccctccaggtagaggttgtcggcgcgcgtggcgagcgtgagcgcggcggtcggcgacgcccggagcacgacgtggaaccagcggcgcggcggcggcggcggctccaccggcggcaggacggggcggttgcgggagaagtgcctcgggttggccaccctgctgcggatgccggcgatgaagtcgccgtagttgtcgccgctgctcacgtcgaacgtcacggtgaagagcgggttcaacgccatggccggaagcgaaactgacaacaaaagtagagtgatttctgaactttcggacaagatgatgaattgatgatattgcaatctcaatgagttgggatgggagatttataggggaaatttgcttgcgtagtcaaaaagaaacaattctttgtgcttactagtcaaaacaaaatggaatttttgctttgcaaatgcatgtacactgagatacagatgaactcatgaacagatcagaatatcatatcatgcctgagatttttgttccgtcaaacaaagaagaagaaaaaagaagactgagcttagactgagtcgcgagactgcctcaaactagaaataaagatgagcaagataaggtgctggtttattaatgcaggggtcagcggctgctaatgtatgacacagtccacactgacaggcgtcacagtcacacaactaatatactgctttcgctataatggcaatggataattggatatgctgtagaaagatcagttcaagaaaatggtcataaagttctgttcagtagtatggttacctggttcagacattcaggctgtccaaaattcagataaagaaccctaatggagtacaagttatcctttatatcaacattgtcagatcggctcagtagcaaaagacaatgcaaaactagcaacaatcaacatctggttgcttcaaatagagtaggatggcttgcagaaatagtactaactgaaatagcaagggcaatttcagatgaacaatcttgattgcttgcttcaagagatcgcgacgccatgggaaggggagaaggtccaggaggaggacgcaggccacaagggtcagggatcttgcctgctcctgctgaatagcaatgccagtagcgttagacctgaaccttccattacattacagtcaccactcaccacgcatcgcaagagcgactccggccaccgctcttcgacggctcaaccatcggtggccacgtatgtgcccaaccttaccaaatggataataatgtggccctcaaaccaaaggccgcaaaataggcccattagcaacccccaaaacaaacctcgctacagacagatgggctggtttgtataatgggccgacacgggattaccacgcacgtgctgaatgtatataaatgagccggcccactaagcccaatagactcacccagtagccattatagccagtaacaagctttttggcgggagaagcgtctccgcctttgctcgttcccaatttacccaacgagagagattggtggaggatggtgtgacaggagcacagtatttctctcttcgttttcatcctaatcctacactcgtcttccacattttacatcacttttttttcttcgcatgaaatatccggcttttataagggcctccatgtaaactattggctgaaatgtactattcgggagggacctacactgaattaaacacaaaatggaagggtttttttttttgcaaaatttccacgccgcgcactgttcctatccgacgtggcacgcgcaagcagccgcgccatctgccaccctttatgttttttaatataaataccaatgtttgtgtattagaaaagaattatttatgggtaaaacttttacatatgtgctcttagcgacttaaatgccaatgttgaaaaataaacttcgacgaaaaaaacttcaaaatcaactagccacatagtcgtgctttgtgcgacttttgatcccgtttaaaaacttttgtattagtttaacttatctttcaagaagacaaaagtgaatttatttaagcctcctgttttttttcttcattgtctttgccccctctctctatttgtatcatgtgtgtaagagaagacactagaaacctccaatatgcttgtccgtttgtgttttttcattaatgcattatgcatgtacccttttgatctaatggcatttgtttatctaaacctctttatctgacaatcaatatgttttgatgatgtagcacatcattgagcaagaaagcttgctgcttagcttgtactatataagatttcaaaattaagttttacaatttaaattttggcagcagctgatattgtatagagaaaatgacggggcctaaagaaaccgctgtaccaaacaaaacggatcaactgagggagaagtacgagggaatagaaaagattaagtcaagaaatatgggagaagataaaagattaagccacgtatatctcatcatgttgtaatacgtgggtaaaaaataaagaaaatgatatccctttctcgtggatggcagagaaagaaagggaaactccatacgaaggcgtgacacgagccacacaactgttagccgtcggccgaagtcatgcgtgctatgccaaattaacgcagagacctgtctcctactctcctacacacgttacttaatctctcgaggaaggctgaattatgagtgacgtgacgcagcatggttcatgatgaacatctattttctctatcctaaaatataaatttttttagctagacataacatataccaatacatatgaaacatacatgtctctccatccaaccaaaattttattttgggacgaagagagtagctactatacttgggattgataaattgggatatggctctaagcatctggctctttcaattccttattattctctccgtttcaaattatttcacttactaggttaggtttgttcaaagtaaaatattcaaatatttaaccatcattttttataaacttatacagtttaacactataacatttatatttttagattcaacattcactataaaaaaataattttttatggtgttaccctataatttttgctggcgaccatacgcgaaaactgccaacaaaaacataacaaggggtgaggggctacggaccgccagcgaaaaccgattatcgttggtggccacgctaagttgtcctccataaaaaaacaactatatttttcgaggcagacctcttaaatattcaccagcatttttttgctggtggttggtaaagaggaccgctgcaaaaaaaaaattgaggcgaatatataaaatccaccgcccctaccgcccaccaaactcgcctctctcactcatctatctctcaatctctcttcctctctcccttctccctcagtctctcctccccccttcttcggcctcccgtctccactgctgccggctaccgtcgccaccaccgccattggctaccgtcacctctcccgcccaatatctctgctgtattggccaacagggagggcctcggtagcggcggcagggtgcggcctactcctcttcgccgctggccgccgtgagctcggggctagatccggccgccgcgacgatgggggaggccggatccgccaccgcgacgacgagggtggctggatccgccactacgataacgggttaggccggatctgtcgctgcaacgacgtgggggaccagatctgccgccgcgatgacgatgcgaccgccacagggtcgcgggaggggcgcaagcgctggatcgggccgcctgagggccgcggtgaccctaccctcgctcccctcccctccttcctctccctgatctggccgtagagagacggcagcttaggagtaaaaacggagcggatattatccgatccgatccgctccgaatccgtccgatgtgaggatatggtaagggtttttagatattcggccagatgcggatgtagatgtggattttgtcatgcggatgcggatgtggtatgaacgatatccgacggatgcggattatccgatattttaatcggattatccgatgtactgtttggcggataatccgcgaatttcaggccacacaacaactttcaggcccacctagctagcccaatagcccaacccggcctaacctaatcctctcctcatcccccagatccgtctctggctctctctctctgtgccgtccctcagccgtcagttgaggagtcggagagagtagcacggcggcacagcgcgacggcgaccctacgcggtggccactcctccccaacacgcgccaggccgatcctcctccccaacacgcgccagccgctcctcctcgtctagcaccgccgctcactgctgtgtgttttgtgctgtacgcctgtactactactgatgtatgcctgtatgcagtatgctgcgtgtagcactacataggggtgctctactgctctatgcttgctgttgctgtatgcctgtatggcttgcctcatgccgatgacttttatttttacattttaagcaacgtagtgaccggtgaactattgaattgaacacttatatatatattatgtttttggtggatcatggatgtatcttggattattttgactagtgaactattgaaatactattactattgaactgaacgcagtaaactaatgatgttttgccatcgtattggggctaattatattgccgccctcttgttgaatggattgaatacaaacttgacatccgataactttttgtccgtttccgaaccgagtctgcaccgaatccgacgtccgaaataatccgctccgcatccgcatccacacgtcatccgcacccactccacatccgcttaaaaaatatggtttaggctatggtatagctattatccgtccgaatctgctccgttttcacccctagacagcggcagtagccaagggggtggcttcggtgacaatgacaataacctccaaggtcgtcggggatgacgaagaccaatgtgtatgtgttgatgtttgtatgttgaaaatgctgtgagaaattaatctagatgtttggacttttggatgctgtgagaaattgatgtttgcatgttgatgtgaatcaggattggatttgaatctgatctcttgatgtggatttaaaaattgaaaatgcagcaatgtttttgaatgtggatttttttttgctagcggttagaaggcaactgcatgtggttattttcaatcttttttgcctcaaaatcaattatcgctggcagctagcttaccacagctgccagcaaaattctcttattgttggcggctgtcgatcaagagcgtatttccgctatggacctagctggtgagattcttcggaagagaatgggagacaagacattatacaggttcgggccgctatggagcgtaacaccctactcctgtgtgtcgaattaaacttgtgctgttacaagggagttggctcaagcttctcaagtggcgttttttttctcggtgggtaaggtcctccttttatagttcaaggggataccacatgcaccgccttacacaatccatcattgggtgggggcccacatgtcttgggtcaagccgttgtccttgccttcaaccagaaacaaggtggttgctcatcctcaggtgggcccagcgccgtcccccgcctgacacgggggacacgcccgtcattcgcccttaattcgttggcgactttggtggactccatacaggagcagcacgctcaccgacgtgccgatgggacaggtcttatctgcccccactccgcctgacaccgggcgggacgtgggtacgctgctatccgtcccgtccgcctgttggccggtcacagaccgatcaagcccgattgacgcacatcaatcggacggcgcctcacgtccgcccacgccacattaaatgcggcgggggacggttggggcgatgcttatttaaggcgcttgagagcacccctctctccgcccactcggccaccatgtggcagccgagcgggggccttggggcagcttgcccgagggccccgaggggtgcggcagggcatcccgaggccccttggccgcttcatgaccgcttgttttcccccccgaggggggggggggaaggccgtgcggctacgtggccggacggaagggctctttctctccatcttgcgtacccccgggcccatatcaccaacagcggtcctcgtatggctgccgccagcaaagataattttctctgacggcagccttaagccgtctgccagtgaaaacatctcttctctggcggttggtcaccgccagtgaagatgctttatcttcactagccagcaaaaatgtgttttggccgccaaaaaaaaaaccatttgtgtagtagtgattataaatatttttataatatataattcacatgttgttaaactatactccctcctttctcgtaaaggaagtcgttttggacagcgacacggtctctaaaacacaactttgacttcttgtttttataaaagtatttattgaaaagtgatatatgtatacttttatgaatgtatttttcaagacaaatctattcatatattttttacatttttaaactcaataacttaagagttattcatgatttatattactaaggtttgacttaaatattgtcataaacgacttcttttacgagtacggagggagtatatattttttaagaattcatggtaaagatatatatgttttactcaatacaataaaaagaaaaataatttgaaacgaatacgacatcctccctgttatactcgttactactccatctgcagagaattagcattgtacccatgcatgccgtgcatagaacgttgcgcatgtctgtatgtagcgatggaccgaatctatctatatctacgacaaacaggcacaataatttcaaccattggattgacaaatctttacagaattaggcgaaagtcccctccgattccccccagtccccacccattaaacaacatcattaatctctcctccaccattaggaccctttgaatcgcaggaatggaaaaacagaggaatagaaaaaaacgcaggattctgacaggaatatatattttaaaacagaggattggaaaatacaggaaaaacacaggaatgaccgtttgattggaccacaggaaaaacgcaggaatcggataagagagatagactcaaaggaatttttccaagaggttggacctcttgctaactttcctccaaaatctctataggattacccattccatagaaattttaaaggatagtataggattcagtcctttgttttaaagggtttcatagaaaatttttccataggattaaaatccttcaaattttctacactttttttacaaatcaaaggagccctaagtatcagatcatttttagcttaaccatcttccaatcaatgcatgtagactactggtagtacttttccatctgccgctttgcaagatttaagaaacaccaagacatatactccctctatactaataaaagaagtcgtttagaacaatgtttaaatcaaaccttgagaatataaatcatgaataactctcaagttattgagtttgaaaatataaaaattatatgaatagatttgtcttgaaaatactttcataaaaatatacatatattactttttaataaatatttttatagaaataaaaagttaaagttctgttttggagaccgtgtcgctgtccaaaacgacttcctttacgagtatggagggagtataaaccgtcgaagtttttttctaagaacttaatatattagaagcacaaaacgtgaacggatacatcttcctctgcccagggggcagcaagcagaagttgtttcatatgtagcctcggcatatatactgacgaggaatcca

SEQ ID NO: 9488 - DNA, 24122 bp, Oryza sativa
  unsure (1)..(24122): unsure at all n locations
tacttcacgtacgctcaacggaggcttcatttgctgaatggcatcaattttctcgggattcgcctcgatgcctctttcagaaactaggaaacccaacaacttgccggcgcgaacaccgaaaacgcacttctcaggattcagtttcgtacccgccgcgcgcaagttgtcgaaggtctcctgcaagtcggacgcgtggtcgaaagccttgcggctttttacgacgacatcgtcgacataagcctccacatttcgccccaactgcttgtaaaggaccttgtacaccagcctcgcgaaggttgctccggcattcctcaggccaaaaggcatcctgaggtgacaaaaggtgccaaatggtgtgatgaaggctgtcttggggatgtctgccgggttcatgtggatctggtgatagccggaatatgcatccaggaagctcatgagttcgcagctagctgtcaaatccacaagctggtcgatccgtggcaagaggaaatcgtccttcggacatgctttgtttaggtctgtgaagtcgacacacatgcgccattttccgtttgacttccgcacaagcactggattcgccagccactcaggatggtcgatctcttgaatgactccagccttgagcaatttttggacttcggcttttgctgcctgttggcgatcagcagacatcttgcgtagcttctgtttccttggcttagcatctggcttgactgccaggtgatgcatgatgagatctgtcgaaacacctcccacttcatcagagccccaggcaaagatatcaatgttcttcttgagtgcctctaggatgttctcagcttcttctttgcccatgtcgccccccaacgatacgagctttgcggggtcggcatcatcaatctatatcttgattatcttgctgtgaggggcgggctttggcacatgcttcgcccggtcatgcggttcggcctcaacattgtgcactgctctgttgattatggccagatctccttttgaagcagccaaaggctgaagccccctgaccacgatcactcctgccgggccgggcatcttgagcttgagataattgtgatgagaaatggcttcgaacttgttcaacgttgcacggccgaagatggcattttagttgtatgggatgtcgacaatgtcaaacaatacttgctctgcgcgtctgttttcccccgtgccgaaggctaccatcaactgtgcttggccgagaacttgaactgcttctccgccgaatcctcggagcgatgctggtgctggggtaaaggcttgggtagtcaaccccatcttggcatatgcttcggcaaagatgacatcggccgaacttcctccgttgaccaggactcgccggacctcgaaaccagctatatcggctgagatcactagaggatcttgatgcgggaacattaatccttcggcatcttctggcccaaaagagatttgctggttcagatactgcggagcccctgccgaagcgatattgtggaccgttcgcaggtgcatcctcttctgtcgcttcgacagttgtatcagtgggtcggcccttgtaatcacttggatcactctgcgctgcgcatcatggcgttgttcggccgggggtgcttgttcttgagctacttcacgagttgcttcgaccgctgctccctgttgcgtccttggatcttgcgcgttgctacgttgccgaatgtttcggcattgcttcgtggtgtgtgaagagcgtccatggaaggcgcagtagaggtcttttcagacctttttgcggacaggttgttgatggttgcttgcttgctgggcgtcaaactccttgcgaagggcttgcactccttcgacagccatcacagccttgcccgcatggttggttctgaacttcctccaggtcatgggggcttgaccttgccttggcagttgtccttagatcgccggctggggctggcgaaccacgagaggaggtggttcggcaacttgaacttgttgttgggcttgagcagcggcgacggaggccttatcgtactcggcttgtattgcttgccgtcgcttgcaatcctccttgccccttgcgaacccgtcaatgatgtgaagtaggtgctcaagcgtttgcggctccttgttggcaatttttcttgtgagttcgccctcgagtagaccagctgaagcggcgtttatgatagacgcatcggttatgtcttgaacttggcaccgggcttgcgagaagcgacgcatgtactcccttatcgactcccccggcctctggcgaatgctgagtagatgctgctgcgtcttcggcttctcataggtgcctcgaaagttaaggacaaagacatcgcgcaattgctcccatcagtaaatactattggttggcaaattgaaataccaagagcgggcgatgccgtctagggcgagatgtattacctttgccttggtattttcgtcgccatgagccgcttcgatcgcggattcataaatggagaggaattcctttgggtcagtttcgcctaagtagcgtggacgggtgagaacttgaactggggtgggattggatgggtcttgattcccccactgagcggtagccccttttcgccccctgccctgttcacggcaccttgctgcgggtacggtgtggcgaagggcaaaatcacgacttgcgcgtgtggttgggccatggcattcggctgcccggccccgattggtgatgtttgctgagccgccatggatgggtcgaaagttggttgtgaccatgtcatggtgacctggtttggtgcttgctttgctccgaagcctggcgttggtgtttgcagccgaacggttggcgcctgagcaacattgatggagtcgaactgcagtccttgactccacggcgaagcccccagacctggctgattcgaaggcaaccaactaggtgcaccatgacttgtattcccctccgggtgagccgaaggggcagtacttgaaatgttgtggggttggctgagctgttgaaggaaagcttggagctgcgcctgcagagccgaagccccttctgccattgtatgtggcacttggccaggcggttgaggatgtacttgggcagcaaccggttgagcttgcagttgcacgtgaggggccggatgcgctgctgcggtcgatggctgcccggcgaagtacattggcgcttgtgcggcttgtggcggaaggggctgggtcggcacttgtggatagacttggggtgggacatagcctgccgaatactggaggattggtgccgaagtgaccttggaccgccttgccgcctcgtacgcttgctgctgttcctgcatttggcgaagcatgtcttggagtcgtctcatgttctgtcgcatggcttccatgtcggcttcggtttgtgtctcggggtcaaggttgacttgggcttgcgcagcggcgagcgcagttggggccactgccggctacgatggggcggcttggggcaccagcaattggcttgtcgaaaggatctccgtcctggtctggagtgccctcgccaccgcagccaccttcgccatgtcagccgcgttcggcacctgcacagaggcagtaggggccgaaggcggtagtgatggcgcaggtgcggaagcagatggcgctcctccatcttcggcgacaggcgccgaaggctctgctccctcttcggcggccatatccgtcccggcgtcgctttcctttcgcctcgtaaccttctccttcacaaccttcttcggtggcattcgctctcagtggtttcgctcggaggtccccacggtcggcgccagctgttgtcgaaacgacaaccgcatacgtcaaagacgtggtcacccaacagtggttggaaaagaagtaaaatgtattaatttgagaatttttcttcggatccccctattacatggccctatgagactatttatagcccccattacagattcttactactatggttttggttatacaggggaatttacatggttgcccttagaaagggacatttacatgggtacatagtgtaattgaggttcatgggcccctgatggccgttgggcaatcgtcggcccaatagcccctaggcttgatgggccggaaaagcttcttcggtcctcgcgggggagaacttgctatggcgaagtcgtctcccttcggcatatattcttcgccctgcatccttcgcccaagaggcctttggcttggcaaagcacccacgtgatccctcacctctcgccgtccctgttccatagtcttcgccatggggggacttcgccctgactaactttgacgtctcgggcttgaatccccactcttcgcatggtttcagcaggtttggtcgaagggcctcatgccataccgccaacactaataatgcgagttgcaaacaaattaataatgattttctaattataggagcaattggttaaagggtgacttgccttgctcaagatcttcacgaagcttcacgaatcttcgagaaatcccacgatcgacaaaaatccggtaaccgcaactatacgcaaacaatcaaaacctaaacaaaagaccaagagaagatcctatttagactaaataatagtgacattagatagatctcaaatttacggaattattggaagtggaacggaggttaatcggagttacggatcgagagatatgatttttggaagtttaattggattttctggacatggggatatatttgtggaataaggaaaattgatttatggaagggaaaaaaggatttattaaatttatggaagagaatatttgtggattattggaaaagatattctcgagaatattttgactcattgacaagtggggcaaacaagaaggtgagagcgtaaattgagagggagcagatatggactttagctcatgagggatggacactgggcttggagggagggactagaagtggacttttcttgtttccttaagccgagaagggaggccggccaatgggccaagcccacgagcgcggagagagagaaggggacggctgactgggcaggggttgactcggtctggtggggtcggcagatgaggtggcgtccacgtggatgccacgcaagcgcaagggaaagaggaggccggagaccgcatcggacggccggcggcgcgcggagcgtcccggcgaacggcggcgagacggagcgaggcgcggacacctgtggcgagaggaggagatggggaatcggttcaccggcacggattagagagaggaggcacgacggcggccggcggcggcagcgaagctcgccggatgtccgacgtggatgcgcgagggaagggccaagagcgcgcggggccaggcttagccgaaacgattcggcattgcgacgcacacgcgacggcacggagaccgatggttgccggacttgggctcgcggtggcgctccgcggcggcggaaggggcgacgcggcgaaaagggggagagaggaggggagcggccaaggcgatgtcccggggaggctgctagggacgcggggagggtgatggcgatgggattcgtagggagaaggaccgacggcggcgggagactgcacacggcggcggcgagaggggaggcacggcgccggagcggaaggggaggtcggcggccgagggaaaggtttggggaggtcgagggggtcccgaggaaggcgatggcgagccggtttgaagagagggagaccgacggcagcacgcggccatgcgcggcggcggcgagtcgggcgacatggcgccggagttggagggcaggccagcggtcggggcgacggtttggggtggctcaaggggactcaaggagggtggtggcgcgaggaatcgatgagcggggagccgacagcgacgcacgactgtctgcggcggcggcgggaagggcgggaagggagcaaaagaggaggccggcggcggaattggcggtttggggtggttcattggagctcgaggtgggtggcggcgaggggattcggcgcgggaccgaccggcggtagcgcacgactgctcacggcggccgcggaagtagagcatcggcaagggcccgatttggaggacgaacgcacaaactaccatgtcccagtgctgtttaggagtcgctagaggatgtagatgagaggatttggaccgggagctcaccgacgagcgggaacggcgtcggcagacggatggcgtcgcggcgaggcagtcgcgacggcggggcggcacgacaccgagagggcgcggccggggaacaagaggggagaggtggcgcccggagctcctcgtcacgcgcccacgcacgcaccggttcctccgatgctcggcggcggacggcgacggcgagatcgggtcgagcggcaacaaggcggcgacggtggttcggcggcaatggcgcggtgggtgcgaggcgagtgaaaacgagagaggaaggggtttggggcggcttgggttttatagtggaggaatgtctgtttgtggagggaggaaaccgacctcgtgcgctgtcaaggatgcaagggcggcaagctggcggtcgacgcgtgcggccaaggaggcggcaggtgatgacgccggcggtgtcgggcaaaggtggaaaaaggagaggagaaaggggctctgttctttgccgttttttttaggagagacgaaggagggggagggcacgagagagacgctgcctccgtgatttggatggttgcggcgtggggttgcagggccaggcagcgcaggcgctgacggcggcgggcgaccgggcggtcggctttgaccggtcgcgggcgcccaaagcaatggcggtggcgggaggatttgcaagacggcggcggaaatcggttggcgagagaggcaagccgagagagagagagagctcggctcggcgatggttcatgcgcacgcgcgtgcgccgcacgtgcggagcgagggaggggaaggcggagagagagaacggcccgagagagagaacgggccgagagagagatgggccaaaggaggacatcggtccatccaaaagcagaggaaggcacaatagactttttcagaggggttgaattgttgaggtttagggtttagattcgaattcaaatttgatattcgaactcgagggtttagggaggaatcaagggagactcgaggagaagtcaaggaagagattcaaaatgagattttgatatttttgggaacggggacaagtatttggcgatgagttcaaaggaggaggttgaatttcggaaatatatttcggaaggttgaaatggaagatggattccgaggaggcgatttttgatggcgatgagagggatcaaggacggatttaaattgagatcttggcacgacttagacttacactcaaagaacgaaaattttcgagaatagggttttgccgaattagtttttaacgtcatacgaaaagcggagcgttacacctatagaatttgttggttgaaaacagtttgatagttcggaaaacgtgcgcgcgtgaaaaacgagataaatctttagcctttcctaagtggccgaaccgtgcctaaggtcctgtttagattacactccaaaactttacaccctgtcatatcaaacatttgaacacctgcataaagtattaaatatagtctaaaaaataactaattgcacagattacgactaatttatgagacgaatcttttaagcctaattgctccatgatttgacaatgtagtgctaagtaaacatgtgttaatgatagattaattatgcttaataaatttgtctcgcggtttacttacggattctgtaattagttttttattagtgctcgaacactccatgcgataccctatataatatccgatgtgacaagagccaaaattttatacccctgaatctaaacaccccctaaatatcttgttcctccacaactttcccctgcaagacaagttcaaggtggttgaggaacaagacgttttgtacagttttcaatcaaattggcagcagttcgctagctgttatggaatcggtggtggaataggagaagatgagaaagaggaaggggaacgactttgcctctcttaagccttgaagtgctcgatagttccttatgtagcgagcatgcatgcgtcaaatagacacatgatgaaaacggtatggaaacgaatggaaactacctctatcgattccattttcatttttcggggggaattaattggaaccagaaaccttggatgttgagacggaatcaaatattgtcgaaaccgaaaacatagagaatactaactgacacggatactgtaacgaaaatttattgaaatacaacccccccccccccctcacctcaaactgagcttcaaactttatcaagtccaattacaatctcaagtctcaacattcaacggtacatcacaaaacacaattaattagaatgctaacgtgaattgggttgggctattattagggtatatggacatggtatggaccttttctcctatttgggagagtttctagctgctatagcttcttcaagaagttccagctcctaaacagtttaaattctcctagattctaaaaatttggagttataaaatctagaaaataaactagaagccggatttctcagctttatgggtatgatccgactagtcaactcaagtcggaatatgactctgcttcttttttcttatttggagctctttctttatttattcagaacttttgccatatgtataaggcttgattcaatattggacttggtatatagtgggtcgcgttgtacacaagtatagggtatcccatatttagaacactaacctatacaataactgaacatctaattttattatagcactttttaggattagtctatatatattgttttagtgtattcaaactaaatatttttgaaatgattgatagtcaaagttgtaatagtttgatcccaacaacatcaagaattgtgaaattggaaggagtataaaaaataacgaaatgaggaatctgggggtagaattaaatttatccacttgatggattgatggatgcttcttagataatgagcttgatgccaactgtctgaaacatgtgttaagcttctctatttaatttgatggtcaagctggtggcttcaaaggtacaacctctaactctatttatatgtcacggtgtttcttattgtatacctcctccgttccttaatacaagggattttatcattttgcttgtactgtttgatcactcgtcttatttaaaaattttgtgcaactgtagaaaacgaaaagttgtgcttaaagtactttggataataaaataagtcacaaataaaataaataataattctaattttttttgaataagatgaatagttaaacagtgtaagtaaaatgtcaaaatccctcgtattaagggacggagggagtatgttcaagtgattggctaagtctgtcaaagctacggtgtttcttgttgtatatatatagattcatatgtcaacttacaatgtgttccgcttcgagtcgagctaatttctggccagagtacgcaagtgcgcggggtctcgagcagagatcaaagtggtgccatctggaggtcgatcatcgctgtaagcttgctcggtctcgatcggcttaacttcgtattgaggtacgtatacgctctgatcagcctttatactcttatatatgtctatcgacatggattgctggtgcctcatctggagatgtaaaagatcttcgagtttatctcttatgaaacagctgagattaatcaaagtcttcagacttcagagaaccattaggccataaatttatcttctgcttgctctcgctcgatcgagaaatgtactatcctgccaagctctttcagaataccaagataaatcacatccccagttctctcacatcttaaatgttgacgttcgttcgttgactcctttatggaaggtgcatgtcatcagcgatttcttcttcaaggcgttctgtcgtcggctatttttttttaacgaatcacacaagacggtgcgatgttttattaaaattataagattacaaccaggaaggtcgtaaccagaaaaaaaaaagtataccaccatcacccacacatcaacagcgccaacacacagaaccaagagaaggttagcactagaccggccaccgctaagcgtgaccagctgccactatgctaacaaagaaccacggccgagatcgcccaaaacccaacccttacaatcaacacaaagccccgctctatccaagtcttcaggagttatggagagagggtgagagagaagaatggaacacctctcccccttaggccttccgacgtggccaacttgtagagactagtacgccgcttacaagaggatgaaatctagagggagcttgcaccaattggttgtggggtttcggctaggggatgcctagacgacgtctccaaggagagaagcgacggagaacactaccgccgccgccgtccgtcaaggtcttaaagagaaccgagactgggctttcgttcggcatccacacatgagggatgagacggcacgacaacgccctcaggaggggaatgacgctttgagcgtcatcattgccggcccggccgaggctaggctaggttttcacccgccactcatcacctacaagtccacggctggcgcccagatgctccaccaccgtccaacctctgccaacatgtgggtccactgcaccagcgcccaccgcatctaccggcagctcctcctcctcacaccgtgcccggctccgtcgccgccggccgcgcctcgtcgcgtcgtgcctcaccgcgccaagctagtctcgtccatcgccggctgcgcctcatcgcgccaagctaggctcccattgccgaccgcgtctcctcgcgccaagcccgcctccaagcgccgagccggcctccgctgccaccgaccacggctctacgcgtcaagctagcccccgagcactcctcctgccgctgccgcgcaaatacagtcatctgccatgcctccccggctgtcgccgttcgtgcctcctctcgcagtcgccgtcgcccatttccaggcgttgataccgtgtccgcacccaccatgctgccattgcaacatcctccattgttgccgacgacgcgtccaccgccgccgccaccactactggagctgccccagccgctgccaccacccctgcagctgccaccaccacagcagctaccgccgtcgccgccgccgccgccgccgtcgccttccaccgtaggcagccacgcccgcggcttgccgtcgcaggtcaccatcgccggtcatcgttcggccagatctggcctgccacggtcgccacatcgccgtggtcgctagctgccgccatcaccagacgtcactgccgccatcaccagacgtcactgccgccgtcgccaccaccagcggacggccaccactagaagccgccgccgcctcaccacgctgccccaccgccggccgcctccccaccagatctagccgcggcggcccagatctgggcggtcttcacaccgtcccgtgctgccccccactgccggcgcgacgagagaatgaagccccgccgccgccatccttgcggccgctcgggcggcggcgcggcggaggaggaaggagggggggcgacgcggggttgccgcctcccgtgtcgcccgtgagggaggacgacgcggaagaagttgtgtaacacagtatattttgaagtttctcgtcggttatttggtttcatggtaggcaactagcctctagccattaattggttactcctagtactgcctgcctgttaattctcttcttgcctgtagaagagtctattgtcgcaaggcaacatgccaacatgagacctgaaaaggaataagtcaattgttggcagggttatggataacacatatccaaaagtaatcgactaaactcggcagaacccaccatatattaagtcttatatggaatcatgccttgtatatatagaaggagttccggataaggaagaacaaatagagttcaagctggaaacgataaggactacccatattgtatcatatttatctccctagttttacttggacaaggggacatatatgggtataaatacaataccccagaaggagagacaacacaaaaccaagacaagcctgaacaaaccaatacacaccgctagacatcgacatcggagattagcctagacatacccaatctagtgccatcggaggccgtcaagagggatttagtgttatctctgatctggccgagtatgtattcgaggaggaagactaccctgtcgtcaactacgtgttggtgtttatgtcgccaagttgacgacgactagataggctatcccaattattgtacttgtgagattctgatgaataaaagcaacaccggcttcgaccaacaggagtaaggctattacctgattctgatgaatgaggggcccaaacctatataaaaatcattatctctgtctctttaaccttaatctcacatataccctgataccaacgatccccacaccatgcaaataccgtagtcgtgatctaaaacatcgacaatttggactccctcaactataactccaatatgattcatatccttaaaccgtaataccggatatcttgacccctcaactatgaaaatcggtgcaattttattccctcaacagttttgtagagcggttccgctgacgtggcgctttgacttggtctaacccgctaagtcacactatgggactcgcacgtcaatgtcacacattctttattctcttcattccctttcccctcctcactttcctctctggcggaagcaacagggcatggcggtgatgacgggaggctgttgtcgcgtcgccaccgtcgggcaggaggaagcatgagcgaggatggcatggctgtcagaagggaggttgtcatcgcgccaccgtccctcccatcactgtctccgcctcccctccgctacccccttccgctcgccaccgtcgaggaggaggcatgagcaaggatggcggtggcgatgcgaggggatgccattgtcgcgtcaccatccctcccgccaccgcctccacccccctcccttttccagttgttgcctccgctgcccccttccgcttgttgccatccagaaggagggagtgcgagcaaggatggtggcaacggtgaggaggttgttgtcacgccgccgtccctcctgctacagcctcccctccactgctaccatcctcaaccccgcatggggaaagccgccgcgcctgctttgccaacggcgtgccgttgtcgccccccccccccccccccagcggccgccccgttctatctcatcccacgccattgtccctcccaccactgcctctgccttccctcagctactgccctcaaccccgcgtgatgaaagcctctgcacctgctccgccaccggtgcattgtcgtggccctggcggccaccccgctccgtctcatctcgtgccacctccccgtgctgcccgttctctcctgccattgcatccgcctcccctccgctatcgccgcatggctgattccactacttaattaaaggagtcacaatggacttattccacctgaaaatgcaaggctcactacacattattggcccatcacaagttatcgatccctagcacaaatactggtatcgttgctgggtcatcaagactttcctcttctgtggaacatgtcgcatcgtgcgataggcccgggcgccacgccgccagagccttgccgacctacgtgccaacgtacctttgtggtttgtgccatcctcacccgacgggctgcacctaacggtgtaagataggccaaataaggttattcatttatttggcctataaatgaattcgtgaattaacccatatatgctattcggtgagaaataaaatagaacaatattaaccggcaatatgtacggaccgccatactagttataaactgaaattcaacaaaactgagatacaaagtagataagccttcatcatatacgaatgcatgggttatggactactagtatctaaattaacatccaggttgatatatacaagtattgcctgtggccgcgtgcaggaacccggaagaacgtaataacacaactctgaatatggtggaccctcgtgccgtcatttcatcctggttcgttacgttgcgcgaggacgtgtacgtcttgattcgcatcgaatcactggtgtcgtttgttacggtggcgttcattctgatgtttaccatggacatctaccgtgcccggtctcgcggctctggcaccatgtccactttggacaaggtcgatcgtatctctgaccgcatagtgctgtatctgttgggcaccatgcaagctgcgcctttcagcaatgagctcttccctgtctggtcaattgtgctggtgagtcttcatgctagcatcggctatctctccaggtacggtatacctgaccgggtacgacatatcactgagctgggaaatgtgatcaagtttctgggagtagcgttcttgaatcgcacccgaggctccatgtttgtgaggcccctctggtcgatttggtgtgttctgctactgcggtccatgtaccggttcatcgcacagagccttgcgctgttatccctgtggcatggccgcagttaagagctccttccagagtacatgcgtaacaactttgggaggggaggattggcatccggtgtccacaacgcggaaacgatggacggatacaaatacttggtccatggcgagtccaagcagaagatcaaattactgaggcctcgatatgctctctatctcaatgtcaccgatgaaaacttgctggtcacactggacaagatttggcgatctgacgggccggtgctacagtccgccaacagcgttcacggagacgactgcaaggatctgtgcctggccttttccatgtcgaggtttctccggtgcaggctcgaagacgtgaggctggacgcagacagcctctccatgtcgcggaatctgatagtgacaagaatattgcatgtcgaccagaaccctgcgagggtgttcaggataatggagctggagatttcgttcctcaaggactacttctacaccctctatcctatcgtcttctggcaaggccttgcttctctctccttgagtgttcttcagtctctcgcggccttgggactcgccctctggctcgcctcgggcgtcaatagggtcaagaaagatcttccggaccccgtcaatgtcgtgcacggccataatgtggaggtgacaatcacatgggtgttcatgtccttcatgatgttcaaagagatctgggagatgatcacttacttgctatcagactggacaaggcttctccttgtgtgcgagtatacgcggtccagatgcaggtggataagaaacgccacgatggagaagctgttaagttcctttctaacgttaagttcctttttaagtcgtaagatcttttctgacccttggcatggatacatcgaccagtacgacttcttgcagtcatttgattacagcccgtcgctctggaacctgatgtaccgtgctactctaggcgtcatcaaagagagggtaaaagggcaaaagcctggcaccgccatcaagatcccagaatgtgtaaaacctgcaattcttcaggcattgcgctcaatggatctcgctggcttgggcggccgcgagcttccccgagacgtcccatcgttgagcgccgcgagattgcttgaggatttccgatgggcgttgcttgacctgtacacgtgctcccaggtcattctggtttggcacatcgcgacctccatgtgcgagatcaagctcgcccgagacaggggcattgacctgagcaaaccagggctcctgcgctccgccttcacgtacctgaaaatttttctctgcggctgctgctgcactcctcagccgtacctcgttgctgaaaatattctcggtgatgatcaactccggactagctacattgttgcaaacagcttgtcacgatactgcgcgcacttggtggtttttcagcctgacctgttgcctgacagcttggcgcttctgatattatgaatgaccgcgactccttgctgacaaagtatgacaagctcaatgggttgttctcacccgaagctgctgaactgaaaaaactgaacgggaccatcgtagagaaaggcgcggtactgggaaggcaattgcttgaaacaattccagacgatcagcagcggtggcaaatcctggcgggtgtatgggctgatttgctcgtgcacattgcgcccagctggaacgctgaggcacacaagatttgcctcgagtacggaggggagctcatcaccttcatctggggattgctctggtactgcggcatcgagaagagcagcctgtggcgagatcaggacgatgcgcctggagatgccaacgtccagcctcagcctcagcctgcagcagaagaacctcagggtggccacaatgtcgaagatgatgcgatggtggaagatgcccaaaacggaattgaagctcgtgaagcaggcgtgcagaatcaaccagcggagcaggtgctgcagcaagctgctgaagcagatgtggagattgcagatgaagcacgagaagacgagcctgagcctggcaacgacatccacgctcagtctgctgctgacatggagattacagatgaagctcaagaaggggagtctgagcctggcagcaatgtccaaacttctgctgctggtgtggagattatagatgaagctcaagaagaggagtctgagcctggcaacaacgtccacactcccttcagtgctgacgtggagatcgcagatcaggctcaagaagaggagtctgagtctagtaacaaggcccagtccgctgctggcgtgcagattgcagatgaagctcaccaataggagcctgagtctggtaacacaacaggatcaggtagaacatcagaaatacctgttaaaagacgctggagatatgtcctgggattgagatgcagtgatccggaagggaaacagtgtccggacctcgcagctgatgagctgatgtgtgaacacacatcaagccgatgaagagcagtgcctctcatagtcaaggttgagtacttgagtgaaactgtgaaagccttgtctgcaaaagcaagaaaaaactagaagattattcaactcatgcagtgtgatatcttccgtctcccgaatgcgtgcagcaacgtactttacaaatatataactttctttgtacattgtgcttatgttcaattttgtttgcagagtatttatgttcaaggaaaaaaaaagagagtttttgtgttcagtttatctttcgacagcgtttatgttctgtcgacagtaatactgcagccatgaatgtttcacaattctcctcaggttttcgttcaagaattttgtttggatgtctatggttgccacattcttggttgcacaaatcatttgggtgtcaaatgccttattgccacatgcttgtggttcccaaactgtgtatggattctgcaagcatttctggaaagagagacaaactacaaacccaactatcctacaggctgcactaaattgcagataagcgcagataaaaatcaaactatgaatcataatactagccagcatcattttgagatcacatccaaaacttttctctccaatatgcggagataccatggcagtacagtaatcagtactcagtaggtacattgtttcagtagatcaggagccgcacctggatggctcgccggcccagaaggaatctgcgccggccactcgcgacacggcggagtgcacactgcgcctctgctccatccgccaaaccagagcgagccaggctgcccgacggaaggtggccggagaagccgcttctgggaggaaaccctccagggcagaccagagcaacggcatctccagcgagaatgacccccggaactggatcggaatcccttctccattctccctctgccaccaccacggcgacgcctcctcctgtaatcagcatgatagatgcattttttggtccattagaatgttctttacaggattggctacttggcatatacttgcagaacagactttacaagcatttaaaagtgaatattggtataatattctcctaaatcaaacacatcaattcttttcatctcccatagcaacgtgcagggtactaccagtctaaccacatgattagtggctctgatcagtataactagtagtaacaaaaaagtaggtcatgatctatatacaattgcacccatgcatgatactccacttaccctctccttggaaaaagtaactttaataatttgaccactaatgtaccctacacagtggaattgatttttgtttctccctttctctgtcagaacaattcagttgaaactgtattttataatgttgggtacatggttttcagatttgtgctgccttattgggatcctgaactagccgcagcttgtgcagcatgggactgaaggtgaacaaattctagatatcctccattctgcctaaaaattcataatgaatacatagtctaaaaacgaaacagatcaacagcaaacattgggagcataagaagacccttttaacgtgaactaccttctgacatgatcacttacgtgggagcccgtggttattgaaacccgcatgtcattatgtcagtgaccatgccacttgacataatgtcagaggagatgcatcaccatcatctcctttgcagtatttttctcatttgatttaccgatgatgacaaatgcctttttgctagctaacagtgcaaagtgttcgattggtgcacacataggctaccctttaattccttccaagatagtatgatcttattcttacctcaacctaacgaataaaggcaaaataatttcttcctcttgttttttttttaacctttcttctctcctttcttccaactattttgctgcttagctagctagctataaaaagcagtggttcctccttccactaacttgtgaaaagcattgtctgctgccttacatttgcatagatatgttggctgcaagttttctttttatgtgtgtatgagcatcatgtgcgtcatccatgaccattgatgagcattcaacactatgcattgcatgtggagccactaaaacatactcccaccatttcgttaatccaaacaatcttttgtcaaaatgacccattggatttgtcatcattaccttaaccactaaaaccataccattttttctagaaggatagacttgactaaggatagcacgtgagataaactacttaaaaggtgtcatttgtttacttaaaagatcatgattaatcgtagcaactcacccagtacagtagtagttagcctttacaattgtctgaaagtgatggatgtaaaagatcggttacaaactcagtgatcgactgatccaccattgtctggtaatcttttctggaatgacaccaaaaaacattgaaaatcccaggtgctttgagatgttggcactgaaaagccatcccactaacggaccaacctgaataaataatgtgatgtagagtcttaggctgctgccaaaacaaaaggaacagagaaaatagaactagtggcgaaagagaagaaaaatgacaccttgcccccagttggcctttataatcttcaccagctgcaagccttggaagattcatccatagtgtactcacagcagccaataagcagtagcttcatccagccgaaatcgtcgaagatcggcagtttgaaccttggtgagccatggttcttggaagaggccgttcccaacatcggcaacaagccataaggtgtggcgatcttggaggtctgttagtcagcctgaatatactattgtttcttttgcctgatcattctatctctgttcataattggtgagattcagggcgaacaatgccatcaaggagaaccagaaactcagggaagaactcaggagaacggaaaccatagtatcaatttataccaaacatcgctggtggatggaggagcaagcttccaggtcttatgagatgattaggttcaccgagtacaggccttcacagattcatcgtgtagtcaatgaccgagatgcaatttttcttggaattggtagttatgggtctgttcttcagtgcaaaattggtgagaagactgttgctgtaaagattcccaataacagagacagccgcaaacctctgccaagcatgcgagagtttaatcaagaggcaagtataaagatatattctgcaatatatcttttatatttctactaatctaagttcatttatagtagctccatgcaaaataaaaggttcatttcatagtaattgctgacaaaagtttaacatgggggattacagttgtctctttgatccctcaatccattgaattcagatcagtgcaattgctattgtgagtttttgactgcgcaatagcaattgcagacaatcttagccattcattttgctacccaactgctgaaaatgaccacaaaagtaatttctccacagtttccggctacagtattttactctgattcaaatgttagctgcaacctcacctatttttcctgccttactttctccctgattgcatgcctactaattgaaatacagttcagaaattccatgggtataaatgcaagaaagtttatgcctacctgaattgttcatatattaattttcccgcaagttagagctaccgtacaatattcttctcattttctcggatagaagagctctgaaaatgcaggttgccatcctcaaaaagatccggcatcaaaatcttgtcaccctcataggagcatgtccagagagacagatactcatctacgagttcttgcctaatggctccctgaaagatcacctcactgaaagtggacaaaggaggaggttcacatggaaaagacgagtgagagctgcctccagcatatgctccgctctcatcttcctccacaacaccgagccctacccaatcgtccatggtaatctcaaaacgagcaacatcctcttcagcaaagacaatgtatgcaagcttagcaactttaccatgtcccatctgctgcaatacacttccaaacctgtctcgttttggggtggtgttaagggatttgcaagaatgttgattggttctgacacccacaagactcagttagatgtgtccgctctgggcattatacttttgcaacttgttacagcacaagaaccaaaggatttgagaaagaatgtgctcagcaaactaggagatattatacgattccaaggaaagagcatggagcagcaacatgaggtcctaaaaagcattgtggatcctgacctgaagaaatgccagttagatgacgccgcagagatgctgttcctgggattgaaatgcagtgatccaaatgagaaacatcgtccagacctcgcagctgatgtgtggccactcatcgaggaaatgaagagcagtgcctctcatcgtcagggttgagtgaagctgaggaagctctatctcttgaagcaagaagaataaactacaagattactcaacttgtgtggtgtgaaatctcccctctcctgaaatttgtgtggcaagcaaagtgctccacggatatgaaactttctttgtgtattgtgtttatgttgagttttgcaaagttgagtttatgttcagttcacaatagtcaagcctgaattcaataatttagtctgagatgtttgtggtttccacattcttgaggaaacaaattatttgggtgccaaacgctctggctgccattgtggctacccctacccatcatggcctgtccatttttgcaagcatttctgcagtgcaagatgcagagccgggatgtttattattccattatctaaaaaaaaccatttctggcaacgtatacaaattaactacaaacccaatactcgcttanctncaggccattgtttagttcacaaaacaaaattttttcacccatcacatcgaatgtttggacacatgtatagagtattaaatgtggacaaaataaaaaaaccaattacacaatttgcgtgtaaattgcaagacaaatcttttaagcctaattgcgccatgatttgacaatgtggtgctacagtaaacatttgctaatgacgggttaattaggcttaataaattcgtctcgcagtttcctggtgaaatctgtaatttgttttgttatagactacgtttaataattcaaatgtctatccgtatatccgatgtgacaactaaacccaaaatttttccccaactaaacaaggcctcaaagaggacaaatccaaactgcatgattttcgtactatcctagagtaaattacagatagccgcaaatcaaaataacaattaattgtactagcctacatgatttaccccccttttcttttcgtctcatcgagagaagccagatccaaacaagcgtcaatagcatggcagtgaattaattaatggaggaaaattagtagggttttgggtacacctgggaatgtggccttccgatccttccgctagtccactgctaggttgcccccgccgacgaggagatggccggagaccagagttggccggagacggggagggaaagccttctgggagggaaagtcggaaaccccggtggcatgatagcgccggccggagcaacggaagctccaggagagtgatgcccgggagtagaacggaatcactcctctccaccgtctcctccgcatcgccgcccgtcggtcgccgccgccgccgcggcggccgcctcaccggcagaggcacattgctgcgagcccagcgatgaaggcggcggcagaaggcccacgttgccgggccaactcaggcccatatattgattggatgggcccacgcatattcgtcggctgcactctcataggccttaattacggcccgtgattggaagaccataaatttcctaaggaaaaagtacacccgaggtccctcaacttgtcatcgaattacaaaatcatctcccaaccgcaaaaccagatatatgacatcctcaacttataaaaccattcgctttacgtccttcggccccacatgtcatgatgccacgtcagcatcttctctcgctttcccctcctctccctttctcatctctctctctctcactttctcctcttagggagcacggccggccggcaggggaggagcgcgacgggcgcgcgacggccagcgagggaggagcgcggctgagaggagggttggcgcgatgggtggcggtcggcgacgcggagcacgacgacgacttggggccgccgctcgcttgctcctgggggctggaagagtagcacgcagccacgcactcagagtggaagcggtgggtgtccggcgacgtcccgaggcgggcgaggacggcggtggcttgcctcccgctcctctccccgccgatctccctcgccggcccgcgggtgcgcgcggagaggaagaagggcagcggccggccggcagaatagccggtgaacccatccttccctccatttctttgttagcttccgccatgtctagttgcattttattgatcaagaggtgattttggcccattctgtttctgcgagctcacagcctcacacccgctcaaattcttcacaatctgtaagtgtgtgtgtgtgtgtaaattcttgcaaattagaagctgaattgctgctaatagcctgcatcgactcgtaaatttatgtttttttgttggaacagatgggctgtggctagtggccgcagtacagctatgggggatgccatcctgctgcagaccaaccacattcgacgttaacaaggtgccaaccatgcggggacctagtgcaccggcggcgcggcgcactgaggacgacgaggggcggcggcggcacgcggcgcgcggtgaaggccggccgtgcgtcggcggggtgcggcgcacggcgtgacggcagccgacggcggggcgcggtggcggctaggcggcggccgcgacgcggacacgcggcggcggcgcggctaggacacgggctcgtggtggctggcgtgcggcgggccggcggctcacggcgccacgccatgcggggcggcgtgggggcggtcaagcgggcatggcgcggtgctgcgagcacgccgcggacggcgaatgcggtgcagcgggctagcacggcgcggtgcggcgacgccggtggccgggtgggtgcgggatacggctgagcggcggctcggcgcgggatgcggccgagcggccatggctgctcgctgctccgcccttttccttttttttttctttcttcattttcttttcgggccgcagga

SEQ ID NO: 9489 - DNA, 6682 bp, Oryza sativa
cggcgacggcgagatcgggtcgagcggcaacaaggcggcgacggtggttcggcggcaatggcgcggtgggtgcgaggcgagtgaaaacgagagaggaaggggtttggggcggcttgggttttatagtggaggaatgtctgtttgtggagggaggaaaccgacctcgtgcgctgtcaaggatgcaagggcggcaagctggcggtcgacgcgtgcggccaaggaggcggcaggtgatgacgccggcggtgtcgggcaaaggtggaaaaaggagaggagaaaggggctctgttctttgccgttttttttaggagagacgaaggagggggagggcacgagagagacgctgcctccgtgatttggatggttgcggcgtggggttgcagggccaggcagcgcaggcgctgacggcggcgggcgaccgggcggtcggccttgaccggtcgcgggcgcccaaagcaatggcggtggcgggaggatttgcaaggcggcggcggaaatcggttggcgagagagggaagccgagagagagagagagctcggctcggcgatggttcatgcgcacgcgcgtgcgccgcacgtgcggagcgagggaggggaaggcggagagagagaacgggccgagagagagaacgggccgagagagagatgggccaaaggaggacatcggtccatccaaaagcagaggaaggcacaatagactttttcagaggggttgaattgttgaggtttagggtttagattcgaattcaaatttgatattcgaactcgagggtttagggaggaatcaagggagactcgaggagaagtcaaggaagagattcaaaatgagattttgatatttttgggaacggggacaagtatttggcgatgagttcaaaggaggaggttgaatttcggaaatatatttcggaaggttgaaatggaagatggattccgaggaggcgatttttgatggcgatgagagggatcaaggacggatttaaattgagatcttggcacgacttagacttacactcaaagaacgaaaattttcgagaatagggttttgccgaattagtttttaacgtcatacgaaaagcggagcgttacacctatagaatttgttggttgaaaacagtttgatagttcggaaaacgtgcgcgcgtgaaaaacgagataaatctttagcctttcctaagtggccgaaccgtgcctaaggtcctgtttagattacactccaaaactttacaccctgtcatatcaaacatttgaacacctgcataaagtattaaatatagtctaaaaaataactaattgcacagattacgactaatttatgagacgaatcttttaagcctaattgctccatgatttgacaatgtagtgctaagtaaacatgtgttaatgatagattaattatgcttaataaatttgtctcgcggtttacttacggattctgtaattagttttttattagtgctcgaacactccatgcgataccctatataatatccgatgtgacaagagccaaaattttatacccttgagtgtaagcgcccggtaaatattttgttcctccaaaactttcccttgcaagacaagtttaaggtggttgaggaaaaagacgttttgtacagttttcaatcaaattggcagcagttcgctagctgttatggaatcggtggtggaataggagaagatgagaaagaggaaggggaacgactttgcctctcttaagccttgaagtgctcgatagttccttatgtagcgagcatgcatgcgtcaaatagacacatgatgaaaacggtatggaaacgaatggaaactacctctatcgattccattttcatttttcggggggaattaattggaaccagaaaccttggatgttgagacggaatcaaatattgtcgaaaccgaaaacatagagaatactaactgacacggatactgtaacgaaaatttattgaaatacaaccccccccctcacctcaaactgagcttcaaactttatcaagtccaattacaatctcaagtctcaacattcaacggtacatcacaaaacacaattaattagaatgctaacgtgaattgggttgggctattattagggtatatggacatggtatggaccttttctcctatttgggagagtttctagctgctatagcttcttcaagaagttccagctcctaaacagtttaaattctcctagattctaaaaatttggagttataaaatctagaaaataaactagaagtcggatttctcagctttatgggtatgatccgactagtcaactcaagtcggaatatgactctgcttcttttttcttatttggagctctttctttatttattcagaacttttgccatatgtataaggcttgattcaatattggacttggtatatagtgggtcgcgttgtacacaagtatagggtatcccatatttagaacactaacctatacaataactgaacatctaattttattatagcactttttaggattagtctatatatattgttttagtgtattcaaactaaatatttttgaaatgattgatagtcaaagttgtaatagtttgatcccaacaacatcaagaattgtgaaattggaaggagtataaaaaataagaaatgaggaatctgggggtagaattaaatttatccacttgatggattgatggatgcttcttagataatgagcttgatgccaactgtctgaaacatgtgttaagcttctctatttaatttgatggtcaagctggtggcttcaaaggtacaacctctaactctatttatatgtcacggtgtttcttattgtatacctcctccgttccttaatacaagggattttatcattttgcttgtactgtttgatcactcgtcttatttaaaaattttgtgcaactgtagaaaacgaaaagttgtgcttaaagtactttggataataaaataagtcacaaataaaataaataataattctaattttttttgaataagatgaatagttaaacagtgtaagtaaaatgtcaaaatccctcgtattaagggacggagggagtatgttcaagtgattggctaagtctgtcaaagctacggtgtttcttgttgtatatatatagattcatatgtcaacttacaatgtgttccgcttcgagtcgagctaatttctggccagagtacgcaagtgcgcggggtctcgagcagagatcaaagtggtgccatctggaggtcgatcatcgctgtaagcttgctcggtctcgatcggcttaacttcgtattgaggtacgtatacgctctgatcagcctttatactcttatatatgtctatcgacatggattgctggtgcctcatctggagatgtaaaagatcttcgagtttatctcttatgaaacagctgagattaatcaaagtcttcagacttcagagaaccattaggccataaatttatcttctgcttgctctcgctcgatcgagaaatgtactatcctgccaagctctttcagaataccaagataaatcacatccccagttctctcacatcttaaatgttgacgttcgttcgttgactcctttatggaaggtgcatgtcatcagcgatttcttcttcaaggcgttctgtcgtcggctatttttttttaacgaatcacacaagacggtgcgatgttttattaaaattataagattacaaccaggaaggtcgtaaccagaaaaaaaaaaagtataccaccatcacccacacatcaacagcgccaacacacagaaccaagagaaggttagcactagaccggccaccgctaagcgtgaccagctgccactatgctaacaaagaaccacggccgagatcgcccaaaacccaacccttacaatcaacacaaagccccgctctatccaagtcttcaggagttatggagagagggtgagagagaagaatggaacacctctcccccttaggccttccgacgtggccaacttgtagagactagtacgccgcttacaagaggatgaaatctagagggagcttgcaccaattggttgtggggtttcggctaggggatgcctagacgacgtctccaaggagagaagcgacggagaacactaccgccgccgccgtccgtcaaggtcttaaagagaaccgagactgggctttcgttcggcatccacacatgagggatgagacggcacgacaacgccctcaggaggggaatgacgctttgagcgtcatcattgccggcccggccgaggctaggctaggttttcacccgccactcatcacctacaagtccacggctggcgcccagatgctccaccaccgtccaacctctgccaacatgtgggtccactgcaccagcgcccaccgcatctaccggcagctcctcctcctcacaccgtgcccggctccgtcgccgccggccgcgcctcgtcgcgtcgtgcctcaccgcgccaagctagtctcgtccatcgccggctgcgcctcatcgcgccaagctaggctcccattgccgaccgcgtctcctcgcgccaagcccgcctccaagcgccgagccggcctccgctgccaccgaccacggctctacgcgtcaagctagcccccgagcactcctcctgccgctgccgcgcaaatacagtcatctgccatgcctccccggctgtcgccgttcgtgcctcctctcgcagtcgccgtcgcccatttccaggcgttgataccgtgtccgcacccaccatgctgccattgcaacatcctccattgttgccgacgacgcgtccaccgccgccgccaccactactggagctgccccagccgctgccaccacccctgcagctgccaccaccacagcagctaccgccgtcgccgccgccgccgccgccgtcgccttccaccgtaggcagccacgcccgcggcttgccgtcgcaggtcaccatcgccggtcatcgttcgaccagatctggcctgccacggtcgccacatcgccgtggtcgctagctgccgccatcaccagacgtcactgccgccgtcgccaccaccagcggacggccaccactagaagccgccgccgccgctgccaccaccagacaccacctccaccgccgccacctcttcgccttctccgtcgccaccacctctggaccccactgccaccaccgctagccaccgccgcctcaccacgctgccccaccgccggccgcctccccaccagatctagccgcggcggcccagatctgggcggtcttcacaccgtcccgtgctgccccccactgccggcgcgacgagagaatgaagccccgccgccgccatccttgcggccgctcgggcggcggcgcggcggaggaggaaggagggggggcgacgcggggttgccgcctcccgtgtcgcccgtgagggaggacgacgcggaagaagttgtgtaacacagtatattttgaagtttctcgtcggttatttggtttcatggtaggcaactagcctctagccattaattggttactcctagtactgcctgcctgttaattctcttcttgcctgtagaagagcctattgtcgcaaggcaacatgccaacatgagacctgaaaaggaataagtcaattgttggcagggttatggataacacatatccaaaagtaatcgactaaactcggcagaacccaccatatattaagtcttatatggaatcatgccttgtatatatagaaggagttccggataaggaagaacaaatagagttcaagctggaaacgataaggactacccatattgtatcatatttatctccctagttttacttggacaaggggacatatatgggtataaatacaataccccagaaggagagacaacacaaaaccaagacaagcctgaacaaaccaatacacaccgctagacatcgacatcggagattagcctagacatacccaatctagtgccatcggaggccgtcaagagggatttagtgttatctctgatctggccgagtatgtattcgaggaggaagactaccctgtcgtcaactacgtgttggtgtttatgtcgccaagttgacgacgactagataggctatcccaattattgtacttgtgagattctgatgaataaaagcaacaccggcttcgaccaacaggagtaaggctattacctgattctgatgaatgaggggcccaaacctatataaaaatcattatctctgtctctttaaccttaatctcacatataccctgataccaacgatccccacaccatgcaaataccgtagtcgtgatctaaaacatcgacaatttggactccctcaactataactccaatatgattcatatccttaaaccgtaataccggatatcttgacccctcaactatgaaaatcggtgcaattttattccctcaacagttttgtagagcggttccgctgacgtggcgctttgacttggtctaacccgctaagtcacactatgggactcgcacgtcaatgtcacacattctttattctcttcattccctttcccctcctcactttcctctctggcggaagcaacagggcatggcggtgatgacgggaggctgttgtcgcgtcgccaccgtcgggcaggaggaagcatgagcgaggatggcatggctgtcagaagggaggttgtcatcgcgccaccgtccctcccatcactgtctccgcctcccctccgctacccccttccgctcgccaccgtcg

SEQ ID NO: 9490 - DNA, 3485 bp, Oryza sativa
ttcctgcagccctttgtgaggcccctctggtcgatttggtgtgttctgctactgcggtccatgtaccggttcatcgcagagagccttgcgctgttatccctgtggcatggccgcagttaagagctccttccagagtacatgcgtaacaactttgggaggggaggattggcatccggtgtccacaacgcggaaacgatggacggatacaaatacttggtccatggcgagtccaagcagaagatcaaattactgaggcctcgatatgctctctatctcaatgtcaccgatgaaaacttgctggtcacactggacaagatttggcgatctgacgggccggtgctacagtccgccaacagcgttcacggagacgactgcaaggatctgtgcctggccttttccatgtcgaggtttctccggtgcaggctcgaagacgtgaggctggacgcagacagcctctccatgtcgcggaatctgatagtgacaagaatattgcatgtcgaccagaaccctgcgagggtgttcaggataatggagctggagatttcgttcctcaaggactacttctacaccctctatcctatcgtcttctggcaaggccttgcttctctctccttgagtgttcttcagtctctcgcggccttgggactcgccctctggctcgcctcgggcgtcaatagggtcaagaaagatcttccggaccccgtcaatgtcgtgcacggccataatgtggaggtgacaatcacatgggtgttcatgtccttcatgatgttcaaagagatctgggagatgatcacttacttgctatcagactggacaaggcttctccttgtgtgcgagtatacgcggtccagatgcaggtggataagaaacgccacgatggagaagctgttaagttcctttctaacgttaagttcctttttaagtcgtaagatcttttctgacccttggcatggatacatcgaccagtacgacttcttgcagtcatttgattacagcccgtcgctctggaacctgatgtaccgtgctactctaggcgtcatcaaagagagggtaaaagggcaaaagcctggcaccgccatcaagatcccagaatgtgtaaaacctgcaattcttcaggcattgcgctcaatggatctcgctggcttgggcggccgcgagcttccccgagacgtcccatcgttgagcgccgcgagattgcttgaggatttccgatgggcgttgcttgacctgtacacgtgctcccaggtcattctggtttggcacatcgcgacctccatgtgcgagatcaagctcgcccgagacaggggcattgacctgagcaaaccagggctcctgcgctccgccttcacgtacctgaaaatttttctctgcggctgctgctgcactcctcagccgtacctcgttgctgaaaatattctcggtgatgatcaactccggactagctacattgttgcaaacagcttgtcacgatactgcgcgcacttggtggtttttcagcctgacctgttgcctgacagcttggcgcttctgatattatgaatgaccgcgactccttgctgacaaagtatgacaagctcaatgggttgttctcacccgaagctgctgaactgaaaaaactgaacgggaccatcgtagagaaaggcgcggtactgggaaggcaattgcttgaaacaattccagacgatcagcagcggtggcaaatcctggcgggtgtatgggctgatttgctcgtgcacattgcgcccagctggaacgctgaggcacacaagatttgcctcgagtacggaggggagctcatcaccttcatctggggattgctctggtactgcggcatcgagaagagcagcctgtggcgagatcaggacgatgcgcctggagatgccaacgtccagcctcagcctcagcctgcagcagaagaacctcagggtggccacaatgtcgaagatgatgcgatggtggaagatgcccaaaacggaattgaagctcgtgaagcaggcgtgcagaatcaaccagcggagcaggtgctgcagcaagctgctgaagcagatgtggagattgcagatgaagcacgagaagacgagcctgagcctggcaacgacatccacgctcagtctgctgctgacatggagattacagatgaagctcaagaaggggagtctgagcctggcagcaatgtccaaacttctgctgctggtgtggagattatagatgaagctcaagaagaggagtctgagcctggcaacaacgtccacactcccttcagtgctgacgtggagatcgcagatcaggctcaagaagaggagtctgagtctagtaacaaggcccagtccgctgctggcgtgcagattgcagatgaagctcaccaataggagcctgagtctggtaacacaacaggatcaggtagaacatcagaaatacctgttaaaagacgctggagatatgtcctgggattgagatgcagtgatccggaagggaaacagtgtccggacctcgcagctgatgagctgatgtgtgaacacacatcaagccgatgaagagcagtgcctctcatagtcaaggttgagtacttgagtgaaactgtgaaagccttgtctgcaaaagcaagaaaaaactagaagattattcaactcatgcagtgtgatatcttccgtctcccgaatgcgtgcagcaacgtactttacaaatatataactttctttgtacattgtgcttatgttcaattttgtttgcagagtatttatgttcaaggaaaaaaaaagagagtttttgtgttcagtttatctttcgacagcgtttatgttctgtcgacagtaatactgcagccatgaatgtttcacaattctcctcaggttttcgttcaagaattttgtttggatgtctatggttgccacattcttggttgcacaaatcatttgggtgtcaaatgccttattgccacatgcttgtggttcccaaactgtgtatggattctgcaagcatttctggaaagagagacaaactacaaacccaactatcctacaggctgcactaaattgcagataagcgcagataaaaatcaaactatgaatcataatactagccagcatcattttgagatcacatccaaaacttttctctccaatatgcggagataccatggcagtacagtaatcagtactcagtaggtacattgtttcagtagatcaggagccgcacctggatggctcgccggcccagaaggaatctgcgccggccactcgcgacacggcggagtgcacactgcgcctctgctccatccgccaaaccagagcgagccaggctgcccgacggaaggtggccggagaagccgcttctgggaggaaaccctccagggcagaccagagcaacggcatctccagcgagaatgacccccggaactggatcggaatcccttctccattctccctctgccaccaccacggcgacgcctcctcctgtaatcagcatgatagatgcattttttggtc

SEQ ID NO: 9491 - DNA, 8709 bp, Oryza sativa
  unsure (1)..(8709): unsure at all n locations
ggcggagttcagtgcaaggcgcggcccaagtagtggcgtggtccagggcggccgtgcaggtgctgtggccggcgagcagccgaagtctccatcagtgccctttagttttcttttgttcgccggggacgagagagggtgctgatgtggcatcctattacgtggatcccacgctaactcagccgccacgtcgtataaagccgaagtcaaaaccaccgaaagactcaaatcgaacggttttgtaaagttgaaggatgtcagttttgcggttgagggatgattttgtaatttgatgacaagttgagggaccttaggtgtacttttttcatttcctaatttatatactacctgaaaggctgaaatgaataggaaaaagtacaccgaaggtcccttaacttgtcatcgagttatgaaatcgttgtccaaccacaaaaccagatatataatatccctcaacttaaataaccgttcactctcttcatgtcagcgtggctatgtcatcacctctctctttccctcctctctctctctctctctcacttttctcctctttccccgccgcgccgtgcctccctcccggtgctcgctctcctcctcctccccttccgcgtcctcgccgctgccgcggggtcccacttctccccctgcggtctcccgcctcgcgggccgcctccgcctctccccgtccatggccgccgtcacgctcctcgcgctcggcaacggcgcgctcgacgtcacgggcgaacgatgcaggagggacggcgaacggcgcggcgatgagcgcgacagccccgacgacgaacgcggagatgaacgggcatcgacggccggcgacagacgacaaggcggcgacactggagaagggaggaggccggcggggcgacgaaggagaggagaaggtccggcggctggctcgcggccgctcgctcgcccgccaccgccgctctgctccaccgaccgcgcgcttgcctgccgccgacccgccgtcggcgcttcgctccgccggccgctcacccgctgcacgtgcgtgcccgctgccgcttcacttcactctgcgcctgacactcaccgacgccccgacccctccgtcctcggcgagctcgtgtacagcatccccggcgccaagaacgtcctcgagatgcccctcctcgcagctcaggcacgtacatgaactctcatgcgattatccatttaatcattgtgtttgttgctcataattgttagctaaataatgtaatcttgtgcagtttctgttgttgcgttgcatacagttggctgtgttagaatctggcagcagccggtcagtagtggatctagatcaatcgggcttctttctgttatgcatgtaacaaactctgtaattgaggagaataaatagaaaaccagaaaagcagcaaaggtattacgctgcgccaaaaactctgctcgttttctctgttcttcagttaaactgttcacgttcgacaaaaggttcagagattgtgagagtgagagtgagagttcgtgagttttgattcagtgtttctgtgttcctaacaataatcatctacgagttcttgttaatggcgatggtttaggtgactcaagtgcgatgggttcgtgctcggtctcgccatcaaccactgcatgttcaacggcgtcggcgtcatgcagttcgtcaactcggggtgtgccgctctccgtcccgccggcgctcgaccgcgccctgctccgcgcgcgcgaccccccgcaggtcgcgttcctgcaccacgagttcacgcagatcgacgacggtgatgacggcggctcgccggcgcagaacggcgccgagccgttcctgcacaggtcgttccggttcacgtccgagtcaatcgcccacgtcaaggcgctcgtctcggtcgacggcggcggcggcgggcgcgcgcccacggcgttcgaggcgctggggatggggcatgcgtggcggagcaagctcctcttcgcggtggacgggcggccgcagttcacgtcgcctcctccggcaaggagacgcgaggcccagccccgcgctcgcgggcactgccctccggccggcctgcccagaggagaaaagtgagagagagcgagagattgtagtaagggagaggaaagagggaggaaagagaggtgatgatatggcttactgacatgtggggcccacgtgggtcccacgctgactcagccgccacgttggataaaaccagggtcaaaaccatcaaatgacctaaaataaacggttttgtaagttgagggatgtcatatatcggaggacgatttcgtaactcgatgacaagttgagggaccttgggtgtactttttccaaatgaatactccctccatattttaatgtatgttaccgttgattttttgacaaacgtttgacctttcgtcttattcaaaaaatttatataattataatttattttattgtgacttgatttatcatcaaatgttctttaggcatgatataagtatttttatatttgcataaaaaatttgaataagacgagtgatcaaacgttggttataaagtcaaggcgtcatacattaagatacggagggagtatattgtttccgtaaaatggcacttcatggttattgataggaacaatcagctatctgaaaacagtggtatcatatcttactataaagttatcccccactaacttcttaagcttgatatgaagatgcctcatcatcattcactaacaagataccacaccatcatccactaattaacaagatgtcacatcatcatgcactaacactcatcacatttaaacatcatgcaaacatgctatatctttatagtttttataatttaagagcttttcaaatacaaacatgttaaattatcatccaacataattcatataatgtttcaatgtatatctttattatgttttatgatatcttatatatttatatagttcatcctcacttagttagtgcttaaatgattaatctatggtctaaattatctttttctttttttcctctaattaagttatatcacatcaattgtttttagtctttagatgattaatctacggtccaaactatctccctacttttttttccctccgtaaagtcataccagcttactttttacgtttgaatcaccattctacatactatttaaatttaaattatcataaatcacattaatttacttaatctgatgttatctagttatcttatacgttatttttttattattattatcatactaaatttccgcagcaatgtgcggggtttcacctagtttaataataaatataagtatatactacggcagctggccaacgtatgatgaccctacgctaatgatgcagcaatctgccacaagctgtttcaagtgctcaatggaaactcgaccatcaagctgcaaagtgcaaaattgctgcttcgttcctctttccatagcttacggatcggaccgtttctcaaaccatgcatgtgctaaataagagagagatataaatgcatgcacttaattaggacttcccaaacataaagatcacatatatatagacatcaattctaatgtttaatcaagtctatggagaaatactaccaaatgagccaaaacttcccatatataaattatttttttagtaaagtccatcaccgtccctaaacttgtaccgttgttttatctcagtccctacactcgcaaatcgaccgttcatcctcaaaattattcaactgtgtcatcacggtccttaaacttgcagatcactcgtttagatcctccaatatatatatgtatatatatatgtatatatgtatatatatatatatatgtatatatatatatatatatatatatatgtatatatatatatacacacacataccagctatgctgccgtgtacgtacataaccagccggctgctgaaattactatacaaccaagacgacgtggacgccgcggtgttcaaggctctcctgtacttcatgtacacgggcacgatgcccggggggccccgccgcgcaagacgacgacggggcgccggcggcggtcatggcgcagcagctgatcgcggcggccgatagattccacctcgacaggttggagacgatgaggttgaggcttctctgcgaggagttgtggactagctactaccggtgtctggcgacattaatctgcagcgtagccagcgactacgtctttgtaacgtcctgccttcccccaggccgggcccgcttacatttgatagctttcataggtcatagattgtcctcacagaccaacacatatcttttctgcacactttgtcctcactcgtgtgcactcgggaagaatttcccggtcggtcacccatcccaaattgcttcaggccaagcaacccatcccaaattgcttcaggccaagcatgcttaaccctggagttctttggagattggcttccggaaaaaaaattgcaacttgttgatataagtattctattaatcctattaagccctaggccgggatgttacaccctcccccttaagagagatcgacgcccccgtcgatcaaccctaggccaggaacgtcctctcttggccacgtccatgtgtccagtgccagcgcatgtgccatgctgtgtaaccactcccggtctacaccagccatgcgcaccatgcctgcgcaactgcgacacacgcgcccgtgaaaccgcgagagtcggctctgataccattttgtaacgtcctgccttcccccaggccgggcccgcttacatctgatagctttcataggtcatagactgccctcacagaccaacacatatcttttctgcacactttgtcctcactcgtgtgcacccgggaagaatttcccggtcggtcacccatcccaaattgcttcaggccaagcatgcttaaccctggagttctttggagattggcttccggaaaagaagttgcaacttgttgatataagtattctattaatcctattaagccctaggccgggatgttacagtcttccatggtttaaggacatgttttcaaagttttgtggtggtgccttttaatttaggcttttcgagtaacgggtgcagcttaattatgtaaagttatactaatatgtatgacgtcgttgattttttttaccaatatttaactattcgtcttatttaaatttttttttgcagatataagaatattttaacgtaggtgccacgtcagtcaaaaccgccatccaaatcgtcttgggacttattttgcatcgtttttgatagttgagggaccagttatatctggttttcgggttgaaggatgaaaatcagattggttgacgagttaaggggacctcagataagcttattccaagcaaaaaaaaaagctaagaggagagggcccacgcgcgatggataaaaccctctcacgtattggcgtatgtattttgttcgtgcgaaaaaaaaaaaagaagttcaaaactaatcgcgcgcagtgatcgtacaagcgatcgatcgctcattatatatccttttcgcgcatatatacatggcaccgtagaaaaggaaaggaaaacccaacacggaaaattaaggaaaacccacctcgcacgcgggtattccacaccgagtccgagttaattacgttctgccccgagcggcaacagtatttatatcgactgcaacacacgtcgtcgtatcacacgtaaacccggccgctgaaatacaaaccccaaaccaattcgagtgagttctccgacatgatgacccgtcgccaggatgcctactaccgctacccaaccacgtcgaccatcgtcgcgtcggcgccaatgcccaccggccaccacgtcctcaggatcgacggctactccctcaccaaggccaagttcgccgccggcgaagaatgcgacgagtcgtgcagcttcgtcgtcggcggccacgcctggcgcatcaggtactaccccaacggcgccgtcgtctccggctccggtggcttcgtatccctcatgctctcccttgatcatcagcccggcgccgcattgccggccgccgtcgtcaaggcgcggttcgcgttcagcttgctcgacatggacggcgagccggtgccgtcgcgcacctacgcgagcgacggcgtggtcagcttcagcgctaattcgtcgagcacgttcggggcggagaggttcatcggccacggcgagctcgaggcgtcggggcacctcaccggcgaccgcctcgccttccggtgcgatgtcaccgtcgtgaagcgcgacgggcctccgacgatgtcgaccctctgcccggtggagcacgacatgttcagatgcctgctcgacaccggggacgacgcggacgtcgcgttcagggccgccggcggcgagacgatcgccgcgcataggcgggtgctcgagcgacgggcaccggagctggccaagctctgtcgtcgtcgcggcggcgcctcctgcttcatgggactcgtcgggaggcacatcgacgtcggcgacatggacgccgctgcgttcaaggctctgcttcacttcgtgtacaccgacacgctgccggagacgatggccccgcgagaggtgccggccatggcgccgcagctgatcgcggcagcgcgtaaatacggcttggactgggagaggttgaggctcctctgtgaggacaaggcgtggggatggcgcgtcgacgacacgagcatggacacgacggcggcggctgctccggctaccggcgatgatccgaagcgtagccagcgacgtcttccatggtttataaggaaatgtttttaaagtttggagatgcgtagttctagcacagacagatactccctctatctagaaaataagtgctaccatgagtttctgtgcacaactttaatcgtccatcttatttaattttttagaaaaaaaaatctaaaaacataaatcatgcataaagttctattcatattttataatctaatataaaaaaatacttactaatcataaaaaaattttaaataagacgaacgattaaagttgtatacggaaacttatgattgtacttattttgaaacagagggagtatatgaaatactagtagaaaaatgtacctctacttacttacatagtcataaaataaatagtttatatcttctaaacaaaataaaagttcacttcagttttcagttcagactcaccttaagctctaaatgtaacgaaacggaaccaataaaattaagggactgtctactcctcgacagaaaacccctcctaatatcttgcaaatttttgttcattggattgatttgagattcgtgcaaaccccaccaaaccctaaccaccttttcctttttcctccctgccgccgcacaacgctcaagcgctcctcccctcctctcagcaccgcgcgcctccttcactgccgccgccgcctcactgttccgtcacccggcctcgccggctggccgaaaagtgtcaacgacgccggcgaggccccgnccgctggcccccttcccctcccctcctttgcctcaagccggcggcggtgcgctgtatgtcgtcttccccgtcgccggcggcggggcgccatcaccggctacctcctcctaccactctttcagctttgcccccgtcgcctcaaccggcccgccgcccgctcccgaccccgcggcttcgcgccgccgccgccgcctcgccacctgcccgatccgccgcccaccgccggactgccgcctcccacggccatccctctaaagccgacgaactcccctctcttccccctcccacccccaccccaccccgggatcctaattcgtcggccctctgccggagtttgggttcgccggcgccggagaagaagaggtggtcgccggagttggagaagaaaagcacgaatcgtgaagcacatccaatgatccaaaatttgcaagatttgagattgtgttttctgtggacataaatttagcatttccgtaaaattaatattgttttttattgtttttacattcaatatctctaattctattgtatgcatgttacatgtaaggttaatcaaaacgagaagatgataataaatatttttttatctttaattaaagggggtaatgctttatattttagaatggtgggagctaaggctacactttactgctataagatcggcgtcttctctccacacgttctatccataagtgtcgtggcgacgtatactcagcttctcttcctcgctcgaaagggtgtcgccatgcgcgcgttcgagagcttcaccggtcgtcacgacgaccgccgcctcgccttcatcaaggacggcgtcgagctgcgagccgggctgccaccagggccggctgggacagtaaggacggtgcgactgtactgagcctccaaaaattaggagcctcgaaaatatgtatactatgatatcaggcctgataggcttagaaaaaagacagaagaccaatcgacgatcgaacatatcgtgacggcttgattgtattttaaacttatttagtgtgaaattcgttaatgacaatgagtttttaaatattatcttgtaattttatggtaaatgtagaccttcattttttttccacaccgaaccactaaagagtcagtgccggccctggccaccgccgccacccgtcggcgaccctgagtccggcggcctgcgccgccgcttgctctccttgctggacgggacggacgtcaccttcagggtcggcggcgaggcgttcgccgcgcatagctccgtggtcgccgcgtggtcgccggtgctcagcccccctccccc

SEQ ID NO: 9492 - DNA, 9379 bp, Oryza sativa
cgagggaggcaaaatagacttttgcggagaaatttgattggaaggatttggattcggaattgaactcgacgatagatcagggattgagatcttgagatggcacggacactagacaacaagcaaagaaacaaatttcgcaattagggtttttaagagataattttcccgctaggcgccacgacggaacgggcgctacagaccaacccccctaacaagaatctcgaccccgagattcagcacctaagggagcaggtccgggaactcggcgcggagaagatcttctcgctcccaggttgcctcgtcttcggaatgattgctccattggactttgtagaacttgatggtcttccttcgagtctgacgttctgcctcttcaagaaccttgatcggtctttccttgtaggtcagattcttttccagctcgatattacccaggggaacttgctcttctggaactcaaagacatttctttaactgggatacgtggaacacgttgtgcacgtctgcgagaccttcaggtagctcaagctgataagccacttcgccacgtctggcggttatgaggtaggggccgatgtagcggggtgctaacttgccggacatcccaaaccttctcataccacggaggggtgatacccgcaggtacacatgatctccttcttcgaactcaaggtcacgcctccgattgtcagcgtaattcttctgacggttctgtgctgtcttcaaacgttctcgtatcagcttaacttgttcttctgctgacttgagtatgtcaggaccgaataccagtgctttgcccacctcattccagcacaagggggtgcggcactttcttccgaacattgcctcattcggcgacatctgaatgctggcctgataactgttgttgtatgagaactcggcatacggcaaacaacgatcccaagtgccttcgaaatccaaggcacacgcacgtagcatgtcttctaggatttggtttaccctttcggtctgaccatcggtctgcggatggtaggctgtactaaaattcagatcagttccgagggcttcatgcaactgcttccagaaccttgaggtgaactgagtgcctcggtctgacacaattttcttgggacagccaaatctacatacgacatgggtcatgtagagttctgctagtttctttccatcataggaggttttcactggcacgaaatgagctgatttcgtgagtcggtccacgattacccaaatggagtcgtacccgttgggggttcttggcaaaccggtgatgaaatccattccgatctcttcccatttccactcgggaatcggtaggggttgcagcagaccagctagcctctgatgttccgccttgactctttggcaaatgtcacacagggctacgtattctgcgacgtctcgcttcattctagcccaccagaagtatgccttgatatcttggtacatcttcgtacttcctgggtgaatggagtaggcggactcatgagcttcctttaggatgagatctcttaactccttcttggccggtacacagatgtgtggtccgcaccaaactgtgccttgatcgtctatggagaaatttgtgtctttcttctcctgtattctttttattaattcttttatcccttcgtcgtctttttgagcctcccggatttgcgactctagggtaggctgtactgtcaagctggcagggacacctgactgtaccacggtcagtcttaacttctccaattctctgcacaggtgatcttggtcaggccgtatttgagctacattgcaataggccttgcgacttagcgcatcagcgaccacgttggctttaccaggatgatagtggattccaagatcgtaatccttgattagttccaaccatcttctctgtctcatatttaactcggtctgggtgaagatatacttaagacttttgtgatcggtgtatacttcacatctgttcccgattaaatagtgcctccagatcttaagagcatgaaccacggctgccaactcgagatcatgggtgggataattggcttcatgaggcctgagctgcctggatgcataggccacaaccttttgttcttgcattaggacacatcctaagccttgtcttgatgcgtcacagaagatctcaaaatcttttcggatatctggcaaggtgagaactggggcagtggtcaaccttttcttcaattcttggaagctgtcttcacaggctgcagaccattgaaatttcttttccttctttaacagctcggtcataggtctggctagcttagagaatccttcaatgaatcttcgataatatccagctaagccaaggaagctgcggatctctgacacgttcttgggcgggttccaagcaagtacagcttcaaccttgctgggatctacttcgacaccgttggaggaaatcacgtgtccaagaaatgctactcggtccaaccagaattcgcatttcgagaatttagcgaatagttgatgatctctaagcttttccattatcagcctcaggtgttcagcatgttcttcctcgttcttggagtataccaggatgtcatcgatgaacaccacgacaaactggtctaggtattccatgaagattttgttcattaagttcatgaagaatgctggagcattggtgagtccgaaggacataactgtgaactcatatagaccataacgcgttgagaaagcggtcttcgggatatcttcagatctgattttcagttggtggtaacctgacctcaagtcaatttttgagaaaactcttgctcctttaagttgatcgaataaatcgtcaatccgtggcaacgggtacttgttctttatagttacttcattcagggctctatagtcgattaccattctctccgagccatcctttttcttaaccagaagcactggggctccccaaggggatgagctaggtcgcacataacctttactttccagttcttcgatttgtcttttaacttctgctaactcattagcggccattcggtagggtctttttgcaattggagctgtgcctggtgccagttctatggcgaactcgatctctcggtctggtggcattcttgttaattcttccggaaatacgtcgggatattcacagactatgggcaccgactccaaggaggtgacttgtaaacaggttaggatagaccgacttgcggtaggggtgttaggggtaaagcggacttgctttcctccaggtccttgcaaggtgatggacctttcggcacaatctatctgtcctttgtgcttagccaaccaatccatccctagaatgatgtccaagctttgcgagtctaggactatcggtttggctaggaagtcaacttcctcaattctaaggttaacttccaggcatatttgagttgcccttatattccttccaggggaatgtactatcattggtacacgcaaattttgggttttccaaccatttcttttcacaaaagcttgcgatatgaaagaatgggaagctcccgaatcgaacagaactattgcgggtacggagttgacagagaacatacccatcacaacgtctggagcatcctgagcggtttctgcttgaatgtgattcacacggcctcgaccaaagttgttggaagcacgtgaaccttgtccacttgcctgagagctaggacgagactgagctgccgctggagtaggagttctggcagtgctaccattagcatgccctgagttggtgttggtaggattctgaggacactgtctagcatagtgacccatctggttgcaccggaaacactgaactgctgacggtccctgcggtgacttgaaagaggtaacactgttaggcgcagtatcgctactaggggcacgctgctgtggctgaggtgccggacggtttatctgaggacgaggggcgtagcctggctggcggttagcctgggtgaccgactggtggtattgcatgggttgaccgtagcgagggcgaggtgcgcctcgggaagaatttccctgatggttagacttgcgtttcttgtattcttcggtagcctcttttctggcatcctcaagtagaagtgccttgttgatcatatgttgaaaagtggggaagtcatgagcaagcaactggagtctcattccaactgcgattcctgatcttcttcttatctgtgtctacttcctcaggggcgtaccgagccaacttgttgaactgacttaggtactcattgacactgctgttgccttgcttaagtctgttgaattcttctttcttcatgtcaatagtgctttcaggcacatgagctgcacggaaagccgtagcgaactcatcccaagcaatgttagtgggttcagggtgtgcattgcagtaattctcccatcaatctgcggcaggtcctcttagttggtgagaggcgtagagcgtcttctcaacaggtgtacactgcactaagttgagttttctatcaacatctttcaaccaatcgtcagcctcgacgggctcgacggtctgagagaactctggcggacgagacctcagaaagtctgccagcttggatctgttgttgcccatgtgagggtggccatttccatgcgcattatgctgaaaactggctatggctgtggttagtccttgcaagatttgtgtctgaactgccattaagtgttgcatgttggtttccacatgaggtggggaagggaggcgttcttctccagaattgtgactggcagtgcggtgagagcggtgagactgttccatctctgcatcacgggaaactgtgcgatgcgagcggctgctgcggcggggttgctcaacctctgcgttgcgggaaacagtacgatgcgaacggttgctgtggtgagactgctcattagctgattcatgattttcttctggctcaactctaccatccttaaaaccaaagcgggctggtgcacgagctgcacggcggggacggctagccatctaaactcccagaagagggcggggtaagagtcagataagcacttaggagggcaaggagcaaagcaaatagcaactcatatagcacacactaggcataaactggatttttcaaatcataaaaacacctgatacaacgggtgtggacaagtcacagagctacgccgagcttgactgtgcgcacaccacctaggagaaccagactaccaaacaacacccacaacaaacacacgcacgcactacctggccacgactccaaaagagttggcggcggaacaaaaaggcctatcacacggacggctgctgaagactgcctcctctactcctcgtcggcctggctgcctcctgtagtcggctcctcagtcgaagaaacgtcgatcggctgacgcgaagggactggcggaacctgtcgagggccggcagcagcacgggccgctggcggtgggggagctgggtagtggaaacggaacacggtggaagaaccaacaacacgcttccgcgcggtgcggataaagcgtgggccacggcgggaggaagcaactggggtgtgtccgggggtgtaggaagggctaactgggtgtgggtagggggagtacactggtgagtacggcgcacgcgagctgggggagcgcgggccactgggagtgcgggcagagccgcgggagctgtgggaggacaggtggctggcgtggcagaggcggcctgagtcccaagagatagtgtcaactgaggtgacaccctcctcggccagacgggcctccaaagcggcgtagcggcgggcaagggagcggtaagcctcaaggagtaggtcgtgctgagtggcctgagcctccgaaagctcgaccacgcgagtcagcactggctgagactcgctgtacggacaagggtacctggcgtctgagtggccagagggaaggcgtggaagctgccggaaggcggaacctccgagacggtggctgtagtcgtgggccaggcgacgaagcgcagtccaggagaggtcctggtacgcgatctggagagtgggcctggccacagtgaagtggtgggggcgaaggccagctccgtgtatacctccacgggggtaaaggtacaccgagagctcacagtgagggggaacacggtccacggagtaccccgtgtactcgggacacgagaagccaaggaaacgggagaggtcacgaagctgagcgacgtggtgaccctcaccaaaaccgtgggaactgaagctggcgttcactgccatttacaattttgaaagagggagaaagatcagtaaccgttttagaaacaaactattgaaaataaagaaaacaaaagaaaccttagcttttcgcaagtagttttgaacttagtatccttagggtcgtcctaagcgtcgggtttcgccctagggccaagcctgtgctctgataccatctcttgtcacgccccgaactagtcccgaccggaactagcccgtgacgctccaaattaacctgttaatcgataccagtcccaggaaacagtgctggtatcacagggagacagagtatcacagcaacagaggtctctttattatagagtagaagtacagtcatgttgggctgcggacagatcccgagctcacaactgcattacaaaaggaaagcggaagccaggacttggaccaatcatcacaggcgcgacttgggaactaggccgaaaccctaaaactcatcgtagccgacttgctcctggaagaactcctcgtcagcaggatccacttcatcttcttcagcaactggggggggttatttatatagagcaagggtgagtacgggagtactcagcaagccaggggaaataagtgtttaatgcaggcttcaaggaaaggctgttgttttcgtaattgattttgtttgaactcttttctaaaaagtctaagtgagtgcttctcaaacgacacggatgagacagtgcgtctcgtccggtcggagtatgtgcaatgcatcaatctttagaattgaaacaagattggcacccggccaacagcttttcaaacggccacccgggccaacaacttttcaaacggccacccgggccaacaacttttcaaacggccacccgggcctagctgatcccgtcagctgctgatttttcaaacatcgaatccccttttcacaacagcaatttcacaagcagtagtcaaacaaaactacgctaggaatcacctcacatccgcccatgaccgtgggcacggctgttcgagcagtttgttaacctctgcagagggggtacactttacccacacgacattactaacccggatcacccagcccgtggggatcagccacgtcgggagacctccaagctttcatgacaaggcatttcgaaagccgatacaggtttaccatatgccgacgagaggggtcccagaccaacaacaggttaggtcccagaccatactgtgccaggaagcccaggggtcctccccgacaccaccccggcgaatccacatgtctctcggcatcaaggctcccctgataagctagttactcagccaggggtgtcccattccacccatgtggtcgtacttgtcttatgtttggatgaaattccaagggaatcggtccttaagtgcgagagcgggaaaccgtacacccggtacgttccccggtccgcggttttggaaattcatttagttcgcaagcaccgacccaggtgtcgggttttccaagtcttttgtaaaactccagttttacccaagttgttactcagattttaagtttgaaggcgaccgtcgatactcgcacagagcgcacgaatatcgaggcgcaactgggtggttacaaggggacatggtataacaattaaccaaggaatgatcaaatgtaacaaattaggtaggtctgccaatctgccttgcagacgggacaacagattaagtgtgatcctatcaatgcataatatttcgcaagcaatataattaaatttcaaatataggctcaagatgttcaaaggtggcttgccttgctcgagatccggagcttgatcctcgaaatcctcgcactgcgggtcttcgggctccgaaactacacgcgaaacgggacaactcaacaaacggcgaaaataaagccctattaatgacctctaagcgcaccattagatagatctcgagatttgaggaattttggaagttgaacggagtcaatcggatttacggttgggaagatattgaatttctaagattattggatttttggtctaaaggaaaaaggatttatttaaatcctttttggaaaagaaaaagaaaagaagggagggagggaatatagacttttctcggacggctagggcgcggcccaagagaaatggagcggtctggccgagctaaatgggccggccggcccaaggcggcccaaactcgcgcgcgcgcgggagggaggagaaagagagccggtggaccgggctcaccacgcgcggtcccgggtgggacccgcttgtcagcggctcggctcaccgtgcggagggagcacgcgacgcacgcgcgcgggcggggaaggggcgcggtgcatgcgcgcggtccgcggtggacgcaggtgccgcggacccacgcgcagcctcaaggctcgcggtggaacgcgcgcacggggagggactgaccggggtcggctcgatccggtctaggctgagctggcgccgacgtggcgcctacgtggctgccacgcgggccggcgggaggtagacgacgacccggccgcgaatggacggcgggcggcggcggcgagcggcggagcgaaccacggtgatacgggcaaaagcgtgcacaccgggcggttgcacgtgacaaggggagacgagccaacggctcggattcgccggaggttgcttgacggcggcggattgtggcggcggcaaccggcggcgggagaagagggaaacggcgacgaggtcacgagaggtcgattcccggcgatgagagcatctacgcggcgtcgggaactcgacgctagcgtcggattggacggaactacgccgagcgaggccggcgacgagcgggtgctacggagctcgggcggcgacggcggcgagcacacggcgagcgacggcaacggtcggggcggcgccggctagctacggggaggctactcgtgctaccaccgaaaactaagggggggagatggagcgaggaggaagaacggagagaggcactaccgtgcggatcggggcgctgtgacgagaggccgacggcgcgggagtaatctctccggcctcgggccggggaagaggaaggagagggcgcggccggagtcctcttccacgtccttgctcgtgccggctcctccgacacgcgcaacgacgatcggcgacggcgaaacagagggcggcaatggcgcggaggcgaaaatgagggagtttggagggggagggcttgggcttaaatggacggcaatgtcggtttgggagaggggaaccgac

SEQ ID NO: 9493 - DNA, 3131 bp, Oryza sativa
gggcattatacttttgcaacttgttacagcacaagaaccaaaggatttgagaaagaatgggctcatcaaactaggagatattatacgattccaaggaaagagcatggagcagcaacatgaggtcctaaaaagcattgtggatcctgacctgaagaaatgccagttagatgacgccgcagagatgctgttcctgggattgaaatgcagtgatccaaatgagaaacatcgtccagacctcgcagctgatgtgtggccactcatcgaggaaatgaagagcagtgcctctcatcgtcagggttgagtgaagctgaggaagctctatctcttgaagcaagaagaataaactacaagattactcaacttgtgtggtgtgaaatctcccctctcctgaaatttgtgtggcaagcaaagtgctccacggatatgaaactttctttgtgtattgtgtttatgttgagttttgcaaagttgagtttatgttcagttcacaatagtcaagcctgaattcaataatttagtctgagatgtttgtggtttccacattcttgaggaaacaaattatttgggtgccaaacgctctggctgccattgtggctacccctacccatcatggcctgtccatttttgcaagcatttctgcagtgcaagatgcagaggccgggatgtttattattccattatctaaaaaaaaccatttctggcaaggtatacaaattaactacaaacccaactacatcctactcaggcattgtttagttcacaaaacaaaattttttcacccatcacatcgaatgtttggacacatgtatagagtattaaatgtggacaaaataaaaaaaccaattacacaatttgcgtgtaaattgcaagacaaatcttttaagcctaattgcgccatgatttgacaatgtggtgctacagtaaacatttgctaatgacgggttaattaggcttaataaattcgtctcgcagtttcctggtgaaatctgtaatttgttttgttattagactacgtttaataattcaaatgtctatccgtatatccgatgtgacaactaaacccaaaatttttccccaactaaacaaggcctcaaagaggacaaatccaaactgcatgattttcgtactatcctagagtaaattacagatagccgcaaatcaaaataacaattaattgtactagcctacatgatttaccccccttttcttttcgtctcatcgagagaagccagatccaaacaagcgtcaatagcatggcagtgaattaattaatggaggaaaattagtagggttttgggtacacctgggaatgtggccttccgatccttccgctagtccactgctaggttgcccccgccgacgaggagatggccggagaccagagttggccggagacggggagggaaagccttctgggagggaaagtcggaaaccccggtggcatgatagcgccggccggagcaacggaagctccaggagagtgatgcccgggagtagaacggaatcactcctctccaccgtctcctccgcatcgccgcccgtcggtcgccgccgccgccgcggcggccgcctcaccggcagaggcacattgctgcgagcccagcgatgaaggcggcggcagaaggcccacgttgccgggccaactcaggcccatatattgattggatgggcccacgcatattcgtcggctgcactctcataggccttaattacggcccgtgattggaagaccataaatttcctaaggaaaaagtacacccgaggtccctcaacttgtcatcgaattacaaaatcatctcccaaccgcaaaaccagatatatgacatcctcaacttataaaaccattcactttacgtccttcggtggttttgacccaattttatccgacgtggcggctgagtctgggactcacatgggccccacatgtcatgatgccacgtcagcatcttctctcgctttcccctcctctccctttctcatctctctctctctcactttctcctcttagggagcacggccggccggcaggggaggagcgcgacgggcgcgcgacggccagcgagggaggagcgcggctgagaggagggttggcgcgatgggtggcggtcggcgacgcggagcacgacgacgacttggggccgccgctcgcttgctcctgggggctggaagagtagcacgcagccacgcactcagagtggaagcggtgggtgtccggcgacgtcccgaggcgggcgaggacggcggtggcttgcctcccgctcctctccccgccgatctccctcgccggcccgcgggtgcgcgcggagaggaagaagggcagcggccggccggcagaatagccggtgaacccatccttccctccatttctttgctagcttccgccattgtctcttggattttatttgctcatctggtgcttctggccctttccgtttctgcagctcacagcctcacacccgctcaaattcttcacaatctgtaagtgtgtgtgtgtgtaaattcttgcaaattagaagctgaattgctgctaatagcctgcatcgactcgtaaatttatgtttttttgttggaacagatgggctgtggctagtggccgcagtacagctatgggggatgccatcctgctgcagaccaaccacattcgacgttaacaaggtgccaaccatgcggggacctagtgcaccggcggcgcggcgcactgaggacgacgaggggcggcggcggcacgcggcgcgcggtgaaggccggccgtgcgtcggcggggtgcggcgcacggcgtgacggcagccgacggcggggcgcggtggcggctaggcggcggccgcgacgcggacacgcggcggcggcgcggctaggacacgggctcgtggtggctggcgtgcggcgggccggcggctcacggcgccacgccatgcggggcggcgtgggggcggtcaagcgggcatggcgcggtgctgcgagcacgccgcggacggcgaatgcggtgcagcgggctagcacggcgcggtgcggcgacgccggtggccgggtgggtgcgggatacggctgagcggcggctcggcgcgggatgcggccgagcggccatggctgctcgctgctccgcccttttccttttttttttctttcttcat

SEQ ID NO: 9494 - DNA, 2000 bp, Oryza sativa
aggtaagattagggttcgtttgatccgtgcggatcttgtgcttttctttctttggatttctttccccgaaacgatctaaacactagggttgctctgataccattgttaaactttgcgctagaatcacccaggttagatctagtcgggtggttctatttggatttgatgtatgacattgtagatgaaagggagagggtttagataccgaccggttgaggagttcgtggaggaagaggcgtgtcacgccccgaactagtcccgaccggaactagcccgtgacgctccaaattaacctgttaatcgataccagtcccaggaaacagtgctggtatcacagggagacagagtatcacagcaacagaggtctctttattatagagtagaagtacagtcatgttgggctgcggacagatcccgagctcacaactgcattacaaaaggaaagcggaagcgaggacttggaccaatcatcacaggcgcgacttgggaactagggcgaaaccctaaaactcatcgtagccgacttgctcctggaagaactcctcgtcagcaggatccacttcatcttcttcagcaactgggggggttatttatatagagcaagggtgagtacgggagtactcagcaagccaggggaaataagtgtttaatgcaggcttcaaggaaaggctgttgttttcgtaattgattttgtttgaactcttttctaaaaagtctaagtgagtgcttctcaaacgacacggatgagacagtgcgtctcgtccggtcggagtatgtgcaatgcatcaatctttagaattgaaacaagattggcacccggccaacagcttttcaaacggccacccgggccaacaacttttcaaacggccacccgggcctagctgatcccgtcagctgctgatttttcaaacatcgaatccccttttcacaacagcaatttcacaagcagtagtcaaacaaaactacgctaggaatcacctcacatccgcccatgaccgtgggcacggctgttcgagcagtttgttaacctctgcagagggggtacactttacccacacgacattactaacccggatcacccagcccgtggggatcagccacgtcgggagacctccaagctttcatgacaaggcatttcgaaagccgatacaggtttaccatatgccgacgagaggggtcccagaccaacaacaggttaggtcccagaccatactgtgccaggaagcccagggatcctccccgacaccaccccggcgaatccacatgtctctcggcatcaaggctcccctgataagctagttactcagccaggggtgtcccattccacccatgtggtcgtacttgtcttatgtttggatgaaattccaagggaatcggtccttaagtgcgagagcgggaaaccgtacacctggtacgttccccggtccgcggttttggaaattcatttagttcgcaagcaccgacccaggtgtcgggttttccaagtcttttgtaaaactccagttttacccaagttgttactcagattttaagtttgaaggcgaccgtcgatactcgcacagagcgcacgaatatcgaggcgcaactggtccttgctcgtgccggctcctccgacacgcgcaacgacgatcggcgacggcgaaacagagggcggcaatggcgcggaggcgaaaatgagggagtttggagggggagggcttgggcttaaatggacggcaatgtcggtttgggagaggggaaccgacattggacggttaaggcgcgagctggcgctcggcgcttgcagccaaagcggcggcaggaggatgacgccggcgggggaaaaaggggaaaaaaaggagggggagaaaggggcttgcccttttgccgattcgggaaaaaggaggaggggagcgggggcgacgcggcagagggaggaggggcgctgcctccgtcccttggcggcttgcgcgcggaggggcgggggccgggcgatgacgacggcgatgacggcggggcgg

SEQ ID NO: 9495 - DNA, 2751 bp, Oryza sativa
ccagcagtggaagctggaggtcaccacactgcaccatggagagttccttaagtgtgcgggggagtagtacattatcatcgttttccctcactctcaaccggtaacacttaccaatatgaaattctgcaagattatccatttctgaaaataacaaaggagctcggatcaacttttcacaatcaacaatccttaggatacgaagacttcggatatggtgctcctgcagtagaaagctttcctccagagaaattaaatttgagcagttgctgatgataactgagattagcttggtttccttgctttcaaaatccatgttgttaacatgatggtcatatatccttggaagggtggtcaatccaacatcatttacttctaaccgtgtcaaacttgaaggtagaagtggcagttcccctaattttttgcaaccttccaccactagagttttcagatttgggggcagggaattgcctgatgattggtcgatccgtttcaattctgcaagtttgtgcaattcaagatgcttgagccgctgtaaatttccaagagctgggaggtatgcccaacttctacattttctcagctctagtgacaccatatttatcaggcatggatggcttagccaagttggaaatcgaagaccattataccctgatatttccagattttcaagatgagaatgtggctcaatacattagtagtctcagaccagtttaaggacaacgatctaagatatgatttatctcttagcttagcctcaataatctcttcatgggtcccaacattctcaaagttgcaaatctgtagcttgcaaatactgcttaaattcctcagtgaacttattctgtaaccttccttcagttgaatctcaaaattgtgcaattcttgaagtgaagttaatctgccaacaaaaaattcaccaaaaccgttactgccatatgatacataccgcagatgagaaaggttttcgatattattcacttgtttcggtgctgtacttattcttttcactgcagtaagcacttgcaaatgatagagtttagagattccatctatatcctgcatcccagagaaagagatataacgaaggtgcttattaacaacttcttttgccaaacataacttggttatcccttttaagctcaataaccgcaatcctcttagaagctgtacaacttcctccaatgcagctatccaaacatcgttgacatgataggagtcttcaatgataagtgaacgcaaattctcaaagctggaaattgccttaatctcctcggttgttaacttgttgaagtttgcaatccataaatgtctaactgtacacttgtgctgcatatagccactagattcaagtcttagacattcaccaacagaaacactgcatgccaattcatgtactaaatcatgcatcacataatattctgcgtagaatttgctacaaggatctcccactgtcgcaaaagtaaagaatgattttcttgccaattgcaccaagtatctttctccgatgtcttctggcctttctgttccactatcaattaggatcaatcctgaatccatccacattttcactatttcgtccttcttaaattcataaccttttggaaatatactgcagtatctaaagcaaagctgtaaatgttcaggtagatggtagtagctcgactgaagaactgttgtttttttttttttgacgcaactgaagaactggtgtgataatggcactcgtttttccttctaagttttccaactgcctgtataaattattccaatgatgatgacttacattgctcctgagatgctcgcttgcaatctttgtcaccaagggacacccttgaaacttctttgctatgttttcagcaagtggcaggagatgttcataatcttcagttttcataccataaaaggcatacttcttgaacatcataaaattgtgatattcgtctaatccatttaggttcatataatcattattacttcgcatcacacttgtaaccatatctgctacagatgtcattcgagttgtcaacaggattctacttccgttatggggtctgttctggaaaggagccattaatttttgccattcaccccaattgctgtcttcccaaacatcatccaatatgagcaaaaacttctttgattcgagattctctttgagaatgtgttgcaatgcttccaaagtattagcattaggcttctgttttgtaagtgcctccaagatgttttttgttatccttgctgcattgaaagaattatcagacacatatacccacacaatacaatcaaagtatgttaaatctcttaaattcttcgcacacaatctgagcaagagtagtctttcctataccccccattccaattattgcagaaacagggactcggttgattccaggagtgttcgaatctccctctatattgtcaaccaaccacctcataacctcgttcttctctgtgtcacggccaaagatctcagtggccaccaaagtggagctagtctcttgattaatcttttcagcatgatctggcaagagagcactaccaaaacggcttgttagatgaaggaatgtaccaacaccagcagcagtttcatccaacctcgtgagagccaacctaagattctttaccatgttcccctcagaagtatacttagcaacctcaagtttgaaattttttacgaacaacattttgtttgaaattttttgcgactgaattacacacctcaagttctaggttgtggactccagcctcttc

SEQ ID NO: 9496 - DNA, 1786 bp, Oryza sativa
catcagtaaggtgtattcactggatctggatccgctgtctttttacaaagactttaataagcgggggctgcgcttatatattgatgaaacgagaatcaccacatattccttgaccagcgtgataatcttggagacgtgggaggtactcacttacttcgaatcaaactggacacgattactagccatgtgcaagtttgtgaattgcagaaacagatgcctgaaatttgtcctgaatatgctatttagattccattacatgcttaacttggtgaaaagatttgatatttcgtgtctgcaacagtgtcccaccatgttcatgcgatcatttggattctgctcaaccatgtttaagtgggaaatgactccttttattaaaggaaggaatccaaatgaaagtgtaaaggcaagagtcattcaagcactccgctccatggacctcgagggccatcctctgtcaaaagacctcccctcgccgcgtctcagtgtgagagctgagcgttattggttggcatccgttgcagatgtaccaagatgctcccgtgttattctggtctggcacattgcaacatgcctatgcgagatcaagtttgccaatgacagttttactggttgctgcttaaaatggatgtcgatgttaccatcaactgaggtggatgagaccgatgatgagctcgacaagtcatacgcggtgacatattacttgtcacgttactgtatgcacctgctggtctcaaagcgcaaactgctacccgaagacattttggtgtccaagaagaccctccaagacactgttcagtgtgctcgtgagatgctgaaaggctgcaactcgtttcagagcgtgtacgacaagcttatggaagaaccgcagaaagctcttgttccagacgctcatgacatgaatctgagtggaaacatattgcaacaaggtgctataatggccaatgcactcatcgtcaacgaggaggatgaggcatgtcgctgggagatcctagctgaggtgtgggctcacttgattgtgcacattgctcccagttccagaatagaagctcatgccgagaacctcaagtctggtagcgagttcataaccgtcatctgggctttgttttcccactgtggcatcgagaagagcgaattatggcagtagcagaaaaagggtgcagagtctgggaacagcacttttctggattggctaaccagagcagtgatgtagcagatacccatgttcaggaggctggtcctgattctggcatgtcctgaaacctgaattgctgatggctgatgctcttctcccctcgtgttttcagttttcaataatgggtgtgtttcacgccaaaattagaagtttggttgaaattggaaagatgtgacggaaaagttgaaagtttgtgtgtgtaggaaagttttgatgtaatggaaaaattgaaagtttgaagaaaaagtttggaactaaactcggccaaaatctgcatctcatcaaaccgattcctattggctgtagctctttttgagtaaaggctgggatgttatattccattatcttaaaaaaaatcaaaccaagatcatgttcttcttccaggaagaagaccacatcataaaatgataaaatactggcaaagacatcatgaaatgcattatgcatgtgaagatgtgcttccaggaaaaagaccacattagctctttcctcttcatcttttattatcgagataatccattaaatactatcgacaagtgtctaagtcccagaaataccatcgataagtgtgagttccaagaaatgccatcgtac

SEQ ID NO: 9497 - DNA, 10568 bp, Oryza sativa
tttggaactcacacttgtcgatagcatttctaggaattagacgcttgccaatggcattttatggattatctctctattatcagcaagcagttagcatgtactattatgttaaaggacttggattcaaaggctatattcaatgactcttcagccttcagatcatatgattatactattataaatgccttcaatcagtctagtgtgaatttggtagcgtgtacttcagaatatatatagctattgcagcaagttgatgggggactatgaattatgtaatgcctgttgatgtcagaccactccaaatgctgatcatccaacttgtttagcttcaacatcatatcatattagtcaaaagattaaaaaaaatagcaagttgatcatatcaggaccaaagaatcacaagttttttcctcaaatgtgttgcaccttccatccaacactccaccagcctattttgtagcttactgctaaaacaaggccgcagcattgagccattaaccaactactgtgtacaacctgaagaatgcctctactacctcccatcctaattcctaaaatacatttgttttttcttttccgaacaaaaacacttttaacatttaaaagacaaattaacagaaaagaaaatgatctacattcccctcatcaaacgaggggtgattggcaacaagataaagagaaatttgaatgaacacgggcggccgatcagtgacagtctgacagacaattcagagtgaacaacattctgcgtgcgtgcagttgtagcagctcaggtaaaagagagtgcggttgggtccccaactccccatccaccgtccgatcaatcttgcatggcacagatcgtgtccacaaaaataaagtagtattttttttctcgaacgcgcagtagggttgtacatcaatatattggaaaaaaagaatatttgttagacaacgcaatttgctagaccgacttatgcagcgggaaggggcagagcccactactctcccaataaaaccccaaaattagtaatgccagctaacgaccataaatggctctctgaaaggatagactgtaggacctccgagaccgaagataacgcagagtctagagtcaaaaaccttggagttccgttccttccacaattgccatgagaccaggagaatcagagaattgaagccggcatggtgatgctcagaccaagtatgtcctagacgatggccaccaatcttagaggcaactacaacggggaggagaaaataaagtagtactatccaagtgaaaattttgataacaagcccttgagttgcttatatttacagaaacaaaggaccaaagtgaaaatattcaccgccgccgttgttctggctgtgggtgtgcctccggcctccccggaggaggagatgggccgtcgggcggcggaggagcgtcggcggcggagaaccatggcgtcgcggctgccccgtccctgagatcaccggtacgcctcctgccctgacccacaattttactctcttgtcgtgggggtgcattaacatgtcatgtctcttgcacgctgtatgttcgacggaagtcctgaaccaaaaacttctttgcttgtgttatgtggcactagttgctgagcaggtgaggtgagcttcatgccctcagagttcaaatgctgtccatgtgtgcccactggtcccggaggaggaggagattagccgccgagcagcggcggcggagacgcatggagtcgcggctacccgtccctgagaatgagatcactggtgcggcttctaccctgatcctccattttactcttttgtcttgggggtcgtatctgtgtgtcatgtctcttgcacgttgtatgttcgacggaaatcctgaaccaagaacttctcgattgcttgtgtccagtctgtgtagatatagtttggttcgcaattgagcttcacacccaccgagtccagatgctttccatttgtgcccaatggtcagcatgtagtggcgcagttggtgagcctgataagaactaatacacttcaagagtatttcataggataactaactaaaggaaagacaaatcagttccatgtagcagcaaagcttgtccttgtcctgcaccgagcatattctgccctttgacagttggttaatcaaatgctatgttttctgtggtctatttgtaaaacaagtttttgagaagggctagaaatgtaaaaacttcagttgaaaagttttagtcttataaaactaaaaacgtaaacttcaatgctactactggaccgatttcatttctcaagagccattttcatgaaactgcaccttgattgtttagatgttaaggacaatttgcaagcggtaggttggcgtgttgactctgagttagtcaggacaacaaaaccaacaaggcaacaagacattccctgttcagttgttcctttaatcccatcatctacttcgctctatcaatccgaggctgcaaacaagaagctagctgtatcttttctctgaaatctgatggagaaggcggcggcagcgatggtggtagcggcagcggcgacggcggtggcggttgcgcatacccttgtattttggctcaaccgcaactcacaggttgctttcctaagtccctacctcctcaagagtcaagaccttgtaaaagttcaaaccgtgatacaaattaggaatgcttagctatgattaatcgcaggctgaaaggattctttcactggaggcagacctcaaccggcaatctgagaatacagtaagctcttacggacaaattatcactacttttatatttttattacagttcatctagttaacgtatcttccggttcatcaaagcaactctattatgggtttttagcttcaaatagttgtttttgacaagttagtgtgcgtgaaactaatgcaaatgttacccctcctctgttgaacgcctgataattttaccaagatatttacatgttactttgtcaaaaagaaaaattgcagattcaaactagtaaaaactcatgataaggtcttctatttattgcagctcaaagaaaaagaagagcatgagaaaacgagaactgagcttgaagtaaaggagaagcaacttgaagaagagagacaaaaccacacattgactgtccaaagacatggtgaagaactcgaaaggcagagcagagaattggaaagacagcgcgaagaactagaaagacagggcagagaactcaaaatgaaggacggaaaactcaataggatgaaaaccttgacaatagtttatgagaaattccgtcaatggattgagggtgaagcttcaaactccagtagtggcttcactgagttcagtcactcagaggtagacgattcaatcccaaaggaccaaaaatatcatctcgggaaaggcagttatggcatcgtttacaaggcagaacctcggggcaagactgttgctatgaagattcttgataagagtagctggcaaggagagcgggagttcaagcaagaggtgagtagccccagaaaaggtcaaatactttgtgagttagtattctatcattactactttgtgaactggaagtgggagggagtataggagaaagggcagacagagattattgggacttctttgactcatcaatttattcttgcttcatggtaatagcactaacctcattgtacagaggattctaccaaatacgggtaagatcaatctaaacaataagatgtcaaacacctaacccttatcctagaaaactaatcaaactatttaggaaataggtgacattcagaaaagggtatccttagagttgagcctgctgctgcagtaccagcgtatactgcttttgtgaggtacttatgcacagtctactttaataactgaaatgaatcacttccaattgaggtagaccatagacactgtctccaatagctcaaaaaagacgggtccaacagtttagattgcagagttcacctttttctccctggcttcacccttccaagcaaagattctagcaccatttaacttcttgcattaccttttaacaaacctaatatttatccaacgaataaatctaacatgcattattattcttaacaacaaaaattctggaaatgcaggtggggatactcaaaaggatcagacacccaaacctggtcattctcctgggagcatgcagtgagaaatttgcactcatgtatgagtttttaccttctggcacccttgaagattgcctcagtaaagaagaacgcaaggaatcattctcatgggaagagagtcagagtggcaaccagcatatgctctgctcttgtattcctccacaataccaagcctaatccaatagctcacggtgatcttaaaccaagcaacatcctcttcgatgcagaaaatgtatgcaagctcagtgattttggaatttcccgtctgttacagcacagcactgacacagtaatacctaaccatattacagaagtgccaaagggtagcggcccctatatggatcctgaattcatgagtacaggcaaactgactcctcagtcagatgtattcgctttgggtatcatattgctgcagctagtcacaggccaaagtgcaaccggcctaagaaagcatatggttgataaattggaaaggcaaaatttggggaaaatggacacacgcaggcaaaagatgatccttgagaaacttcaaatcttggatgataaattgaagttggacgacaagtttatacaggattctataaggatgctgtccctgggcctaagatgcagctataacgaaaggaaacggcgtccaaacttggaagctgaagtttggcctgagattgagtcaatgaataaatcagaatgcctctagcggtaagatgaagttgattgactggtgtccattgaaacaagtaattgctaagaagcatagcagataaatcagttcttttggttgcaaatttatatattctaaatgtgtgctggaactaactctgtactcgataaaatctccctatatgttagctgaggttcattaattatatgcagctatgcagatgaaacctcaagcctggactgtttattttgtttatgcttaatccgccggagtctgattgtccctatatgttttctgtagtcgacttacttttgtcccaactgttgattggattatttgtttatcttttttgttgttgattttcctgtttaaaaatttattttcatatgatattgcttgtcaaaacttcatatttgatcaatatagaaatttgttattgaattccagttcatgccatgcaaacaccacattttgcagagcgcatggaaccaccttgatctgtactaccaactatttcaagaatttcaataattatatgcaccgttgatcttctagctctagtaagcaccgagtgatacaataatcatcaaggaacataatacaatctcaaatgagtaaaatggatatcacctccaccattgaggtttgctgaggttcatttgatgtcgcgattccggtatttgcaaagtatggagatcgttggtactaggatatatgcgagactgaggtaaaagagacagagacgaggatttttatatagattggccgaagccggtgttgctctttattcatcataatgacaccagtacaatatttggggtagcttatctaagtgttcgacatggcggtctgaaggtctgactcgtagtcgacaacagggtagccttcctcttcgaatccgcatccggcgagatcagagacagcgctatatctctcctgacggtatccgtaggcaccgtaggggactagccatgcctatctttgaagtcgatatccggcgtcttgtcttggcgaatgttggcttgtatgttgtggcttctgttgttccgtgtatgttgattgtgtcccctctcctcctagggggtcttgtatttatacccatatgtgtccctttgtccaagtagaactagggataaggaaaccaatatggatataatccgaatagtccttgtcgtttccatgtagaactctggttgtctttccttatccggaacttcatctatatccgaggtcagtgtccctataagacatggtatgtggtgggtcctaccgagatttaatcaactactattaggtatgtggtatctataactctgacacattatatgcaactatgcagatgcttaatctagcaaaataaacaaattttggcacaatctattactaagaatctggacatgcatgcctcctgtccaattcgtacctatccagaattccagattcatagcagatatgtgatgtcccatacttttttttattataggtttgtttatttccaaactattttctgtagtaaaggtttgtttatttgagacagaggaaagactacctccatcccaaaataagtttatttttggatttctatatccaacgtttgaccgttcatattatttgaaaaaaaataaaacaatcagtcgcacacaaagcgctattcatgttttatcatctaataataataataataataatcatatttttttaaaaaataaaacaaagagtcaaactcaaacattgtatcaaaaattgaaaaataaactttttatgggacgaaggtagtaggtaataagacaagttttgatttctgggcccagagccatctttttctatctgggcctaaaagcagaagtgggccgaccaagtggtgttgttagtactgggctgcaatttgcagaggcaccggaatggtcgaggccggcggcgcagatccggcgagcggcggcggcggaagctgatggctcccttcctccggtctcccagttgcttttcccccattttctccgctgtatccgccgctcgccggcggggagggaggtccggaggaagtgaaatggcggcagtcgcagcggtagcgatgggggtcaagtcggggatagtactgcggcggcggcggcggcggcggcggtggtgagcgtggccggcactcgaggagggcgctccacgggggcatgcttgctgggtcggccatggccttggcgtctcgctcaatgggactccatggtgcgatgtggagctctctgtttctctgattcatcgcggtaaaattttcgcagctcagtccgatctcctcttttttttttcaaaaaaatatatattccggtgcatttctcctcaaatcatgaaataatgggatagggacagtaatcctagattatcgaatggagtaatggacaaacaaatcatggaagggaacagcagttttgacttttgattcaatggttttcttttttatgtaactcgaatagttttctggtatatccagatggatgagcaagtacagatccgacacctatacctgccatattcagtctgctcatgtgaaagctggacatatgattttttttttctgtgattgcttccaacaccattgcagtattacattaaaactgctttggtcatagatgcagagtgtagcaagacagctctgccagaattttttattccgtggcaaacgccatattttaggaagtgtgttaaaaataaagactcatcattcatcaaggcctctaccgcgggatgcgtggttcaattttataatcgctatatcgaattggaggtaatggaggaacttggcctatgacaacttgccagtttccagatcccagtgctgccttctcggctcaaggtcttgcctagagttctctccatctgcccgagctgtggataatacgccatgagaagctgctgaattctgaatgggtaagattgactccttttcgccatactaccgcagtttctgatgcatctgtattgcatgcttgaatcacccgctgcctggatttttcttgtagctgccagcaacagattgcatgaaaaatataacatgcttgcttttcactggctctgtttgtgcagtcagagttcgaaatagcagctgcttggttactggttaggaagagttttcttagtagttacagttttttgcaggtcaaaagcagagcacacattgtcaacaccattttaactgacacaagattgtcaggaaatcataacaaggtccaaatagatagataaacattgctgtggaccgcagcaaggttgccaagcacaagctgaagcaggtacacccatcgtttgctctactcattggctaattggctagaaagtgctacatagatttgtgtagattgtgtcatcataagctaatttgtccattctatccaaagaattgtagcttactgttactgactactgatcaagagaaggatcaaaccgtatagtgaatgaaatgcacaagcaagaagcctcactgtatataaatatttttaaatatggccactaatatattttcagatttctagggcaggtcatggaaaacctcactgtatttatcttctacctagaaaagcagttatattttgggacggagagagtatttcactaatcaataataagttgaactataaaggtaactatattttgggacgaagagaatatttcattaagcaataataagttctccactttcaaatattgattattcgttagcaccaccacccatctcatcccatacaggcctgtgaagcatgtaaatcttgttacaatggtccagtatagcattgtcagcataagttcatgacccttcattgcacttgttatatattctgtaacctatatttctgatgaagtttctctataagtttaatttgccagggtctgcggttaattttgactacacacttttctgtgggaaaactaaaaatgagtcctggtgctcttattgcaaactttcttatcaaatggaatctggagagctatgtcttgcttcgcatccgagtcataatgggaatcctcaccatcctctatctgatgttcttcttctcaagccttttcttcacccgtatatacagatccatggtgaacttcctggatcctgtggctgacgccacccttgtatacattatgggggctatgcaagctgcacctttaaataaccagctgttcccagtctgggcccttatactggttggtctccgctctagcatccatggccgctctagttctggaatgttttttgagctgagaaatgtgttgaagcttttagttgtggcatacatgaatttaacacgtggctccaaattgtggcgttttccattttggttcttttggggtcttctggtacttcagtgcttctacaagattctggtgcgccatatagcatccaagtccttgtggaatggtcgtagttcagaacttcttcaggagtacatgggtgccaatggtaacaagagcaactttaatcctgaaatatgcaacccagagactatggaaggatacaagtacttggtttatggagagttacagaaaagccgaaagagtgcacacattctaaaagttgaagacttgaagtccctagttaccttggacaagatttggcgatgtgatagtgccttgctgctaacctccatcaacatgcaggggaacaacatgaaggacatggccctggcatttgcattatctcggttgctccggtgtaggctggaaggagcaacgttgcatgaagctactgtttccatgacccgaaagctaatcagcaagatgatcctctcagatagtgctgacaaggtactgttcggtatcctggagctggatgtcaggttcctccgggattccctccactccagttatcctatggtcttctgcagagggcttctttcgctcttcttcactcttctgctgtctttggtgaagtttttcatggctacatggctttttgtagatgtcaatatggtgcatgtcccaaaatcagtacgagacaggccctcgggcccgttttagttattcgctgcactcatttggttacgattcaggtatcactgcagcagccatgtacatagtaatgattgatgagatttttaggatgctcgggtacttcctatcaaggtgggcaaaactaatagccatgtgcaactttgtgaatttcagaaacagatggctgaaatatgtcattgtgaatacacctgccagatatggggaaagaactatagttatacaccagcatgccttcctgcaaacgttcagctcaagcatctcggggtggaaaatattctcttgtattttagaaagaaatcaaaatgcaagaatggtttggtcagaaggaaaaatgaatgacagtatggccaagaatgtgaaggcagcagtaattcaagcactccgctccatggatctcgagggtcatcttttgtcaagagacctccctttgtctcgtgtcagtgacagagcagagcgttattggttggcatgccttgcagaggtaccaacatgctcccgtgttattctggtctggcacatcgcaacaagcctatgtgagatcaagcttgccaatgaccataaaatcaacttaacaacaatgtcaagattatcatcgtttctggtggatgaaaaagctcttacaggtgagcttcaaaaggcatacacagtgtcaaattgcttatcatggtactgtatgtacctgctggcttcaaagcccaaactgctcccagaaaccattttgatgtccaagaaggcctttcaagatgctgttcagtgtgctcatgaaatgctcagtgattgtcactcctggcagagcatatacaa

SEQ ID NO: 9498 - DNA, 6275 bp, Oryza sativa
ccgcttaggagattacactacacaaaatgcttgattatttctgttggccgtgataacataccttggcaatggatgcaacaaaatagaacgtcccttgaaaccctggagatactgaaaccagaggtgaagcttttagtaaataacctttgctctctcaagagattggaatttgatacaactcatcgtttccttgagtttcccattctgccatcttctctggagtctttcattattagaagatgtaatccagagttgttggcacgctggaaaaggaaagatagttctgaatgggacaggatttcactcatccgccatatgagaataggtatgccttgcttttgcatctatccttgtcatcatctcctgcaatctaatggtcacttggtcagtcctagagatgttattcgtatgttactttgtttttccttctagcaaaattttaagtttgtttttcacatgttaaccaaaacgatcccctgttagaatctgatttgggctgtatctcctgccaagctgactgtaagttaatctacaggagatgcatactacaatttcgggaaaccagcggacaaattttatagctgtgattcttcagaagacaagacaagaaataggtatgtgagacacgtactacagtttcagggaaccagctgaccaactttatagccgtgattctacaaaagagaagataagaaataggtacttgttctacatctttcacaatagatcagaaattcgtcaattctgatactccattattattactaatctatttcactggcactctacagattagtgaagtccaagatgtaagcccctactgtgtgcaagacccagttagaagacagttttattagtgtgactggctgtgaataccttaactgtgccaatggattcttcagaactacagtcagttccacatattttatagaaatatctgcaaggattcgaggccagtgtcttgtttctcagtctcatgaatgtgaatcacatgtggaattaaaggatggaaatgcacacacaaaaaaatgcaatgacatgttcatccgttcatgccgttccttgtcggtaaacaagcttgattgttcagtagtagcctctcaaagtaaaatggccaaccagtattgaactgaaagtcatccaggaaaagctgatcgatctcttattttagagctctagttgatatgtgtgaacattgttaatttcgcttctttttcttcaatattagtgagtttcatctgatcgatgaattttatttttatcttaattttatgaggttgtctaatatcatattagacacatgtgagtgtttttctttttttgaagaattgttatgatgtggttttatatggaggttttggtattcactgtctgtttataaaataatccttgcttgaaacatcaccactcctctatgtttaggaaaattcactgtatatctctgaaactttgtcaaatactaccttatatgtccctgaattttgcgacattagagagcttaataagcacctcgctaacggctgcagaacgccgaggtctgtgacgagaagctccagatgctccggaggctcgtagtccctcgccggcgcctcgacgtccacgctcggtgtcaccggcgcaccgcccaagtccgccgttcgatcatctcgttgttgcttgacgtccttctgccccaatgtatgcaacctcgcaaactacacgcaaaaattcatgttcaaataaaaaaaaatcaagttgagttcaaaaattcaggttcaattcagatcagaattcatgtcagggacacgaatggacgagttggattatattttcacctttgtagctttcggttgccactcgggcttacccatggcgcgaggctaccactctaccagcgagacctggaacgtggatatgcaagcatgataacttatttgaggatgaggcggcgcagaagggcgatcgtgcgaggcggctagggtttagtgtcggttggcaaaatccatgccgtctgtttttatctacgatcgcacaggagtggaagggccagcacagcgggacacgtggacatccagatcgagcctagcggtagaacggatggtcgacggttgcagggattaatgtgtaattaattgaaagagtaaggacttctttgcaaaaacatcgctgaaattctcagcaatctcacgcggtctagagaggttaatataatatatatggttatcatatatatacatataccgttaaattgttttagaattttcatgaaattttagcctgattaattcagttttactgatttaagtatgggtagttaaaaaagataatgaatatagatatcaacttgttggtattttactttgaattaagaattaaatagaattagttgcttggatcatcaataggtagccactgttgcacttgagtccggctaaccatggactcacgagtcagtggcggatgtatcctttggggtttgttagggctggagctccacctccacagtgacagcaacccctccccccctcccccctcgggcggctcaaatcctggcccattcactactataaaaaaacgtttttccatgcagccaaaacacgttttcgtaggtggccaaaccttccgactgtatctaaaggcctgtcaaaatcctcaatttttactggcggaccaaagcactgctcgcaggcagcagtttcaatcttcccaggcgttgcttgcgaaaatactcttggcgccaaaaaaatttcccgccagccccgccccctccctagggtttcaaatcacaaattctcttaaatctcatccaggaaacaaaatccaatcataaacatccatacatcaacacaagagcattggattcaaatccatagcatcaacttgcaaattaacatcaatcaacatgtaaactaaaaaaaacaacgtcgtcgttaccggcaaactcctccgtgcctcctccgctaccgcacgcaacggcagatccggccggagggaggggacagccgcgccgccgccgctgctgccctccccctctggcgggatctaggagggagaggaaaatgggggagggggggccctccaagcgttgccgttgcatgcggtgaccgccgtcaccgccctccccactccggccggatcagggagggagggaggtgtccgccgccaccaccgccctcctttctcctcgtaggggccggatctgggagagggaggggaggggagccgccacggcgttgttgtcgccctcgtccgcgctgccgtcgccgtctctcctcctcctccggccagatctaggagcgggaagagagaaagggggagctgccactgccgtcgctcctcctcccctggccagatctaggagcggagagggagagagagggagtcgtcgcaccgtcatcgccctcccctcctccggtcggattgggagggagggagggagggaaggggaaagtgaggttgagaggtggagatagaggggcggggagaacggagtgagcgtaccgtgtgagatgagggagggagtaatatgggagtacgtaagtgtgggcgatttttataagttattatttttttaggcggacgtcttaaggtcctgcctgcaaaaataacaataatctcgtcctatgaaaaatccaacaaataagaacaacatgtcaagacacgttttagatcctagtgaaactgtttatttgtgattataattggaattataatgctaaactctatatttaatttgatctgcaggtcattgatgcatttttatgtgtttatgccatcgtatttgattaacaagtaccgacagttgattccttagtttattttttcttttctatatacaaaatttaaattatatttgcatgagaccgacaaatgtatattttttaaatgtttttattgcattgtgggttggacataggatattaggagcacctcctctattttcatcctagattcaccactgttacaagtcacgtacagagaaactggttgatgaacgggagataggtcgactgaaaacagaggcactattctcaatcaatgttgtaaaaaagtcagaatatgggttacatgctcaaactattgcacaactaactattattcaaagtagttctataccaaaataccatagtgcatagacaaatcattggcttgtctggaaacctatcgctgaaagcacaaacgtaaagcatgtatatgcctagtagcttacttgggttgtgacctataggcccacatatcaagtagaaaatattttcggctcgatcattaaacgtcttaattgggtcattaactgctaatcaactttgaattaattggccattttggtttttatgcaccaaaacatgttccaaactgcagtcggatgaaaaagagatgagaagtcgaaaaaatgaaacggaccacgtacgacaaaaacgatatcaatgtttataataggtaaatgatatggggatggagtgatatggcgagggagcgatctgattaaaaaaattaacggaaagttagattagattttttattttctattttcagggtcggtatatcagaggacaactaaaacactacgaaatttttaattaggtaaagatttgctttcacattatttcattctctcgggctcatttcttgtccaggctaccaaaaaaataataaaccctctcatatgcctgatgaggtaaaattttccatagattcttttacacacattcatgttatttttttttctcatgctcatcactcagggcaccaatgcaaccaaatgcccctacgaatgtggacttttacggtacaatatactgctaatatatacagcaagtatacaggatctatcggtgtagattgatttgattttttagttaatcagattgcagtataaaatttgaaagggtaattttatcttttctttgttattctatcatcaaatcgtactatcatcacgtgtttcgtcatcaaatgatgctcaggatgctcctgccctagtgcacgataagatccaggactagatactctcaattagagtcaatctgaacaaaaagattactgaagtgtattttttattttctatcaaatttctaacttgctcgataccagatgatggagcataaaaatacaacttagcctgaaatgttggtttcggaaagatggaataccggaatgatcgaaatgctgtatttcctcaaaacaccagcgctcactgaaagaagtgcaaaatggacgtttaagaactgttttccttgctaggtctctggctctcaccgctcctcatgctgactgttccaatgtcaacttgcatgacagctttgcgctacgcctcaatctcaatgtcaacttaatttacagctttgtgctaatatatcaatgcctccaacaatgcttcaataatgtcaacttgacaggtttgtgctgatcaacgcctcaatatatattaatgtcaacagttgcaataattataaactcgatgaacaggaataattgttgtactattgtttcagtaggtaaatcaaatggagttagactaatttggctgtgttctgcttttgcaacttcctcgatcgtttactatgagcacactttctaaattattaaacgatgtatttaaaaaaatgttttgtataattttttttaaaaatcaaataaacatattccctactggagaaaccatctttgttgggttggccaaaaaccacaatagccccagtttgaatagaaaccgacactaaagatggttttttttcccggtttaaaactctatcagccctagatgatatttaggctaaccgggactaaaggtcatctttagttccggtttatttattgtcagaggaggactaagacttatcctcccaagtcccaaactcctcatctcctatttctactctctctcttatccttttctttgctgatcttatcctctccttcctttcactagctaaaacgtgaggattaattttagaaatttatttaaaataaagagtaaagtccatcaccggtccctaaacttgtaccactatgtcatccctgtccctaaactcgcaaatcgattgttcaggtcctcaaacttgtttgactgtgtcatcccggtccttaaacttgcagatcactcgtttagctccaacttatttagttgtgtcaccccggtccctaaacaggacggtctaaaaactttatattaaaaaataattcataactttttcatgtgaactctaatgaagacaaactttatatcaaaattatagtctttgacgcgacttacaactttgtagttgaaaagtttttgaattaaaactgtttaggtc

SEQ ID NO: 9499 - DNA, 7544 bp, Oryza sativa
gcttgcttaaggatttgatatatctataatatcatatatgctgttgcttgtgttcatttttatgtaattctgtattgttgtggctggtggtagtaacttttggttaattcggctaaaaccgaaaccaaaattaaaaaaccgaaaccgaattttgcggttttcagttttttggagaaccgatcgggtggtgaagcctgtaaaccgaattttatagcaaccgaataaaccgaaccgaattgtcggtttaaaccgaacgcccaggttgagtctgttttcaactcagaatccataatatttctcaggatttcactttgctgcgatggagttctcttgtagaaccacttagcatctcccagatagtagagcacacgttttcttaagccctttgcatctagatccccagtaactagctgcagcaatacgatgcccaaagctgctacatatccaactgaatcttgcaaggctcagtgataagccgtccaaattctttcgaatacagataacacattccgagatcactgagtaagcacgcatttcctggcctgaagatgatgttgcttggtttcaggtccccgtgaatgatcggcttgggctttctgctgtggaggaacatgaggccggagcatatactgacggcggcaaaagcaatggcaaagccagcctgagtgcctgacgtccagccaccagctcgctgaagcagcagcaaggcaagtatcaacgaatttggatgggctgagctaggctagtagagtgatggcccaatgggggctgatggtgtagatgagccaagcgcatggctagaaaaatcagattaaagaacaattcgaaaacacagcagcaaacatgtatttttgtcacaaatctgtagagcaggaatcttaacaaacctccttttaaatttttcactagaaaactaagcacaatagatatatcaatcattatatttatcaaatcaaattattggttgtattgggtgttatatttttcgccgggcgtgttggctgttatattaatcgatcaaatacaattatgtgtttagggctagaatcataattgtttttcaagaccacagtgagtaataattgagtcgtagttacaaggtttcagatccaatgtcaatcgagattattaactggtggtgcactaggtacaggaaatgttaattcaagagttgaacttaacaacaatagattacatagaagtccaatgacatgttcttttccatttcttgaagaaaccatatattggccaacctcctcatcacacagtacttgaagccgtcaccacttaagtatgagaggcactacttcttcattgactcaatctggggcaaaacttctgtggcgaggcttggatgatttttcgatattggatcgctgcacctcaatcccaagaataacatcctggcaacatcttctgatgttctgtctgttttcaactcaagattcacaatcttctctaggatttttctttgctgcgatgaagttttcttgtagaaccccttagcatctcccagatagtagatcacacgttctcttaaaccatttgcatctagtttccctgtaactagctgaagcaacacgatgcccagagcagatacatccaactgaatcttgcaagggtcagtgataagccgtccaaattctttcgaatacagataacacattccgaaatcgctgagcatgcatgcatttcctggcctgaatatgatgttgcttggtttcaggtcaccgtgaatgatcggcttgggctttctgctatggaggaacatgaggccggagcatatactggcggcggatttcactctgatttcccatgtgagatacttgaggtgactttccagtgtgttgttttctctgaatcggtaaacgattgcccttttctctatgcatgctcctaagaaaggaaccacattcggatgactgatatttctgaggatttcaatctgcattttcagaactagtgtgagaaatgaagcaatacacagtggttctatcttgcattttcagaggtactgttagaaatcaacagggtgtataatgtattaatggtgtcattggttttctatactttggaatgcaaaacttcagtcgcttttggtggtgtttgatgaacttatgtttgaacatagtgcagagaaagttatgtgttcaacgaaacttaccgcttgatgaaactcttgcatcaaaatccattctggtagtgttcctttgggaacagttgtagcaatatccattccatcaaaatctgaccgatacacattatatgtagctgttccacggagccacttcgctcgtttgctgactgcagcatctatttctgaaggtttgaacacaatgaacttatttccgccacttgagcgagaagctttgttcttgttcgcctgttcaaggtattgctgcaaggaccatgttagaacaaggaacattgatgaacaattgaacatcattttctttcttaatattgccgactgatagtgtctgatgcatgagcaaggtatattacaatgtaacatcatcgtttgaagagcaatacttacttgtgcagcagtgactacacaaacgacaatgattgtaacaatcgccaaggtgaccatgacagcaccaagaaggatgaaggtcgcaacagcactgatggcgccaacaacgacgacaacaatgccaacagcaacgtccataggcttttcctctgcttgctgatgaggattcttttgaaccttcgctttctcccttgtcaccaaccatgatcgtagatttcagcaaacatggccaaacgaagtgttcaagtgaaacaagaatgaaagagtccagattggcaccatcttgtgccggttctttaaaaaaaaaaaacattctccagattcaccttacctttttactggttgagcagctgcaggattttggtggcctcctcctccaaccatggctggtaaacaggttgcaaacgcttgatctctgcagattttagattgagtaactggatagcaggtcaatcaaatgactgcaggtatgagatgaaaagtaactggttatgagcgagcaatgctggtgttgccggtcgctggttatatatatgccatgggcagaagccagaaccagaaggttgtccgtgataaacaacaggcgctgccaaagcagcttgactgatgggaggtacgaggtctttttgttcgtgtttctgcagtggtatacggcacattcttcaggttgaagttgatcaatgcagcatgctgtttcacttttaaattagtttttgtagtgggtgatggaaggcatacacgtcaggagtctcctgtgcattgctttccgtcaacttgatctgtgtctttggttataatactggggctaaacgcgtgagatgatttggatgttggagtggttatctggtagaatagtcattgtctaaaaaaagacgagtagaatggtattgatagacattacatagtcctaccaatctagtatcacgcgtcagaaatggcatccccctatcaacttgctaataatatactgatgattatattaaattctcaacttgctaaattgtactactgattgtagtttcattttcgttataataaactgagtagtagtagtagtaagaataatagcataagcttgagtcagtgatcatggaggagtttgtaccttttactgctgacgagtcgcaataaacatcaccacttttctgctctcaatttccaatggtttttgaattccagcaatgcaattaagaatgtaaagatcactcgagcctgacaaactggaaaaaaaaaaaagacaatgtaacattacctcgctcgatgcaaattctttatgctgatggcaaggcttcaaaacacaactttgatgactcttaacaagcaacgaaacgcagcgcagcagagaggcatttcgtcgagcaggttgcagaccagaaatgctccgtcgagagattgaccagccaagcagagtcaagaggaggccaactagatcggtggctgggcgatggagtagcttgcaccccgtgcacccgggaggcggcggcgcaccggccggcggccggccacgccgtcttacgacggcgctgctgcagttcgcgcgccgtggcgaccattaccaaccatatgcatttgcttccggcttcccgtgctctgttcgatcggaaaagttgcacttccagcgaacggaaggcggcgagggacggcgagtccggccggcggggatcggtgacgtggcaatgcccgccattgcccattggcgacgcgagaccggccgccgccgctgcctcgctagcgggaggaagaggttgcagaccacaaatgctccgttggattcacaaaatttcaatggtggcgatcattagaagggcatatttgcgagaaaattgcaatattgggatagcaaacattggggatttactgttttgacactctgagcggatgacaaatgggcccatctgtgtctatgaaatgtgggtccagtgtcattatagcaaagggcctaatgggctactttgttcgccgcgagccggcccagctcaatatgggaggcccaccaattgtcatctttgaaactgttagcattttgtttttttgaaaaagtccaaatacccccgtaaactttgaatgaaagttcatctaacaccgtaaactttaaaactgaacatctaacctcctgaactctgtaaaatcgttcatattacccactaaagtggttctggatgatggttttacatattttgaaagcttaaactcacaactttaaataactaatatatcatatttgcatatcattagttgtaagtcatcaatttatatatatacagtgataccatcctattattatattggtacttgtttgtaagtaagagctaacaagtggtaaaagaaagatttaagtggagattgtaatatatatgttcaatgtatatgccatgtgatcaaacttatccaatttatatacaaagataaaaatcattatacaaaaccaccttagagagtaatatgaatggttttgcaaagttccgagagttggatgtccggttttacagtttagggtgctagacagacttctatctaaaatttaggagggtatttgaactttttccttgttttttttttttttgggtaaagaacatgttagatgatcagggaaaatatgaagtataaactccatacttgtatatctgaaaactatcgtaagataatagaaatggatgtatgagatttgtccatgtcaccacctaagtagtcgtctattttatatctgaaaacactgtaagcttcattgcctcactggacagcaataggcaaaagaatatgtacaagttatcagcatagtactgcttgattgacaagtgattagcagccataagcatctcaaagttaatatactcggaacaaaaactcaaggtagaaaatgggacaacagcattttatttttgacaactgaacatcaaaacaatgcagcatattgaaactgttacacacaggttaagtatgttcttaggggacagaggaagctgtatgcctactacatatcatattaccattttcacaccaaacaaatcgaataaatttgaggtttttctttcatgaacagacaaaccatcaaccaacttaaccggctcaaaagaaggagcgatgaacccaaaccatctgagagtaagtcgtactatgcatcgattgaatctgaggcagcacttcactggctaattgaggacactgtttccctgctggatcactgaatctcaagcccaagaacagcatcctagctgcaccttccactggtgtttgacaccttttcagctcaggatccacaatccctttcaggatttctctcttctgcagaatgctcttcctttggaattcactatcatctcccagtttctgtgccacaaaatctctcagactctttgcatctgaatgccctgtaactagctgaagtagtatgatacccagagctgatacatctgtctgaatctgaatcttgcagtcatcaatgtccatgaaagtccgaaagattccctgaataactttttcaccgggcattccctgaataacttcctcaatggcggatggtacatgttttgttggatgtaacagagtggaaattccaaagtttctgagcttgcatatattatctgcagtgaagtggacgtttcttggtttaaggtcaccgtgaatgattggcttgtgattatttctgtggaggtaatcgagagctgagcatatgctggctgctgttgtaaccctgtctctccaagtaaaagatttctttcctctaaacgtaaaagatttcttgatgtcagtgaggcgatcttccagtgtgtcaggtaaaagctcgtagacaagtgcacgccttggtgagcatgctcctacaaggtttgccaggttcttgtgctggatgcttctgaagatttcaagctgcattttcagagatatagtcagaaaaacagaagaatatataatatctataacttgcatgaagatatacagctattgcatattgaaatgttatacatgcaatgtcaaattattgctgtcattattttcaacaattttcaatgggaaacttcagtcacattgggttattgtctttgtttccttccaatcttaaatatgtaatgatgcgtaagctttttacgcctttcctgaaaaatattgggttattgatgatgcatttcatccattactagatgcacctgagcaaaaatgcagggcagaatgcatactatatttttttttgcggggaaaaaagtgtattactcattcaaaacgtcctcacagactagctgtgaaatgaaattacaacttccttccggccaaagcccagaaattgaatcggccctagccctattagctaaaaggtggctaacaccgttttggctacgatggatcttggtaaccaacacttccctacgctctgacaacaggcgtttaatctcctggactaaattagctaattcagacagatccctattcccttccttcagaagattgactagcgaaacacaatctgtttcaatcaagatagggcgcatagtccactgcagggccaaaatcaatccctccatgcaagctcggatttctgcctccagggcattcttgcagctatccagggacttacatgctgcaaaaactgtactaccactgttgtcccgtagaatcataccgatacctcccttcccacgatcagcatcaaatgagccatctacattaagtttcatccagcccagcctcggcttctcccagtgcaaacgggtcgatgcagtaggaggaccatctggtcctcttcttctaagtgcacttataacagatctgctaacaacagttttacctttttccagatcagcgtgggggtattccctgatttggaatagagtagcaatataactttccaggaatcttttggagacttccagcggaggaggcggcttattatgtgtgatttcattacgcacataccagtttcgccagagagttaataaaaacatctcatgttcttcggttggtagatattccaaacaatcaaacagccagtaattgccgaattggaaattcacca

SEQ ID NO: 9500 - DNA, 26657 bp, Oryza sativa
  unsure (1)..(26657): unsure at all n locations
cctgcagcccctgaaatgaataggaaaaagtacaccgaaggtcccttaacttgtcatcgagttatgaaatcgttgtccaaccacaaaaccagatatataatatccctcaacttaaataaccgttcactctcttcatgtcagcgtggctatgtcatcacctctctctttccctcctctctctctctctctctcacttttctcctctttccccgccgcgccgtgcctccctcccggtgctcgctctcctcctcctcctccccttccgcgtcctcgccgctgccgcggggtcccacttctccccctgcggtctcccgcctcgcgggccgcctccgcctctccccgtccatggccgccgtcacgctcctcgcgctcggcaacggcgcgctcgacgtcacgggcgaacgatgcaggagggacggcgaacggcgcggcgatgagcgcgacagccccgacgacgaacgcggagatgaacgggcatcgacggccggcgacagacgacaaggcggcgacactggagaagggaggaggccggcggggcgacgaaggagaggagaaggtccggcggctggctcgcggccgctcgctcgcccgccaccgccgctctgctccaccgaccgcgcgcttgcctgccgccgacccgccgtcggcgcttcgctccgccggccgctcacccgctgcacgtgcgtgcccgctgccgcttcacttcactctgcgcctgacactcaccgacgccccgacccctccgtcctcggcgagctcgtgtacagcatccccggcgccaagaacgtcctcgagatgcccctcctcgcagctcaggcacgtacatgaactctcatgcgattatccatttaatcattgtgtttgttgctcataattgttagctaaataatgtaatcttgtgcagtttctgttgttgcgttgcatacagttggctgtgttagaatctggcagcagccggtcagtagtggatctagatcaatcgggcttctttctgttatgcatgtaacaaactctgtaattgaggagaataaatagaaaaccagaaaagcagcaaaggtattacgctgcgccaaaaactctgctcgttttctctgttcttcagttaaactgttcacgttcgacaaaaggttcagagattgtgagagtgagagtgagagttcgtgagttttgattcagtgtttctgtgttcctaacaataatcatctacgagttcttgttaatggcgatggtttaggtgactcaagtgcgatgggttcgtgctcggtctcgccatcaaccactgcatgttcaacggcgtcggcgtcatgcagttcgtcaactcggggtgtgccgctctccgtcccgccggcgctcgaccgcgccctgctccgcgcgcgcgaccccccgcaggtcgcgttcctgcaccacgagttcacgcagatcgacgacggtgatgacggcggctcgccggcgcagaacggcgccgagccgttcctgcacaggtcgttccggttcacgtccgagtcaatcgcccacgtcaaggcgctcgtctcggtcgactgcggcggcggcgggcgcgcgcccacggcgttcgaggcgctggggatggggcatgcgtggcggagcaagctcctcttcgccgtggacgggcggccgcagttcacgtcgcctcctccggcaaggagacgccgggcccagccccgcgctcgcgggcgctgccctccggccggcctgcccagaggagaaaagtgagagagagcgagagattggaggaagggagaggaaagagggaggaaagagaggtgatgatatggcttactgacatgtggggcccacgtgggtcccacgctgactcagccgccacgttggataaaaccagggtcaaaaccatcaaatgacctaaaataaacggttttgtaagttgagggatgtcatatatcggaggacgatttcgtaactcgatgacaagttgagggaccttgggtgtactttttccaaatgaatactccctccatattttaatgtatgttaccgttgattttttgacaaacgtttgacctttcgtcttattcaaaaaatttatataattataatttattttattgtgacttgatttatcatcaaatgttctttaggcatgatataagtatttttatatttgcataaaaaatttgaataagacgagtgatcaaacgttggttataaagtcaaggcgtcatacattaagatacggagggagtatattgtttccgtaaaatggcacttcatggttattgataggaacaatcagctatctgaaaacagtggtatcatatcttactataaagttatcccccactaacttcttaagcttgatatgaagatgcctcatcatcattcactaacaagataccacaccatcatccactaattaacaagatgtcacatcatcatgcactaacactcatcacatttaaacatcatgcaaacatgctatatctttatagtttttataatttaagagcttttcaaatacaaacatgttaaattatcatccaacataattcatataatgtttcaatgtatatctttattatgttttatgatatcttatatatttatatagttcatcctcacttagttagtgcttaaatgattaatctatggtctaaattatctttttctttttttcctctaattaagttatatcacattaattgtttttagtctttagatgattaatctacggtccaaactatctccctacttttttttccctccgtaaagtcataccagcttactttttacgtttgaatcaccattctacatactatttaaatttaaattatcataaatcacattaatttacttaatctgatgttatctagttatcttatacgttatttttttattattattatcatactaaatttccgcagcaatgtgcggggtttcacctagtttaataataaatataagtatatactacggcagctggccaacgtatgatgaccctacgctaatgatgcagcaatctgccacaagctgtttcaagtgctcaatggaaactcgaccatcaagctgcaaagtgcaaaattgctgcttcgttcctctttccatagcttacggatcggaccgtttctcaaaccatgcatgtgctaaataagagagagatataaatgcatgcacttaattaggacttcccaaacataaagatcacatatatatagacatcaattctaatgtttaatcaagtctatggagaaatactaccaaatgagccaaaacttcccatatataaattatttttttagtaaagtccatcaccgtccctaaacttgtaccgttgttttatctcagtccctacactcgcaaatcgaccgttcatcctcaaaattattcaactgtgtcatcacggtccttaaacttgcagatcactcgtttagatcctccaatatatatatatgtatatatatatatgtatatatgtatatatatatatatgtatatatatatatatatatgtatatatatatatacacacacataccagctatgctgccgtgtacgtacataaccagccggctgctgaaattactatacaaccaagacgacgtggacgccgcggtgttcaaggctctcctgtacttcatgtacacgggcacgatgcccggggggccccgccgcgcaagacgacgacggggcgccggcggcggtcatggcgcagcagctgatcgcggcggccgatagattccacctcgacaggttggagacgatgaggttgaggcttctctgcgaggagttgtggactagctactaccggtgtctggcgacattaatctgcagcgtagccagcgactacgtctttgtaacgtcctgccttcccccaggccgggcccgcttacatctgatagctttcataggtcatagattgtcctcacagaccaacacatatcttttctgcacactttgtcctcactcgtgtgcactcgggaagaatttcccggtcggtcacccatcccaaattgcttcaggccaagcaacccatcccaaattgcttcaggccaagcatgcttaaccctggagttctttggagattggcttccggaaaaaaaattgcaacttgttgatataagtattctattaatcctattaagccctaggccgggatgttacaccctcccccttaagagagatcgacgcccccgtcgatcaaccctaggccaggaacgtcctctcttggccacgtccatgtgtccagtgccagcgcatgtgccatgctgtgtaaccactcccggtctacaccagccatgcgcaccatgcctgcgcaactgcgacacacgcgcccgtgaaaccgcgagagtcggctctgataccattttgtaacgtcctgccttcccccaggccgggcccgcttacatctgatagctttcataggtcatagactgccctcacagaccaacacatatcttttctgcacactttgtcctcactcgtgtgcacccgggaagaatttcccggtcggtcacccatcccaaattgcttcaggccaagcatgcttaaccctggagttctttggagattggcttccggaaaagaagttgcaacttgttgatataagtattctattaatcctattaagccctaggccgggatgttacagtcttccatggtttaaggacatgttttcaaagttttgtggtggtgccttttaatttaggcttttcgagtaacgggtgcagcttaattatgtaaagttatactaatatgtatgacgtcgttgattttttttaccaatatttaactattcgtcttatttaaatttttttttgcagatataagaatattttaacgtaggtgccacgtcagtcaaaaccgccatccaaatcgtcttgggacttattttgcatcgtttttgatagttgagggaccagttatatctggttttcgggttgaaggatgaaaatcagattggttgacgagttaaggggacctcagataagcttattccaagcaaaaaaaaaagctaagaggagagggcccacgcgcgatggataaaaccctctcacgtattggcgtatgtattttgttcgtgcgaaaaaaaaaaaagaagttcaaaactaatcgcgcgcagtgatcgtacaagcgatcgatcgctcattatatatccttttcgcgcatatatacatggcaccgtagaaaaggaaaggaaaacccaacacggaaaattaaggaaaacccacctcgcacgcgggtattccacaccgagtccgagttaattacgttctgccccgagcggcaacagtatttatatcgactgcaacacacgtcgtcgtatcacacgtaaacccggccgctgaaatacaaaccccaaaccaattcgagtgagttctccgacatgatgacccgtcgccaggatgcctactaccgctacccaaccacgtcgaccatcgtcgcgtcggcgccaatgcccaccggccaccacgtcctcaggatcgacggctactccctcaccaaggccaagttcgccgccggcgaagaatgcgacgagtcgtgcagcttcgtcgtcggcggccacgcctggcgcatcaggtactaccccaacggcgccgtcgtctccggctccggtggcttcgtatccctcatgctctcccttgatcatcagcccggcgccgcattgccggccgccgtcgtcaaggcgcggttcgcgttcagcttgctcgacatggacggcgagccggtgccgtcgcgcacctacgcgagcgacggcgtggtcagcttcagcgctaattcgtcgagcacgttcggggcggagaggttcatcggccacggcgagctcgaggcgtcggggcacctcaccggcgaccgcctcgccttccggtgcgatgtcaccgtcgtgaagcgcgacgggcctccgacgatgtcgaccctctgcccggtggagcacgacatgttcagatgcctgctcgacaccggggacgacgcggacgtcgcgttcagggccgccggcggcgagacgatcgccgcgcataggcgggtgctcgagcgacgggcaccggagctggccaagctctgtcgtcgtcgcggcggcgcctcctgcttcatgggactcgtcgggaggcacatcgacgtcggcgacatggacgccgctgcgttcaaggctctgcttcacttcgtgtacaccgacacgctgccggagacgatggccccgcgagaggtgccggccatggcgccgcagctgatcgcggcagcgcgtaaatacggcttggactgggagaggttgaggctcctctgtgaggacaaggcgtggggatggcgcgtcgacgacacgagcatggacacgacggcggcggctgctccggctaccggcgatgatccgaagcgtagccagcgacgtcttccatggtttataaggaaatgtttttaaagtttggagatgcgtagttctagcacagacagatactccctctatctagaaaataagtgctaccatgagtttctgtgcacaactttaatcgtccatcttatttaattttttagaaaaaaaaatctaaaaacataaatcatgcataaagttctattcatattttataatctaatataaaaaaatacttactaaaaaaaaatactagtatacggaaacttatgattgtacttattttgaaacagagggagtatatgaaatactagtagaaaaatgtacctctacttacttacatagtcataaaataaatagtttatatcttctaaacaaaataaaagttcacttcagttttcagttcagactcaccttaagctctaaatgtaacgaaacggaaccaataaaattaagggactgtctactcctcgacagaaaacccctcctaatatcttgcaaatttttgttcattggattgatttgagattcgtgcaaaccccaccaaaccctaaccaccttttcctttttcctccctgccgccgcacaacgctcaagcgctcctcccctcctctcagcaccgcgcgcctccttcactgccgccgccgcctcactgttccgtcacccggcctcgccggctggccgaaaagtgtcaacgacgccggcgaggccccgccggctggcccccttcccctcccctcctttgcctcaagccggcggcggtgcgctgtatgtcgtcttccccgtcgccggcggcggggcgccatcaccggctacctcctcctaccactctttcagctttgcccccgtcgcctcaaccggcccgccgcccgctcccgaccccgcggcttcggcgccgccgccgccgcctcgccacctgcccgatccgccgcccaccgccggactgccgcctcccacggccatccctctaaagccgacgaactcccctctcttccccctcccacccccaccccaccccgggatcctaattcgtcggccctctgccggagtttgggttcgccggcgccggagaagaagaggtggtcgccggagttggagaagaaaagcacgaatcgtgaagcacatccaatgatccaaaatttgcaagatttgagattgtgttttctgtggacataaatttagcatttccgtaaaattaatattgttttttattgtttttacattcaatatctctaattctattgtatgcatgttacatgtaaggttaatcaaaacgagaagatgataataaatatttttttatctttaattaaagggggtaatgctttatattttagaatggtgggagctaaggctacactttactgctataagatcggcgtcttctctccacacgttctatccataagtgtcgtggcgacgtatactcagcttctcttcctcgctcgaaagggtgtcgccatgcgcgcgttcgagagcttcaccggtcgtcacgacgaccgccgcctcgccttcatcaaggacggcgtcgagctgcgagccgggctgccaccagggccggctgggacagtaaggacggtgcgactgtactgagcctccaaaaattaggagcctcgaaaatatgtatactatgatatcaggcctgataggcttagaaaaaagacagaagaccaatcgacgatcgaacatatcgtgacggcttgattgtattttaaacttatttagtgtgaaattcgttaatgacaatgagtttttaaatattatcttgtaattttatggtaaatgtagaccttcattttttttccacaccgaaccactaaagagtcagtgccggccctggccaccgccgccacccgtcggcgaccctgagtccggcggcctgcgccgccgcttgctctccttgctggacgggacggacgtcaccttcagggtcggcggcgaggcgttcgccgcgcatagctccgtggtcgccgcgtggtcgccggtgctcagcccccctcccccccccaccccccttgcggtcgccgccaccgccgccgccgtcttcgacgctgcttcacccgaggacgacgaaggtgcatccacgtcgacggcgtggacgccgtggcgttcgaggctctcctgtacttcatgtacacgggcacgccgccgccgccaccggagacgatgccggccggccccgccgcgcaagacgacgacggggtgccggcggcggcgatggcgcagcagctgatcgtggcggccgatagattctgcctcgacaggttggagacgatgaggttgaggcttctctgcgaggagttgttgaccactggtgacaatcttctagtgtagccagcgacgacgtcttccatggttcaagaacatgtttttaaagtttggaggtggtgccttttaatttaggcttttcgagtaaacgggtgcagcttaattatgtaaatttgtaaatgtatatatggaaaagtatttttagaacttggtacgattacacctagccacctactagctaggttatacatgtgttatcatggtcctctgccatgacaagctgtggctgtgacgcgtcgagctgtggcggatctaaaaaattgattcgttggtgtcataattaatatgtactccttccgtcaaaaaaagccaaccttaatatggatgagacattacgtagaacaacgaatctggacatgaagcatttccagattcattgtcttaggtaatgtcccatccatactaaggttgttttttagacggagagagtatatcggtgtcataatatgttaattatactagttactggtgatgacacaatccgccgcacgtaggcagcgacatcttcaatggttaaggggatgtttctgaagtttttggaggtggtttttttagggattttggtcacacataaatactcagtcagtttcattgtcgttttaccttttttttttctaatcaaacttattttattgtggtatatttttctataaacttcatcagacataaggaaatttggcagaaaaagaaaatcaaaccgacttataatataagcgggtgcactattaattaattataacatgttttatctcaactttcatgttttcaaacacgtgaagtgggtttacaaagtggtcaaagctgcagatcgatatcatcatcaggattgctttgtttgccttgccgacgggtgtgtctgtcatttgtgccttttgctacttcgcctcgttcccatcgccggcgccgcgccgccggtcgccggcacggcacaggcggcggtgctggcccgcgatgaaggtggcaatgggcccatcctggtgacgcaatttaggcccatatgttgactagtcaacgggcagtctccccttcatatgctgatgggccgattcgtgggctttaatagaccttacggccccgtaagtgaacaaaataaaatgtttctacctgaaaaataaattgtttctgtaaaattctcctgttctaaatggcgcttcatagttttttttataggaagaaacagctacttgccagtactaaaaataacaacagtaaaatcctaactatactggccatccaagggtaatgatgcaatctctgaccaatgctgtaagcctataactgtaactctgtgcgttctcagttcaatggaagcatcaaactcactcacatgaagccgcaaagtataaaattaagctacctacaattaattgatgaaaggatgtgtataatgaatctaatccccgtagcatgctcttaggaaacaataggcaaacaaacgataaaaaacaatagatcaatcacataagacacgagattttaacgtggaaaaccctcccaaaacaggagagaaaaaaccacgggcgctaaccagcaaaatatcttcactatatatggggtgaggttacatcgctgcacggcgacgggcctccgctctactacggcagaaactggactttattaagtgcaaatgaatttggatcacaactcaacacatgctgcatgattactgaacaaagcctacaaaacaaagtgcaaaaacgcctggataaagtcagaaactagcccctgcatgacactattattccagtcactctacctacagcaagtacagctacagctagtcgagtgtaaaaagaaagtcatcgtcttcgtcgatggctttggtcaggtaaagaagaactgatgatgatgcagaagcagtggcaaactggcaatggacaaaggaaagcagcccagctttgcttgccggctaatgctgtccgtgtccggctcacttcacttcagtgtgcagcggcagaattgcctaccaaataggctttttttctcacgtctgcaaaaatcttcatttgtccttacctttgggcctagataatgaccggctcctcctcctcctcctgctgctgcaagtctgcaaccggagctgggaaaaatcgagatccaatgctgtaccacccactgtgcagaatctactgttctccatgcaattccacagtaatgcaaagctcatgtgatttcagaaatgaaattcgaaatgcaagattttcaggtaaaccatctagcatttctgtacttggaattccattcagaagtctttgcacttgctgaaaagcacattgtatttttctttgaaaacaatgaaagcacatttcaataaatccttggaaacaaaattattattactactacagatttcagatatatcagggagattctggagtagtttggtcaaagatacaatcttttgttttactacctcacaaaataggactgcacagagaaatgatgaatgatgcaaatagggatggtcctacactcctaccaagcaacagtaaaatatgtcagcatgggttaataatacaggcagagatccaggagaccagaggcatgattcagaaaggctaaaaacaagaaacaaaaaaaatgtgacatgcaaaagatgatcagtagtactagtggctgtttatctccattgcctctgggtgatgcagctgtaatcacacaccaaatggtgaaacagaagcttcctccagtaattcaaaatgtattggtccaagggatgaatatgaccaacagtcaatggttggctgatcatgctcatactcatactagcagaccagctgctgttgcggagtaaaaatttatcctttctgacaaaagcctggactgctgtatatttatgctttgataggttattagagttaagtgcagagagtgtcatggagtgtgaaaagaagcaatcagttttattttacgaatgatacattaggtagtagctaattccaacactagtacatagacggatagaccgtgtttagttcccaactttttcttcgaacttccaacttttccatcacatcaaaactttcctacacacataaatttctaactttttcgtcatatcgtttcaatttcaatcaaacttccaattttagcgtaaactaaacacacctatagaacattcaaggactgcaactactaaatggacaacactaggtttgatttgtagactatgttttattgatgttggagcaattgtgcaaatatgtagggtgtgtttagttcacgccaaaattggaagtttggttgaaattagaacgatgtgacgaaaaagttggaagtttatgtgtgtagaaaagttttgatgtgatgaaaaagttgaaagtttgaaaaaaagtttggaactaaactcggccatactctcatccaggttggaagaattttgtgttttcttccaatgatacagaaatgttttaatgaatcctttcaatattatctaaaaaaaaatgaatcctttcaatgaatcctggtagaaagtttcactatccacataagtgcagatcccagagggtcagtgtcacagactgaaaaaagcaatgaattcaacatgctaaaaggtgctgcccaaccctaagcaacaaccaacagttaaataggcgtgaagcagagctaggagtgaccaaagactaaaagagtcatcaaactactcctacttggctacaccgaacattcaaatagtaaatgaaataactcaagtttagttttgaacatttccaatattgagtaatcagcactcaatttaccatcattcagagaggacaaggctcctgtttgtagggcttttacaaaggtaacatcaagttcacccttttaaaaagatcctagagaaggacctacttgctgtatatatttagtgtaacaaagtgctgtaatgactgtcattaagtaggattcagaccagggacccctcctaatcataggcttagagccatagacataaggtggtgcacacaaaatcttgacctctgcacttcatagctcatgccgcccagacagtgacagtcctcagttcattgaacttcacataagctcaccaagtaaccaaaacacataagctcagcttcagctcagtctcctccatggagcccaagtcttcttcttcctcacactatctgcagccatctgcaacattgccatcaacaagaagagtaagcaacaaacacatctccaatcccttcttctacttgatttcttgattcaagaagaccagacaaatcaacaacaaatcagtttcttgattgaaaatttcatcgtttgatccatcgatttgcagaactcattccaaggagtgggagctgaagctggaggaggaggaggaggcatgaacccattcgggcccacattcagtgacccactctgcagcctcaacctcaaggagacctcagagttcgtgaggtcatccttccccatggctaccatggcgaggagcaacagcagcaacggcgccaccggcaatggcggccatggctaccaccgcgagacctccacggcctcttcatcctcttcctcctcggcctcagctcagaggaggcgagccgagcagcagcagcagcaggtgccagctactccagggcggccattgctgttcttcaattcctcgagccctgcacatcaccagctcgtctccgcgaggaggtcggtgccttccaagtgggaggatgcggagaagtgggtgaggcaggcgtcgtccgaccaccatggcggccatcaccaccaccatggcaagggctccaagcttcaggaggagaagagggcgtcggcggtgaggaggtcggtggatgctgacgtcactgctcttgctctctacactgctcctgctgcagaagtgttcctcaaaggtgagatgctgaaatatttttttcagttaatttttgtacttctttgagtttttctttgtgttcataggcagatgaaatttcagtgaggtcactgtcagaatgaatttctgaactttcttgtagagttgttctgagcagtaatttctgaactttcttgtagagtaattctgtgcagtaatttcttaactttcttgatgtgtaatttctctgcactttattggtttcttaagctctcattttgtttcgtattttgttctgaatttgccaaatgttttgtatcttgatgtgattcatacgattccttcacatgtcacatatgcatccaaagtttcagttgtttgttctgaatttgccaaaaattcagtaccataattgttcatcaagaactagaactgcaaatctcacaagttttttacgtttcagacaagttcactgacaatgtggagccctccaaggagagcttcgtgttccggagctcctactgcgagccaacaaagaacacggcggcgcaggcggtggccgccggcaacggcatcgaccaccggcgtgacatcggcacggagatgactccgctgggcagctccaccacctcgaggtgccacacgccgatcaagagcacctcgccggcgaggcacaacacgccggcgagccggtcgggccccctggtgccgtacgccggcggtggcggcggcgccggccaggacatctcggacctcgccgactgccacttcgccaagctggacctcggcgcgcagttcgacgccatgctcatcaactggagctccaaggaggaggaggaggaggaggtgtccaagagcttgaggcacttcgaggccagcgtcgccgccgtcggcgagaagcgcggcggcgccggcgactgccggtgggaggacgatgacagggccaagagctgcataaggtttgcacaagaaattttagcataaattatggcaaagattagagatgaatttctcatatgatgaaaattttcttgtgttttgtctgattattaggtatcagagggaagaggcaaagattcaagcttggatcaacctggagagtgccaaggctgaagcacagtccagaaagctagaggtaaaagctaaataatttcatcttttttcatattgcaaagttcaattatggcatcagaaatagctattttgcttctggtccaagattacactttaagaacaatgtagatgcaatgataaaagtagccaaaacccaaaaggtgtagtagtgaattcagaagggtatatgtgtgatcattttgagccctgtgcatattgcaaagtaaaattattgcatcagaattcagaaacagaaacatttttttttcttccagtccaaaattacacttttagatcattgtagatgcaatgatatgagttgacaatatttgccaaaaggtgtagtggtgacttcacttcactagttcactagggtagatgtgtgatcattttgagccctgtgatcttttccttgtggattcacaggaagaaattgcctgtctcaatcttctgtacaacaaaagaatctgaacctctggaccctaccggtttgaccgtgatggcatactgagaatctgaaaacagttgaacaaaccgaattaagtacttcaaatcctgcagcagagtatcagttatagctggttgatgatgctgccaaatatgacatattggcatctagttctgtcaagttcaaacattgcattgtgaattgtgatttgttaattgacaatggtcaggtggtcactgtggctgtacacgctaaaaccatttttcagatacaatttgtctgaacccaagtttattgatcgataacttggtattttccaagtatcgataaataccagaattataaattacagacgaagattgggatcatggctatgtcattcccatgtttctttgcctttgcagtcttgaacatggttaaatccactgcaaattcttgtttgtttctcgtgtgtcgctttgcttatctaagttgcttagaaatggtggaaagtatgattgttcattgctttctatgccatcccctaccctttcaaccagttaccatgattctttaagattttgttcctgacttactatcattccaaaagccatgtgaagttcttcgatccgagagcgccacacgataacatttctacccataatcaaagatcaagacatgtgctttcagtgatattgtcatgatctgtgatactacaatactagtaccaatgcatatgcactatattctagtgaacacattgaattcaaagtttgaaactttttccctccatgctgcattctcccaggtcatggcaagaccagctgcatggtccttcagaataatcctctgaacctgacagaatttctgtcacaattttttttttcaggtgaagattcagaagatgagatcaaacctggaggagaagctgatgaggaggatgacgaccgtgcaccggcgcgccgaggagtggagagcgacggcgcaggcgcagcacctccagcagctgaagcgcgccgccgagcaagtccggcgggccaaggccaccagccaccatcaccaccaccaccacctcgccggcagcaacgcctcctgcggctgcttcccctgcaatggcagcaacaacatcatcagtggcaacctcctgaactactattagatatgatcagctagccgccatggaagaaggatcaagaatgccaatttgttcgggagatcaacgggttcttgttgattgtagtggatgtttgggacgtgtgaagatggagatgtgggagataatggtgtcatgtgtatcaaaaaactctgatttttcaaggtgatatataccagattgctgaatgccaaatgtcatgaatggtttgtgcaaatattcagaatgagcatcatcaatatgaagaacaaattgaacagctgaaccaagaatttattagcaaatcctgaattttcagctaagcgattcatctaatactttcatgcaaactcaagccacattccgaatgcgcggaattttttccccatgtcctgaggaactcgaactatttcatgtaaacttgcagtgatctataaacttgcagtaaaatttttgtactagttcaaaatgtcacagtgataaatcttgctggtacttcaaaatgtcagagtactacaatctgaactccatgcctccttgtcttgctctgtctctcaagtccatggttgctgctggttcactaaacagcacaacatgtagcctcattcggacagttcttcccatcaggattcaggaatttctcacaatcttgctcctacccacaacaggtgaattaattaggccattaaggagtactaatactaaattactgtcagctagaacaagaggctcgttgcctcgacattcgtgcctgcctgccatgccatgcctacaaaaacaaaaacagaatcaaaccccagcttaggttcagtcctgctgctaaaatcaagattggctaagctatcttaggttcactaaccccagcttaggttcactaaccaacacatcgcttttgctgctggagtggagtagcttgctttgtctgcttgtctgaacaaactaatctcatactctgacgacgttgctgccaaaacacccaaagaagaacacatcagcatcgccgcaaagtaaccaagttaaattaacccgactaggccatattaatctatcactaatcctcgatcagtaggctgccgacggagaggaggacaggtccacatggggaggcgagccattgctttgaccggagggtcacaactgaactcacacgggtgagatgagccaagcagcagcatcgcatgctctagctaaagctaagctagatgatgtgtgggggccttggaggttgtccgttttggaggagccagagacggcattgttggctatggtgaatgcagtggcacggcaacctaggatgccattgccattgccatggccatggcctcgcgtgcgccatgaagaagatgtagacagtaggctgcactgtagccttctctctcaccttgtcgtcgagccctgtgtcccctgaatgcagagagagaaagagggtgagagtgtgtctcaaagtgtgtgtgcaatagtgtgagagagcaggataaaagcgagatgggagaagataaagccctagaaatgtgaacgaaagcaaagaagaaaaatactccactctactgatttgtaggtaaaactaataatttattagtgacatcaaacagtttagaaatgaaggtatgaaaagagactacgataaaaaaaaagaaaaccaaaatcaatcctcaagggtaacttcaaaatgcgggatttgaaaaacacagaaatagaaaaaaaaaggataggatgtcattcctcgtcgaatcttgtaataagtgaatccatgattttatttttaaaaaatattttctataggaatttcaaaggattttgggaatgccattccttcgttccaaatgaccatataagactatttttcaatgaaataaaatgatttattcggattgtaggaaaaacaaagggaaaatgaagaatttagatccctaaggattcgatgactgtagcaccgtttggttcacatgaatttatcttagggaaaatcaaaaggaaattttcctttcatgtgaattctacttagaaataaagaaaaacttccatacactccaacctcctactgagaagcaaagataaaattccatccactccaaaatgttcctacgtttttactttgccatgtccgagcacatattttacaatccaatctaaagaattctagttttttcactcctctattttacaaatgcattgtgatttttctattcctacgtttttacaatattgtgttccgaagaagccctaaaattcttttatttttccttttgtttcagagcagaggttgaaaagccaacaagccagaatgttgctgatagcagaggcatggctgcactgaacgagaagagagaggctctgcttttgttgtaggaggtgacatgaggagaagggaaggtacaggtactaggacggccatgcgtcggatgttacatgacatgcatggctctgtaaaactgtagaagagagatcggtgagaactgaagacgacgacgtgcaggtgacaagctagggaagaagaatcgtggataggcgtcgcatgggtttttgctgctgctcaccaggaaacacgagattcttcagtgcagaaaaggatgtcgattttaccggttcatttgagtaattttttagctacttcatccgtttcatattataagactttctagcattgcttatttatatatatatatatatatatatatatatatatatatatatatatatatatatatatatatatatatatatatatatatgttaatgaatctagacatataatgcgtttagattcattaatatttatatgaatgtagtcaatgctagaaagtcttataatataaaacggaggaagtaaattacaacctcttattgctgatatctcctccagtcctcgtagcaaaagaaaacaaggcagctaaattagctaagaagaggtactctgacacggctcttttcgaacgcaggaattttgacaagattttcgcgaaatttggttcaattcctgaaaaagaacattttgaaattcctccttgggagacctatacagagttttctgggccatacaaattacctgctaacttcagcaaaagcagagaatttcctaccgatcgtcctgngataatctctcacagtggcacagttcgttcatcttttcagggagatgtacatggcccatggcttacatgaccaccattgctgcatcggaggaacatgaatgtatcgatctctgctgctgctgctaaatgtctgaagaaagcatagcactgcaaaaggaggcgcggtacatgggtacattacatatgctgnctgcnnagcanatttgcacttgactcatcagctggatcaatcggcttgaacggcctgcttgtcctctgcatccccatcccatctggatctcactgacaacaatctcatgtcacaaagagccctcttttctccagtactcactcccggccatcctctgccattgcacaccacaccatagacatccaaggccacatgcatgtttctccttgcgttttccattgcccaatcttgtccatgtccggatgctttcatttttctcctggtgaacgctgatgagttcttcatcctcttcttctatgaacattccatgaacagatcagattccgaaacagatgaaccgagaagacaacacatatcagcatcagtgatgactgttgctgcagttgaaagctataacattctgctgtttggaaatgaaggtgtggtttatttgttgcaactagtcaatggaagtagcacagatcgaattaggtacataaataattacaattgagagccatgagtttagctgctaaaattgtggtggtcagaactcagaagtcaattttcaagtcatttgagggtaacttcttttgccactattctagacacacttctgcaggcatttatttacaatgcagaacgtgacaacattataatgcttccttagtgaaatccttagaaatgagatagtacaggcaggacagttggaagagttgttgtcaaaacaaggaaccaatgtacttctctgcttttcgtagctccaaaggatctgccattcaatcaaattgacatcaaaatggcccgatcctccgcttattgtgctgcctgcctgcccccgtagtaaaaaaaacagaccaagactgtcatacaaataacatgcacatattcttgggtgtccagtttttctttctttccagatcttgctgtaaatcctcaggactccagttatttaatctcagttcttcaatccattgatttttcactagttctaggcttctagcaattcccttgttgaaatgcatccaattctgaaaacatatatagaccatttcttaccaatgcaggtgtgttgttcagtcatcgtccttaatattgttgtcttcagacggaaaactatcaagcaaatcacttcctttgtagttcgtagaaccaggacgagggttgaacgggtactgactgtttgcgatacacaaggatgctgatgatgttctgttactaccagcaccccagatggcgaactttgtattttcaagaagaccctcagaagcaatccttgcatctcggaagggttcaatgcatttttccttggcaaacttaacacaagcttctcttgctgcttcaagacaagcggccatctcacgctcttcacatctctctctttcttgatagtcagttggtgctcctcccaataaacctttccaccagggtggcttgcatttgcgtgatgcagtaattgaacacccagaccgtgccccagcctgtggaatgaaacacagatccttactcattcatcatttttgttttaaaggtaaattctctactagaatagactttactaagtacactacacaacaatggtggatgagaagatatatgcaagcaagacatattgattcagcctgttggaaatcagttattatactaaatgaaatgcataaaacagaccatggcaccctagaagatgaagaaaaatattaaaggcagctttagttttttgatgatttactaacacacatgaattgtttcttggcatataacagttcttgatcaacacagtattgtttgtcaataagcaacacctgaacacaatatttgacaacctctgctcacataagtactgtccaatccttctgagaggataaattcctaacaggaggtgagctcacaaagaggaatcaatagttccaacacaatgcttttaaaatgataactctgcgcattgtaataggaacaagctgaaaggtatgattcatgttctttataataagatacacagaagacagcataacacactacaggatacatgcatatgtcaaatcaccgttgaaatctagttccatcacacataattattacttctagaacctaacactaacagtatttcagtagagaaaactgcaaaattgtaaatgcacttcaagaatatattgtgaaagcattatcaatcatgacaactaaagctaagcagtcatgagctggttgtttgctctctttaatgtatgcagctgttatacttcctgactgccagagctttagccagtcagctcggccagctgcaagagtagcaacagtcgtcttcttttaagggtaaaagatgcaaaaagaacatagtgaactgctgtatcaatagcataatgcgccacaagaaggattatcttgtcttgcatatggaatcaataaagtttgttcaaaaaaagaaattcaattgtgtaaagcatgttcaatcctagcaaatgttgtagcagcacatacatgggaggctgtcttcccttaaacaagggagacttattagccaaaataatagtgttcctcccttctatcagagtaaaactcccagttgatgcacacaggatcattacaacttactggttgagtgtccatgttgctccaaaaaactaaaaagattatattgtcatatacatcctgatgtatgaatgacacgctatagcattgtactgtgcaaaagtaacacagcctgtggaatgtacaatgttgtggagcattgtcaaccccaaccactaatctccagtagccaggagctggtttgctctgtttgatgtatgcagctgctaaacttattgcctagcataactagcgcaaggcaactcggccagctgcaaaatgaatcacaatctcaggggaaataattctaactgcagagttgcactggacttattaaattgcctttatcatcaacacaaaaaaaccatacactaggcaatggaacaatacctgatgtacccaaatccatcagtaaactattaagtaaaaatctttcgatgctctagaaccaattaactacttgcattagccaatggaacaatatttaatacacccaaatccatcagcaaattatttgcattgctcatagccgcacctgtaaactaaccgagaactcacattttccacataacgaattctactccgaaatagtaaaatcctacaatgttgccaataggtcacggaggagaagggggattcacctcgcattgcgacaggaggctggcctcggcggcctcccacgcggcgcgccagctcgcggcgtcgcggaaggcgaggacgggtggctcgccggatgcggcagacgacgggacgggcgcacggaggagcgggagcggcgggtcgaagcggaccacggtggccgccggggagtagtcctccgactggtcgacgctcccgccgggcaacggaacgtccatcgcgccaccggcgtgggggcaacgtggtcgccggcggcaaccgcggcggcggcggcgagggaagtggccttcgtcgatgcaattagttagggtttggcatataaacgagtaggattcgtttatatgcttgctggatcaagtctgtctacgtggcggccgagaggcgagagctacaaggtgcagacagaattcaactcaccattgcatgtctctaatatgaattctaatctgaaggtgaactcatcttatgacaaataatgtctcctccacgacgacatatttctcatacttacaagaattatggttaactgtgggatcacgagaactatacagacagctagttctatcaaaaagctctgtcgtgttgtgagctacccgaactcgtacgacaaaatgtctcgtaattcgtcattaattaaaatcaaccgatgccaatattcataagattttctagaaaataggtcgtaaatcaatgatgttttacatgttcgtcatatggtttttgtcacataatatcatatttgttgcagaatgttagcgaacccctatcgatagatcatagatctagctaccaacctttgctcgaacacaagactagatgatgaacggggccaagaacacagggtgtttggtgctgcgatgaagcggcagcttttctgttcttttctcattgcaaatataaaaggaaagacaaagacatgcaaagcaccatgatcctccactatgcgcaccacgatcggttcacggcgtgtgccatcccacacgcccccgatcgtggtgcacgactcgactatgacgcgctcggttcgcactctatgcaatagaagcgccgggcccaacttgcaaccgataacatgggagataattaacacacagcaacacacagtaacacatacatgaatccccgcaccaaaaaaaaaaaacatagatgaatccttacacaagattattattattaagtatcttcaatatgatcctcattaggcctagcctttcatcatttcaatcttgggcaatacttcagtcgccaagtccgggcgctgtttcctgtcattactgctgcatttcaggcctaggtatatcatttgtacaacgtgtcctgcgtacttgtcttccaagttcagtttgctgtccacgatttccagtgtcctgagcaacttttgcctgggtgtattctgtgtttccaaatttacacctgccgaactataggataaatatgtttctaaaaacactgcactttgccctgttactagctgcaacaaaatgatacccaaagcaaacacatctgactgaggggtcaattgttttgaactctcgaactccggatcaatatacttccaagtgccctttggttcttttgttccatggagaggtgttgctgtgtgttgagtatactctaaatggcgggaaattccaaagtcgcagagcttgcattcattttcagcgttgaaaaggatgttgctgggattaagatcaccgtgggcaattggattaggttttgtttcgtggaggaacagaagagcagagcatatgctggcagccactttaactctttcttcccatgagaaagattctctgtgttcttctgagagacgatcttgaagggtaccattaggtaaatactcaaacgagtgcgagtttctcagtgcaggctcctataagggtgaccaggtttggatgtcggattctcctgaggatctcaatctgcgttgtagtgtcatatatgagaaagaataagaatgcaagaaaacctttatattttgggcaaaattgctgtttgtaaaaaaacattttgtatgaaaaaggtgcatcaatggagaaacaattaagaaaacatagcaagtacgatacgaactagttgagctagtatctatctatatattatattattaaaacagttctgaaatgaggcatcacgttcgctgtggggctagaaattcccacattagtcgaagaaaaagagaaaatattttgatcgttagattgtagctgtttagatttttcaatggtgcagattaacacatgaaaaatatcgaagtccaactagaaaacgactaaaattgggaccggcctattctatatacagtgatggcaagttaattaaacctttatgattaggattaagagtcggacatatttgcatggaggtcctgtaatcaaatccagagtacaaatctaatcagtgtaggacacgttaactcaaggtagaaataaaaaaaatcaaataaccaatacagttggaataaaacaatgtaagaatatcatgtatgcatgagcaaagggaccaggaacattaggcgtccaagtaggaatacattttaaaaataactaaaattcagaataaacaataattaatattgaaagaagagtccatataggaacccaatacgatattaattaaaatttagaataaaaataaaataaaacccaaaattagaaaaataaaggacataagagtttaagtaggaatacaaattaaaaataattgaaattcggaattaaaaataagcaatattaaatgaagagtacatataagaacctaatacgagattaattagaattcagaataaaatataaaataaaaataacataagtttaattaaaatttgaaataaaaatcaaattaaattctgaaaatataaaaataattataggagttcaagtataaatataatttataaataatataatatcggaataaaaaatatagaattttcaataaacaccatccatctagaaaacgcaacaataacgaatgacaataaagagggaagaagcaacaaagtcgtaaaggagtaaagtgacagcagttgatgggacattcaaaaactataaacaaaacccaaatagaatcccaatggcgatcaaaaggagggacgacggacatgccgttaagcagtacgatcacggtggttggcgggatttctagaaagtaaaaaaataaacctcaatgatattaaagagggaagacaacaagggtaaaaataataaacaaaaccacaaattaatagaatcccaatgacgattaaaaggagagatgacggataacctgttaagcagcacaaacatgatggttagcaggaaagtaaaaaaataaaccataatgagaatcacgttcgaattttaaaatatcaatgacaattaaaagggaagacatcggatgggccgtttaggagtataatggctaacttgcttatggcttggtgggacttctacaaagttaaaagtgaacaccgacgatcattatattcgatttttaaaatccaaatgacgataaagagagaaggagacagacgtgcataagtggagtagagtggcggcgtttgatgggacttctaaaaattataaaaatgaaagccaatgagttgattaagtctaaaatttataaggttctattttaaagttcaaaggaggacgaatagatgccgtagtagatcgagcaagcaaataaatgtgtgaaaaaagagcaagaggtagcggcaagtgtgactttaaaaaactataaaattagaaaaatagagatgataaggttcagtcttttaaatcctaatataacgaggaagctatttaacaaattttaagtaaactcatatgtaaataattttgtatggatactagccgcgtaattncgcgggccacctagctagttattatattattaaaacagctttgaaaggaggcaccacgttcgttgtgggggctagaaattctcacattaatcggagaaaaaggaaaaaaaatttaaccattggattataatatatctagatttcaacggttaagatctaatacgtatatacgtatatagttagacattagagttgtagtgctaacgtaggaataca

SEQ ID NO: 9501 - DNA, 47062 bp, Oryza sativa
  unsure (1)..(47062): unsure at all n locations
aaaataatagatgatctcagttagaacagtcaatagtgtatgaatcatgaagcacattagaatttggaaggaaataaaaattttctatgttaccttcctcaagcaaagccatttgttcgctgtcctcttcaacactaacatagtttcctccacgaagccaatcattagcacaaacaagacgctcaaccattcttgggggttagtgaggtcctaaagtcatctagagttcgcccaccagcactgaaggctgattcagaggcaactgaggtgataggaattgccaaaagatcacgggccaaatgagataatattgggaatcttgttgaattggccttccaccactttagaatgtcaaattttggtgtgtcggctcattatcttctgatagatacttgtctacctcagatttgatagttccacttccaccctcactgttaagttgctgagtaattactgacatccacctacaactcactcttttgctggtttcagctgtagattcagattcagtaggttgcggtgccttatcttttggggtatacatttccttgtactcttcaaacaaagcacgaaaataggtattcactgtttcccatactttttctcctactgtatccccaaacatcaccttaattcccattctaatgcaatttgatagtttgtatctaggatcaatagcaacacagaagaagacagtgaagttgagtagttgatcccccttatctttctctcctctcttctctctgtccccctgcctctcaccatacttctctccccaatacttgtagtacttcattagcattcttgtacccatttccttgctcaacttgtcttcactatgagaccattctctcaacagaagtaatacatcagcaatctcatggaaataagtgtgagatgttgtacgactttgtacagaaacacggagagtgaggtcataaaagtgttcaagaaaatcagccatcttcctagccttctcccaatctgctcttgttggtacccctggaccattctctccttctaattctaatttgtagtatgggtcttcatcactatatctttcaaatgctttttggtacttctcagcagcatttaacataagataggttgagttccatctagtgcaaatatctaagtttagaaatgctttgctctgtaccttggctaactcagcacatttcttaaattttaccaacctagatgttccacatctgataaacttaacagcagcacggacacgttgaattgatgtaccaatttccttcaagccatcacctactattaggttgataatatgagcagcacagcgcatatgaatgtactctccttcagcaacacaaccttttgactcattcaagacccttctcatatacttaattgcattattgtttgcactagcattgtctactgttattgtaaaaaccttgtcaatgccccactcagccaagcagttctctaatgattttccaatgtcctcccctctatgtcccttaaccaaaaaaaaaccaataattttcttctgtaggttccactcattgtcaatgaaatgggctgtaacacacatgaagttttggctgttcttagcagtccatgtatcagttgtgaggcaaactcttacacaattgtccttaaaaaatttcttaagcttttctttctcatcttcatatactttaacacaagctctagtgattgttcttctagatggcagaacaaatcgtggacatgctaaagtcataaatttcctaagaccagaacgctcagataggacaaatggttgttcatcttcaattatcatctcagcaaaacaccttctaagtttatctggatcaaatttccaagtggtcacagtaccaagagtactattgccatcacatggtgtcagttgcaaagttccttgattatcaactactggtttgttaggattctttttgcaaatcttcagatgagctttcaaggatgacgtaccatttgttcttgagccgcaatgaaatagcttggtacaccacttgcacttggccctctcgtccccattagcaagtttgaccttgctgaaactttcccatacatcagatcttagagccattggttttctttttctggattcttcatcagctttctctccatccttggactgctgctgctcctccttgtccttgcttgcatctaccactccagtagttgacactccggtttcagtgtcttgagattgagtgtgattaatctcacaagcaacagtttcatctgtgtcccccatctagatcaaatgtttcaaatcactaaatcagaacttaccaacatagaacagcaatacaacactcattcactcaacatggactcaactagaacaaacgaacaagaagtgaagaacttacataggaggactgctcggtccgcgccgccgttgtcttggtcggagaactccacgagggtgttgccggcccgccgccagcagcccgtttgccggccgccgagttagggtttgggtctttgggcgcagggggcggtgtgctcgcgggcggctcgccggggcctacagctgctgctcaggggaggggagtgtggcgctgcggccgtgcggcgtgccgcctcgagcccgcgacggcgaggtagggcagcggcagcgctgcggcggcaccctgcgcggctggcggccgggctagcggctgcgccgagtgacgagtcgggggcgtgacgactgacgagtcgggggcgtggcgtagggttggccttgcccttgatggcctgatgggctgcgaactggtgggccgtgggctgcgccgccgcgagatatgtcggtttaatcggttgttcggttcggtttctctataaaaccgccgccgcgggatatgtcggtttaatcggttgttcggttcggtttctctataaaaccgaagccgaagccgtacaccgaatagcacaaaaacagaaaccgaactgacaaccgaaaaccgaaaaaaccaacaattcggttcggttcggtgcggttcggttcggtttgcggctaaaaaatgcccaggctgaaaacagacagatcaagatcagaagatgttgccaggatgttattcttgggattgagatgcagtgatccaatagtgaagaatcatccaatcctcgccacagaaattatgccccagattaattcaatgaagagtagtgactctaagaaggaataaatgtatgtacaaagcgggccaaaaataaaaaacgaatgggacaaagatactggagggggaaacgaaggacaaaagcctaatctcatactaaatttggcgacccttctccattcacagggagtcagggactaccataacggggattgcggctctagccagccgccaaagctctgcttcacccgtcataacccttacaatctccgcccatgttccgctcttccaaagctctgcttcacccgtcataacccttacaatctccgcccatgttccgctcttctagttgaagacctgattgtttctttccttccaaatcgtccacgctactagtgttgcgatgatgttgaatccccggcgatgttccttgaccatcttcttacggctgtcacacaaccaagaatgaaaagagggctcattgagcggtaaacactcggaatgcccaatagctctaagagcaatccaccaaagttgtcgagactccgggcatgcgaccaagagatgatcaatcgtttcctcgcattgatcacaaagaacacagcgatccgggtgcgacaaaccacgactccgaaggcaatccgctgatcccgttgaaggcagtctgctgtccaacaattctgtccgtcatttattccttcttaatacaatgatgtgctcactctcatacttagaggtgatgggttcactgtgtgtgtaggttggccaaaatatagtttgttcaacaaagggaagaacatatatattatcggacttctgttgtaatctgtttaagttcaattcttctctctttttttttgaaaggatttaagttcaactcttgaatggacatttcctgtacctcgtgcaccaccagttaataatttcgacttacatcagacctgaaaccttgtaactaggactcaattatgactgattgtgatcttgaagaacaattaagattctagccctaaccccataatttgatctgataaatataatacccaatactaccaatattttgatctgataaatagaacagccaatgattgatatatctgctacgctcagatttctggtgaaaaatggaaaatgcagtgagtaaagatgtcagctctgcagatttgtgacaaaagtacatgtttgctgctgtagttttgaactgtttgtcaatctgatatttctaggctttatgcttggcaaatcttcatcatcagctcccattggtccatcactctactaatctagcccggaccagcccatccaaaatacactgatgcttgctggctacatgtcaggttggctgtgcggctttcctctttccttttgaccctcttcgattctccttttcatttgttcctactttacctgcaatcctgcacggctgctgcaccttctttcatctagctagtagaatttgagtttttgtaacacctaggagaccatgtgggcccctccacctcctccccgcgttccccgctggccatgtgggccccgacgaagacttcctcgccctccatgtacctcgcacagagtcggccactgtggcaggcgtccctttcatttgttcttgatttacctatagtcctgcacgactgccgcaccttctttcgtatggtagaatttgagtttttgtgacacctaggagaccatgtgggcccctccacgttccccgctggccatgtgggcccccgacgaagacttcctcgccctccccgtacttcacatagagtcatccgctgtgtcaggcgtccctttcatttgttcctgatttacatgtagtcctgcatgactgctgcaccttctttcgtcgggtagaatttgagtttttgtgacacctaggagaccatgtgggcccctccatctcctccccacgtgccacgcccccgacgaagacttccttgccctccctgtacctcgcatatatagaagccaaccattgtggcaggcgccctttcatttgttcctactttacttgaagtcctacacaattgttgccccttctttcgattggtagaatttaacggccctatccttaaaattgaagctgattttgatgttttttcatcaaaatttatttttcaacctttacttttaggtcgctaagaacaattatataaaaattttattcacaaattacttctcgtttataaatgtgctgggccgtgagtttttttttacacctaggagaccacgtgggcccccccacctcctccccgcgttcttcgctggccatgtgggccccaacgaagacttcctcgccctccccgtacctcgtacagaaccggccactgtggcaggcgtcatcgcgtcggcctcatgcatgccgacgctgccnnnnnnnnnnnnnnnnnnnncctcgcctttttttcccgtcgtccgtgccgcgccaagtcgccaacaccgatgcacccggtgcaccgccttgccttctcgcgctccaactcccgcggtcgacagtccacgccgaaagtgtgagccgagctcacccacgccgcgtcgccactgtcgcgtcgcctcgcctcccctgtgccgccatgcctccttccatcccctcgaagccaccgcgtcgccattcgccatggctatagaagccacctcgctccaccatcctccatctttcgccattcccatcgccactaccgtcttcgctctcccctagtcggcccgaggcgcgcggtcgggcacttcgaagccgcacgccggacccgcgcaccgctcggccgcttcaccgccagcacctccatcgccgcctctgctccaccttcccgagccagctcgccaccagtgccgccatcactcaccccgccatgccaccgccttctggctaattctctcgccgccatcaccctcttcgccgtcggccagggtgccgccgcgctcggccaagccggcccccgcgcgagcgccgccctacggccgattgctcgcccgtcgccctgaaccccggcgctccatcggcggagcttccccagccgcctccgcctccgcttggccggagagccaccgaagccgccgccgccgccgccgtcttcatcttgctccgggccgccgtcgcgccgcgtcgggagacgcccgcttgcgcacctcccctcggacgacacccgccgggcctctccgtctcctcactccggctcctccgtccagccgccctccgccgccgccccgagccacgcctcgctctcttccgctcgggcgcgcgcgcgtggagaaagaaaagcggatcgggtaaagaacgagaagaggagaaatcgaggaggagggggagagaaagaaaggaaaagaggagatgcgacactgacaggtgggaccatcgagggcttaatgattccttaattaatcctacacagtaatcatcgccatcttaatccgcttctactgtctcaatgacatgtgggcccggttgtacttaatctctaactaaactcccttttaactcttgagtcacttacatgtgggaccacgattccttaaccatttgcgcacccggtccacatgcagacatgctccttgtcactgacccttgggccccacacgcactgaccatggaccgtgagccggtccaccacctcacctcacggtctaccgtgcgccgaccccccggtgccactgtgagtgggcccacaaaggaatattccttcggaatattttttccccatgaaagaaactctttttcctttgctcaaaaatttatttaatctttaaaatttcatatcttgcaaatcgtaactctgttcgactccgttcaatttccataatttttctaaaattgagatctgtccaacggcacaattagtttataatagttattatctactttatagggttttgaatggttctctcttttcaagtgcgtagtggatgttttgggggttcaatggatgcggattctctcgaagatttgaagatcatgaactaaggcaagccactcttcaatcatattgtccctagtttataatatgtgttgattacaaattgcatgattggtgtacatctttttgtaagcagcctcactctatgaacatgattgatggaccaacctagtagttgaattattttctataggttaccgttaaacttaacccttgtcgtccaaccaaattgaaccatcacatgacacacatgcccccaaacaggacagcaattaaaggtaacgagataaaagaattgaaatgaacagatgatagaatcaaaccgtataaacaaagcaacacatgcgagagaggggggagagggcacctggaaaaggaggaaaggattgctgctgcacaaaaggagagggagggccgtgcttatttctgagtagtgatttttttgcggggatttctgagtagtgattacatggttttttttttaccgaaaaggtagagaggctctaccttataaccattgtattaatggtgagtcaaaatggaacaatgtcaagaaacaggaaaaggggatagaaataaggataaaaggataaaaaaggaagaaaaaggaagaagagaacaaaaaaaaataaatatagtaagaaaaatatgcagagaaaattcaaaaggtgaaataagaaggaagatgaggatattatcgcaatcacctaggatgtgttcgctcctcctggttgggaacactcccctctggtatggaaaacagagcagtctattagcgcgtgattaattaagtattagctatttgttttttcaaaattggatcaatatgatttttttaaataattttcgtatagaaactttttgtaaaaaatacactatttagtagtttgaaaattgtgcgctcgaaaaacgaggaggatgggtttggaaaacagtgataagaacacaaccctagtcttgaattgcagcttggtgacggtggttgattcggtgttcccaaagttctagacaatcgatgatctgatatagtatgatctgattagcgcaagtcgtgcgcatttctggcccacgtgaggctcacaccctcgtgtagccatctctttcttttttttttcttttttctcgcttatttttttcgtcgcagggaggccgtgaacatttcttgccattttttccgtttatttttttattttagaaattgaatcttttatctttaatttttgctgaaagttttgaatttgagttgaaagtttttaagacttgagttgaaagtttttaagttttgagatgaaagttttcaaattcgagttaaacattttttaatatgagatgaaagttttaaatatgatttgaaagttttcaaatcttaacttaaatagttgaatgtttttaagatttgagatgaaagattttaagttttgagatgaaagttttcaaatttgagttgaatgtttttgaatatgagatgaaagtttttaaatatgatttgaaattttttaaatatttagttgaaagtttttaaattcgtgctgaaagttttcaaatcttgacttgaatttttcaaatctgacttgaaaaatttcaattcaagatttgaaagttttaaaatctgagttggaatttttaaatttaagttgaaagtattcaaatcttgacttgaaaatttttagatcttagttcaaatctagacttgaaagtttttaaatcttagttgaaaagtttccaaatcctggataaatatgagttgaaagtttgttgcagtcaactaaacaaagagaagaaacagacacagcaaatttttatcccaaaaaaaaagaaaccatataaaaaggatgctaagcaccgttagcgaaaaaaggggctaagcactattagccctgctaaagtgcgtgccgcctctgttcgtagcgcggaacaggaacaccccccccccctccccgggcaacctgattttaggttagcaggccccactgtcatcgtatgctgcacaaattgcaggatgtctttactgcggatagcttgttcatagaagtttaacttcttccatactcgctcagctagcttgcaacgcaaaataatatgatttgtcgtttcgatggttgggcaaatgctacaatgtgggtcggaagcccacgctttttaacccagctgccattggtgttgagtctatcacgaaatgctagccataagaagatcctacaggtattagggattgctttcaaccagatgaatggtgccggtggccagagcataccatgatgcgttatcaggttaattataacatatgctccagtcggcagtcgtgattcccattgagcttagaagtaaggttcgttcatctggcgaatcgttctggatctgttgagttgatagcagtggcataagcaattgtaattatgcctgtgcttgttctgataacactagatggaggtcaatagaccaagagccattttttctgaactgcgatgatactatgcagttggggttgtgttgacggaaaacacgacaacctggggaaactgcttaactccagtgcaggtcaaaggtttgcctcgagtgtgctaagggcgtaccagctggtttgatcctgcaaccagcaaggaaacaataaagcatgattagtcagccgatagccgatcggccgataggccgatagcatattaatggtggtctcagccgatgtagaccaaattggctatagactagatagatcaaagaatataaaaccctaaacatgcctcatcggctgtaacattgctaatcaagtttaataaagaagttcaagacaatattacgaaaatagccaatgaaaccgtatttagagcagaaaagatagataaagatagcgtaccagctaatactctagtacaaacctatatatgcaaatcaatctatagtaatatatcaagtagggatcaattgtcaaattgatagcccagccgatataacctagacttgatatattcctataaggtgatctgtctatatggatgacaaatatacacgactagggatgatgcagctcaaagtatgaaaagaagcttagagtctaaacaattaaggaattaaacacctttcaagatggtagatgccttagctaatctaatctagcaagacgatttagccgataccggcagaaaccctaaagcgagagacaactgatagagctaaatcgagatagtaaagctagattaactaagacatatgatatcaatggtcatgatacaaggactaaaatatctaaagcgatataatagccctaatagcacaagccatcgagacagattacctcttgtggatagaactcaccgaaacaagaaaagtaaaagggtggcgatgtgccgaagttgtattggattgttcgtcctctattgcaattctatggggtttatatttatacccccgagtatatgcaagaatttaatttaataattcggaattaataagcctcccgtatagctcttttcatgatttactcattctaaactaaaataatatagtgttgtattcggtgagtggtgatgggctacaatttattcatgatttactaattaattccaaaatttatatttaataatgttgaattgtacttggtttggagtctgaatatctcattgatttagtaattacaaatttcaaaataaagatatttatatgattttcagaaccactacagctatttgtactcatgttggagtcttaattcaatattttacttaatttattaactctaatatttgaaataaataattgtgagttgtacttggtctggagtcttgttattagatgttcagcgacacgttttatcaatcacgtaaattggacatatgctctaaaagtggccagatagctgtagtaggcatagcaaatgttaaatgattgaagtgcctcacaatgtcaaatttgaatagatttcaatcttaaaagggaaaattctgaagtttttaaattatatttgtcaacggaattatttattggctgaaacataacatatataattttttgcatgaaacatgcaactgatttattagtgtgattactcgtatggaaaaatgacatatgtggacaaaaacgcaacgacacgatcatcatcggtaaattttgctacactgctattttatggttttagctctaggacaccatctgaatcacttttggggaaaacacttcataaacgtggtaatttgccaatagacaccgtgccgattagaataataatttccggtggaagagaagagagaaatcgcgtgaaatgtcaaaaatgcccttgagcccacatgtcagctctccatctctcttctctcttaatcccctccttccagcgccgcaacgcatgccaccgcttcgaaacacctccttctcctccacgctccagtcccaggcgacgcggacgacgacgacagggaacggtggcggcggcacgctccaaatctgaccggcacagcttcggcgacgccgccctcgtcattctcctcctacggccgaccttctcggacctgctccatcgtgggcggctcgcgcccttccttactctgctccgctgcgctgcgcgcacgccagcctcaccgtctcattcgtcgtctcgagctcgtcgcggcggaggagatggcgaggacggcgaggagagtcgcatcgtcgtcgccaactgcggccactcccacagcggaggacggccaggacggcgggggcggcggagaacgtggagaaggagacggcgaggatggcaagagcggccgccatggcactcgcggcgggagcggcaaaggatggcgaggagaaaagccgcgtcaaagtcgccaactgcggccactcccgcggcggaatgtctccatggtgctcgacaccagcttcacctctgccgccatccgcgatgttgacttgtaccgcgccgagccctgggacctcctaccgccgcgttagtccatcgtcatgcacgctttggcctgagatcgactgcgacgacattgcttgcacgaggagcttcgggtgcccatcgggaatgaggacgaacagggccacgacgacatgaacaggggcacctttccttcatctcccaaggtgtgacatgtgagagaggagagatagcaatgctgacatgtgggcccaaaggcatttttgaaatttcacgcgatttctctcttctcttcaaccggaaattattattctaattggcgcgatgtccatcggcaaattaccacgtttatagagtgttttcccccaaaagtgagctcgggcggtgtccttgggctaaaaccacacaatagcagtatcctgtagcaaaatttgccatcatctaaaatggacaatacatgttctcagcttaaaagtgaacatatcttatgcatacatgtagatggtatataatatgatacatactacatattacatatgaggtttagattttattacatgtaggtgtccaactatttgcaaatgctccctccgttctataaaaaaaaatcaacttttggatatgaatcacgtcatgtctggattcgtaatcagaagtaagtctattatgggactgaggcagtacatgaacaattttcttcatataactctttaatgacatttgctagttgatggacgacaaaatgtgcacgcaaagcttagttgtatgcacgaagtgtgcaacaaaaaagggcatcggttcatttgtgcccaagagtcagaagaaaactagagaatccctttgatagaatatttgaaagatcctagtcttagggttgatcaaaaaattcggcggcaagtattcaaatatactttgcttgatgggagttgtatcgtcgaaatataagttgggtgttgttaaagtgcttagataatgatcaatccaaggttgctatgggagaagtgtgtgaagggatttgtggaacttatcaatcagcccataagatgaattgattacttaggagagcgggattttattggccgaaaatgattgatgattatttcaaatattataggggatgcgaagcttgtcaatggttcggcactgttcaatcggcacttgccgttgtattgaatcctatcatcaaaccatggccgttccgaggttaggctttggatttcgtgctagtcgcaacggattatttcactaagtgggccgaagccgtgccactcaagaatatgacttatacagaggtaattgactttatcttgaagcatattgttcatagattcagtattcctcaaactttgactacaaatcaaggaccttctttcatatccaaggaggtgaaaagttttgccaaatcttatggtattaagtagttgagttcttctccttactatgctcgggctaatgaacaagccgagtcgagtaacaagacattgttgaaattggtcaagaaggagattgaagaacatccaaagaggtggcatgaggtgctttccgaagcattataggctcataagatatccaaatatggtgctaccaaagttatccttttttgagttggtttatggacaagaagccgttttgtcggtagaggtgaatctcggatatcttagatatataaagcaagacgatttgtcgattgaagaatacaagaccttgatgggaggcaatcttgatgatgtgatcgataagcgtttaaaggctttggaagaaatagagaaagagaaaaagagagtagctaaggcttacaacaaattggtgaaagcaaagttgtttcaaataggagatttagtacggaagacaattttgcctttgggttctcgatctaaggagttcaataagtgatcacctagttgggaaggtccttatcgagtatatggaattgttcgagcaaatacatactttttggagacacttcaaggatagcgtttttagagagcaatcaatgggaaaatacttgaaaaaatatttcccaagcgtttggcaagacgcttaggaggtcctatggtcgttaattggattatcgtcataagatatcatgttctatgcttttaggttcacaatgttcaccaaaaaggcagcggggcatgtgtttacacccaaatttggcacctaggttcaaaataaggaaaatcgccaagatttgggaaagtcgtcagtttcctctacagggccgatctgaccaccgtgtattgcccggtcagatcgttgcttgaggaccggtttgaccggtggcatgtggccggtcagaccggcagtccgaaaccgactctgttttcgtcgggtcttgggatttcttgcttgggaaggcatgtggactggtaggaggcaagaccaacccctatttaagggccaaggccgattcgattaatccctctcccccaaacacaatcaaaacgttcttttatctctacttttagccatgttttctactttactctagttttagtctatctttatcgatttgtgccgtaaatcgtccgccgtcgctgcaagggtgtgattacccctttgtaagtttatcccgtaaaccttccgtttgctcacgagatgtgtagttatcctcatataaaactaaatcggcttagaggctgattttgatctctaaatcggctccgctagccggtttagccgttttctagaaaacccaccttgatttgtccctttggctagatcggggtgattggtgattccatattaccacaaggtgtttaggtgtcctgatcgtgattgtcttcttgtcagaaaagttgccaacaaaaatctcaagatccttaaatcaggtggtggccatgtcttcaaggaagtgatctctgttgatgtcaaaaacatcaactccttacttttagtttgaagagaaggtgggccatggttgaaggagtttgaccaccacacttctattgccttgtactgttcatggatcaggacaggattcaagttgatgctcagcactgacacctttgcaaatggctccagggagagatggcccatatcatgagatcttcaccactacgcttccactgccttgagtaaaccatggatcaggccatggcaagggctgagaacctaagaagacttgatctttgtatcatagaactgccactccatggtggtaccagttgagagctagctatgcatactgagcccaatacaaatgcaacagtagagtacttccaacttacatgaaatgaaggagaggccgataacaccaaggtcacggctcaagcaccaaatcaagttcctgggaggaattgcattgagggctaaccatggatctctgcagcataattacacaggggtgaacctggtatcaagttcaatgagctcaatccactcatcgtcggccatgtttttgccatcatcatcaaccaactagttcttacacttcattgaacaatcgatggttgtccccatgccaagcttgacagagtcaatatggttggttgagtcggcctcagcactgacctccaatgcgatggaagttggatcagtgttagtgctcaatgttgccacatctctagtggaatccttgctcacgggtgaatccaaccttggtgtcgtgacatgcctccagcactcgatcgatcatggccatcatcttgatgcacaggtcttgaatgatcttgtctgagttctccaccgccttgtccatttcagtgtcggccttcatggcctcgatgagagaagccgaagtcgttgtggccgctgatgtggttggggctgtagatggactcagtggttgggaacacatgttctggtgtggtaggagtgctctcggcattagactttgtggtggcacatcttggtaccagtgtcaaacacttggtaggcgcagtgtcggctctgtctccgagcatggtcggcacatgttgcacatccagcacgcagcccccatcatagatgttgtggccgtggaggtcaaactgagccctccccacgtcgcaggtcgcccgaaaccaaatgattgcctccacacgccatgcatcaaccataagcatctgcaccgccactactccataggggttgaagacttggtgcatcacgtcggtagaaacagggtagatgaggtggctcacttggacatggagtgcagcacttgcaccacatcccagccggctcggtttcatcgaacacttggtaggtgcctccatcactgacgcctccatgacccaaatcccactcccagatgttgccactaccatcacgcatcgcccacctcgtctccttgctcggaataccatggatcggtggttctgatcccatattgtcacgaaccaagcaccacccaaccaattctcaacgcacagaggcctcaatagattgcaaccactccaaatacaagtgttttgggatacaaattgaggggaatgagaggtatagactaggaagcgaaatcagacaaagaggaagcaggagattgggactagagaaaagtaatttagaggggaggcggcagcaaggaggaagaagccattttcatccaattatgttcgatccttctccaactacagttgcctcttatatcagcttcccttccagccatttgggcctaggcatgcccttgatgctccgcccaggaaccctgttaggcccatatcgtgacagaggtactgtaatatacggacgtattacaggaatgtgtgtttgtcactaggaggataatatagctagtgcatgcgatgtgaatttatttttcctttttttgcggggagcttgtgaactcagcgaatcatactccttttttttttgtcgaggagcacgtgattttattttattttatttttttgccgggagaatttatctgactagggttactaatcactcgatccaaaattcgttcctgacagctagcacgagggagccgcggcacggtggtggggcaaaagtaaagatgttagacgctggtgctgtgatctcagatttcttcttcaaatggggtcaagagaaatacatcttgcttcgcttccgagtcatagtgccaaccctcattgttgtgtgcccgttggtgcagtttggcttaatagatgacttaaacaatactatcgatccggccatgaagagcttcttgtatgctgtgtctgatggcatactgatgtatgttctaggggccatgcaagcctctcctgtaaaatatgcgctgtttccagtgtgggctcttgctctagtcggcttccgttctatcttggtaggcctccacgggaagtacgacatgcaggcggagctgggaaatgtggccaaacttttgatcgtggcgtatatgaatgtaacacacggctgcgagattgggcgtgtccctttctggatctactggagcattttggtcgtcaagtgcatgtacaggattgtgatacgccatcaagcatccaagaccttatggcatagccggagttcagagcttcttcaggcgtacatgggtcccaaccagccccagagcaactttgttgacaacaattcaagcccaaatggcgccatggaagggtgcaaatacttggtctttggagagtcagagcaagaacaatgctcctgcagaattagccctacgagacatgtaaatattaataaattgaggtctctagttacattacaaaacatttgtcaatgccttaaggaggacaacatcgtgaagaagcaagctgaagtattgaaggatgtgtgcctgtcctttgcattgtctcggttactacggtgtaggctggaaggagcaagattacatgcaggcatagattccattaaccggaagctactgattggcagttataaggaacgtctcgaccgactattcaaagtcctgtatagggatgttaagtttttcaaggactgcctcttcagcaattacccgatgatcttctcggaagggtttctctcactcaggtttgcttttgcgcagcttatgatcaagttacctgtgggcttatggctttccagtgatctcttttgggcagcaaggcacctgtcccaaaacaggcataatttatctgctaccgatctgaacatcgctggggctgccatcctcatcgtagtaaatgtggatgattatggaatgggcatcaactttgtaaactggacgagcttgtctgctgtgtgctggttggttcattgcagaaacaggagaaagagattgaggcttgttaggtggtttcttggtaggttaaattcgcaagaggtgagaggtggtgcatttagaggccctcttgataagttaataaattcgcaagaggtgagaagtggtggatgtagaggccagtatgccttcctgcaatcatacaaatacagtgcgtggaagcgtaggctgttgcactcacttactatgggaatgatcgcaagtaaggacgatggcacaaactttgccacctccctgactacgcctgagaaagtacgtactaccgtactctctcaagaactccaaggactagatctacaccacgatttttctagcagcgtcgacgacaaccattccctaccaagagacttctttgcaacagtgcagcacgacgccaacaaaccagcagaagcggaggagcagtactggtccgagatcatccaaagtggggcacccagatgctcccatgttattctgatctggcacattgcaacaagcttatgtgagatcaagcttgcccaagaacatgatcattgcaatggcagccctggattcctgcactctgccttgtcatgctatcgccgtaggcgcaatccttacagaggataccttgtggataagttgctggatggtgacctatgggagacctacatggtagcgaattggttgtcgcggtactgtgcgtacctgctggtcgcaaagcctgacctgctgcccgggagcatttgggttatcaagaaggacttccaacaaacaattcagtgtgctcgtcagatgctccatggttgtacctcactcaagagcatctatgacaagctcatcgcgacaataccatcccagttggacaaggctggacgtccgattcccttaagaagaggtgcatcttatgtcgagagacagtgcactgatagactacaatctccactatgaatacaaaatgaatcaatgggagatcatagccaaggtgtgggctctcttgcttgtgcatctttcacctagctgcgatgcacaagtgcatgccaagcatctcaggtccaacatggagtttatcaccatcatctgggcactcttctcacactgtggcatcgacaagagtgaattgtgggattatgtgtcaaaacatccaagcaagatgcccaccttgacaacatccgtccagatagtgatggagaaatacaagaaactagtggagcatccgagcaagacgcccacatacgaacatccgcctccggtccacctgccaccaacccactggcggtgaccttgaggatggtggtggagaaattcaggaaatgaaccatggtaactagtcgtcctactccctctgccacatcctcaaactcccctggtgcataagctctgatcccactaagctttcagcaataaactttttttttcgagaagttttgggtaacactttcatcccatatttcatttcattcagacaatttgtgtttgtcttactgtgacgagtgaaagtgtggttgctgcttgaagaacatggtgtgtgattgtagtgaactgaactatattgttgtgtgtggattgctattgaatccattactgtgagttcaaaaccctttggatttgaataataatggtatgcacgatattagtttcttggtatatataatttatcattgttacattctagggttttttagataatggatttaaataaaacccggcatctacatcccaagagatgtacacagccattgttacattctagtatatccttgtgcatcagattagttgttcacttgccctccatcctatgaggaggttaattaggatgggcactaaggactgttctctgtgtcttttctctgagtcaatgtgtgtaaactgtaaaatactgatggttggcctttcagtcaggtggagtaaagggctcatgacatggcctacactgtggtagtttgatttttattcatagacaaaaatcagttacaccccgcaaataattagctagcctacgcaattcagaaatattgagctgcgtcctcttaccacttgggaggagcaagcagcagcagctgacccaaaaaaaaaaacattactgtgcatggttgctttgccttgtcctggagaagcagttttcattttgtaatcatttcaacctggttatatccagataacaatctaaaaccacatgtttcatcaatttgggttatgaaaggcctcgcatagattagtgattccaaggattacactcagttgatgtggacccccgtttttataacaggaatcaatcgtgtaaatagtaccatttccctggatcaagtagtctggtacacacgaactcatagctgaaatatcaagtgcacatacacgagagtctagtacgaattattacatcataagcccgcaggcacagtcttaaatcatcggaccgagcggtccggaatacattccaaaaacagaagtaggtaaggcagcggagttaaggcagcggcactccattgccacaggcaacgaccgtaactaagacctactgggcgccatcgtcttcatcaccctcctggtagtaagcgtagggattctccgaagcttcatctccgacctctgattaagtttgtatattgcaagagtgagtaccaaccgtactcagcaagccaccacagcaacaatgcacatgacaagggtattcaaaggatggctaaggttcttttgcgcaaagcaagttttgtaattcttgtcacaagcctaagacttagcacagactgatcaaattttagtaccagtgttttcattaaacaacgacggttctgtccaccatccattgtgatcccaaggatagcttcccgccattgagtcgtcatggttttctgaggacgtccacattcccgcctctcaggaagtggctccatcagcataaaaatcatcatgtaatatcccatcccacacaagttaaagaatttagagtctagccaagtgtaatacatgtcccagtgctcaataaccgcgagcacagctattcgaatatatttagtttactcacactgcagtggatgtacactctacccgtactccgcgactgcccaacacatgagcctcgtcccaacacatgagacacgtcacggcaaagcttttcgataacctcgcattggcagtacccgctccatgaacttaaatcctcatgcactctaggcgtccatgtttctagcagtgagaggagttctggcgctcccgggaaagagaagtctcacacacatattaaattatggttcaagttaagttctctctctcacacactcatggcagtcctaccaatggcgacaccgatgtagggcacgcctctcggccctacctcaacggctgtcccaccgtagcgcacctgcctcactcaggggtgaaccatctatgcagggatactgcctccgctcgactatctaatccgctaggtctatacccatacgagaagtacggttgtacgggggtcgtttcatgcttaacttcatggctcggtccttaattgaccggggacggtactagccttttccagataccacccaaatcctctatccgccccagtcgaaaacaattgtttaattttatttctcctttcacaaatcatgtcatcaacatcatggcaatgtggtgctcatgtctccacatgccgcatctcaattaccttcccaaaggtaattgcccaagcatatagcatttgataaatatgagtatgcatgattttagaataacatttctaagcaattgtcataattgactagggactcatacgtaaacatggttacgaaggaataaaagacaaacaataatcaaggcatggcataatcacaagtaggatgttcatcattgcatgcaattttatttgtaaacaaaacaatttcgcaattgggatcaacatgttcaaggaatagtgatgacttgccttgctcaaagtcttgcggttcttggtccttgcttggatccgtaactccctcgggctctaaaattacgtgcgaagaaacgatttgaattcggttaaaattcaaataaagatccaataaatccaaatggaagtcgaatgcgaaagttgattcttttatattaactttactattcgcgaactagggcaaatccaatttcgatttatacatcctaaactattttgcgggtataaatattttgttagcataagcttttaatttaatctacccgagcattatatccatataataggttagaaattttctatcgcgagctaaatatcggacggaatccaaaaattatcttataatattatatgatttaatttagcctatgactaaccgattaaatataatatacgtctaaaattcctagtgattaaatccgaacttctaccgtgaatcgattacttatagagattatccaaaactaatctgtaatagtctataaaaattcatctaattgtttagtcgttaattacatctaaactactaccgcgaattgatttcttttagaaattaccaagaataatctataatttatattaaattttgcaattctatgaccataattaatctataattaaattctaattattttagatttttcttaaactattaacctccttaatttcttcctaattttctatttatttatccttttctttttctccattctctcttctctttttctttctttttctttcttctctctttttctttcttttctttcttttctctctctctctttttctttcttttctctctttctctctttttctctctggcggcctctcttttcctctccctctctctctcggctctctcccacccgagcggcggcggcggtggacgcgagggggaaggagggcggctcaccggcggcggcagcggcgacgacggcggcagcgacggtggcgcacggtggcgcgggagcggcgacgacggcggcagagcggcgcggcggcacgagagcggtggcgcagtggagagggaagaggggaggaagggtgagatggggtgggggaaaatggagagagggggggtatttgtagagaggggagaaggagagggggaggggctgcggcgtaatggcgacgcgacagcgacgctcggggcgggacgacggcgacgcgcgggcggcgacgcgatggcggcgcggggctcggagcgacaatgcgacgggcggcggtgcggggctcgagacgggcgacgcgacgggtggcgtgaggctcgacgcggcgatggtgacggcacgcggcgatgggacggcgacgcggcgatgggacggcgacgcggcgagtggcgagtgagcggcgtgacaggcgaggcgacgtgacgcgcgcggcggcacggggctcggcgcgatggaatgggcggcgcggcagcggcgcagggcgacggcgaggggacgggcgcgcggcggctcaaggcgcgatgccgacagcgacgcgacggtgacggcgcggtagcggcggcggcacgcgcgacgggcaggtgacgcggcgcacgcggcatgaaaggggacggggccagggggaccacgatcgaacatctatgccgcaatgaacagtaactttttcctatttatcccgattttagcccattttctatttaaatatagccctataaattctaatttttgcataaataaagtttactccatatttgtgttatcctaactaaaaattcaccctaatttaatatcactcatattttgtttatataatttatttgaatttttaattagggttaattctcattccatcgtactaaaatttaattattgctaatatggtcgcgataatattttatttatttccaatcccacctaatctttattttaatttatattttaattatttatttagccaacttgatttttagggtttattcctagttagttattcattattcgcgattaataaattccgagatcaaaatccaatgaaatagatgaataaaatcggcatgatgcaatttattacttaaaaagtttttgaaaatccatatttttggtgttttgatttcgttggtcgaattttcagggtgttacagttgatgagttgcaacttaagctgtactaaaattcctcacctgtgctccgtggattttgcaagcaatttctagtagggggcaactacaaactacaaacccaactacatccatcctactgttcgtcgcataaccgcaaatcaaactaactaagaatcatatactagcctagcctgcatctttttcgtcccatcaagagagcatccattagggggaaggatttagccagatcaggagacgcacctgactgattcgccgccccggaatggcagccgcggcggtcatccgtgatgcggccgagctgcgccgcgccgcgccgcgctgcctctgctccgtccgcggatcgagctagggctgcccccgacggaaggtggcccccggagaagaagcctctgcgaggggagcccctctggccggagcaagggcacgtacggcgagagtgatggccggaactggagcgggatccctcctccccctccgcctcgcccccatcgccgccgcccgccggtcaccggcacggcggcgcctccggcgatgaaggaagtataggacccacgttggcagccaatccaggcccatattttttggtggaaaggcgggttttccatatccaacccaactcaggcccatttcaagcacacgtgaagatttgtagggtggattaggttcactaccttaactagtggcctaatttaattcatatccctaaaccacagtaccggatattatatttcgacacctatatatgcacctgcactcatgtgtccctgtcaaggtcactgacaaggaggctgtcaagaaggcgacatccatcagagagaccggtgcagaacagaagcaaaagaccgtgccggttgatgaacaggagggagcaggaaagaacttgaagccttcaagactcgttaagcccaatcgtcgttttgttgggccagaatgggccgtgtgaacttgtaagctggcgtgagctggcagctatcttgagagaggggtaagaactgagagagagagagagagtataagaactctgtatccgaattgaatggtgaattttggcaatccggtggcgaatggcggcggcagctcaatcctgttggattggagtagtaataccatagtggagattgcctaagttcctcgtgttcttctgtgtgttcttccttgttcgattcttccagttcctctccctgtgttctcgttcaaggtcgttaacagtcccaccttccgcatgagcgtgacctggatgaggagcgaagctcaacactggtgtttccctcgcgtttggctcaggaggctgttttacacgcatggagtcgggcccgacagctgtgcaggtaaccaaacgaccacctcctgcacccgcacatgtgagccaccctcccatgtagatgaccaaacaaatccattatgctagctaagttctcgcttcccttgcgtatttcggatgtagattttcatccctcgtggatatgtcctcttgttgcttgtatgtcattaaaaatattaaaaaattaaaaaataacaagataaattaatatgaaacatatcactacacaaacatgcagggtcaaattcaatttctacaagttacaacaaaaaaaattaattaaactaaaaatagttatcatactttagcagatatatttgttatttttgttacaacttgtagaagttgaatttgcctttacatgtttgtggagtgatatatttcatattaatatatcttgtattttcttttttaaatttttttaataactatttaggtaatatgaatgaaacgatgggatatcccctcgagggatgaaatcattttttagtgtatttctgtattatggtgaggtgttgctgcctagcttgggtataatgtaaatggtgggaaattgtaatttccgaaattgctgagctagcatacatttacttttagcattcaaagtgatgttgcttgagcaataccatctaagaaaatggagataaacccaggaacaaaatatgaatacgatttttttccaatctttatcactacatacatgaacaatcctgatacctcctaaatatataatacgtactccggttaccagagggtagttgtgttacataaatacagaatcttgggctttcatatagctggaatgtacaggacatcgttgaggtcagctgggtctagcatttgctcgccgtggctaccgcttccaaggaatcctgcgtgggacagcaaagcccacaggtgcgtcgtgagttcacctggcccacggagatgcacgtcgtgcttggccgccttggtggacgcggcaaggtgaagcaggaaccccctccaaaacctgctcaggtctctccacagcgcgacctgctcgtcgtcgccgtacgccagcctcagttgctccgccagctgcgcgcccatcttgactatcgacctgccttcactcccgtccggagttcttgccatccttgtcaggtttctgtagatgtctgccatggatttgcaaccagaaatggcactgctggcctctttctgcacaacctcgtagaccttgttcatgacgaggccattgtccggcaccagtgactgagtgaccaagtatgcgcagtgattggacaaggtgactgcagctatgtaatgttcccacagatcatctgcgataattgccgttttcttcacaagaggtcttgttattattccgaagctgtagatcgtccgcgccgatgcctgatcggagaggttgatctcacacaggcaggtggcgatgtgccagacgagtatcctgtgggtgtcggcctcaagctcatcccctgcccacgagatatcgctgacaatgtcctgttggttggttctaaatgcaagcggaaagtaggattccagatcattgtcattcgcgtttcgcagtgcactgaatgactcgaacaaggcgctcttaacctctccctgcagctttatcttcacagggagaaatctccctttgagatgacgatatgcgaacaggacgcttctttcttgaagaacatccaccaagatgttgtactggccgattcgctgattccatttggcattggtgattagtctgcagaaaaaccccaatgcacactcaaacagcggatgacgcaaccttgagtccttgacgtacttgcacagcaccagtactttggtccactgcgaaagaacgtaaattgcaatctcccagacctctttgatgacgacaaggacgatgatacagtaagtcacgaacaacttgctgtccgtgtccgggctcttggataagcgatgaacaacaaatccaagatacatgactgcactaaccagagatcctgccaggagcatcctccaacccgggaaccccttggcgaacatgattgcgtgtttgctatagtggaagtctctgagaaaccgcagctccacctcggtgacgcggaacgccctctcgtagtttttgctacctctttgcaggatgtaatcgaagacgagtctcttcgtcttgggttgccgggcctcgtgtatgggcaggttgccgaacctacgccggagaagcttgtacagcgcaaacgagagacaaacgtccttgagccggttgtcttgatccactcctccaccaccgagaaaccggctgccgcgaagactccataccctctcaacggtgaccatctcatcagggttcgtcacgtccagctcgagcttgaatactggaggctcgaccttcatctcctgcttgccttctcctaggaccaaatacctgtaccctgccatggtggctggatccacatcctcggggttgccaagttcatgctcgtatctcatgtagttgcttacgagcctcatgttgttggtgtggatatcaaatgcgctattggaggagatgaagaaggcgatgatccgcagcgcgttgacggaccagatgaaccagagagggatcttcaggctcagcacggtctgggatctgatgaggttggctgcccacagggacatgagcaggtcgatgagggacatgtccttgctcttcctgtacgggatgccgatcctcacgctgtactgcagagtgaccaagaggacagcccatacctggaagaagtcatctggtttttcgtcggacgatgagagctgcatgagtcccagggtgtagtgcaccaaggagtagttcaacagcaggatagctcggccggcgttgttcagtggcctcaaggagtagtacagtggcgcgatggcgccgacggcaaacttgagccgcaaggtcaccatggtcaccaccacccagaactccacaccaatcgtgccagtgctctcatcttgcttgaagatccctcggatggtttccacaaccatctgtctgaagatgtaaacagcaaacatcactattgatattgatcctatcagtaatttgggggatataattcggcccgatttgcacttcggatcagcctttcgatcggtttgggtggaaggagtactacgcttctagctttgggctctgccgggagatgagagagggataggacttgtatgaggatgcttgcaggaacgatatgtactggacgaagggcagaagcaaatatgcaaatactaattgtcttacgagaacatctatctatctatctatctatctatcttctatctattactccctccgtttcaaaatgtttgataccgttaactttctagtacatgtttgaccattcgtcttattcaaaaaaattaattatttatttattcttttcatatcatttaatttattgttaaatatactttcatgtacacatatagttttacatatttcacaaatttttttaataagacgaacggtcaaacatgtgctaaaaagttaacggtgtcaaacattttgaaacggagggagtatatactaaaagttcattaaacatcctataaacactcctagattgccatgtggcactctacaaacgctcttaaatcgccatgtgtcattctaataaattaaaaggaaattcaagaaaaaacaaaatatctaaccgtagatttttattaaatctggtggacccattatttacaaccgttagatctattttaagaaaataaatatatgcctcccaaacctggccccacccagagcctatacttggacgtacgtacgtacatcacgtacgcccctatccctcaatccctttctcctattttccttcaattatctctcctattttcatgctatattaagttaaaaagcataatttgtgttaaaaattaaacatatctgaaaataaaaatttgtacaatatattgaaattcctacaatatattcatagtagatacttaaaaatatgaataaataatagcttcatgactaacctaataatgttattttgacttatcataatttcagaatggggagtgtaatttttttaaacataattttactttcattatcattacaggactaattaattgttgtgaagctatatatgtaggatgataaaataatatcaattttttatatttttatataattgtttgaatgacacgtaaaaatcaacaaatataacccaaaagtaacacatttctttgaatgttaacatatagtgaatatgggcctttaactataaatttagacatagataatataatttaacaaaataagtggataaaaagtagttgtataatttcattcctattgtttttatgaatttttattatcacaaattttgctttccaattgtataataagaaaataggatagggaatagaacatacagataaacgacatgaataagggggaggggcggacaatgggactaagcatgaccacgcgccatgtatagtcctgtgtagggttttagatgtggattttttttaatctattggttgaaaataatggatttatcatagtattaaattaaaattgatgcctagatgtgttttcatataattcgtagaaatatctcataatatattgaagtatagtatcaggtggtggatgtgaaattaattatgaagtaaattatttttgcaaggttattaatttttatgtggtggctaagtatactaattttgaattatgcagcaaattcttaggttaataataataatacatcaatttttaagttaaaatacatctcaatatgggtcttaaattgcatcgtggacaaagacaaagttaattaggtaattatgcctctctgcggcaagcttgcaattgcaccaatctccagtagtcataattttctatgatgaattacgtcagctatcaatcgattatgtctgctagtaaataataaattaattattgattttttacacgaattggtagaacaattaattacatatggttgcatacccaatatcttttatagcaaagttttctctcttttcaatagaaattcaagagtcagatgtcataggtaccataaaacccaatttccagtagataattttataaatggcataattgaattcatcatgcaatactaacagagagaacagagacaaatcgtacttttgaaatgtgttaggtattattccgttagtatactactaagtttctgaaatgctatctacgatatatgcccgcacgaatgcgtgggccacttttctagttttcttaattatggctagcagacagaactcttttgcagttgacttgatttttttttactatttatagtcccgtgagtcgttataacggtttctttattcagtttagctaaacgatttggatagagttgatttattggttttctataccatggttggtctttttaattaagaaattggttgttatggtatgaaggtagtttttaggagaaagtgggcgccgcagagtttctccctgtggaaggagaacgactttgcttcttgaacttgatacatatatactactggttatcgtcggtaacagcgctataggtagactgatatttatgtagcggtttcgcaggagacgctccgtgcagttctcctttgacgcgtcctatccagggctttccatttcggaaagcaagaaaatttcagtgggcactgaaattccaaagtttcggaaatttttaaaagaatcgtatattttgaacgagtttttttgaaattgtaacacatttttactgaatttgaaaaaattataaccaaaatcacaaatatttaaaaattttcaaaaaattcgctcaaaatatttgcttgctggaggggttcgaaatttcgaaccaaaaattccatccttggtcctatccggctcatgtttgacggtgcaaactgtgcaaggaccgagcatggaaagatactacttcttccgtattttattttaatgtatgacggcattgactttataaccaacgtttaaccacttgttttatttaaaatttttatataaatataaaaatacttatgtcatgcttaaagaacatttaatgataaatcaagttataataaaataaattataattacataatttttttaataagacgaaaggtcaattgtttattaaaaaattaacgggtatcatacattaaaataggagggagtaaaaagtactacaagcattatatacatcacgtaacacgctatctcaataccggggccatcgtcatcggctcggcgtaaacttacagtcacagagtatcattgccgcttcaccgtcattttccttttcatcaaaggggagaagccctccatttccattaatagaagtgtagaagtgattacaacaaaaaaaaaaagaagcgacccaggtccaaaccgataatgaaaccgatcaaaccgtggcactaattaagaactatagttgaccatccgtccatgtctcaattaccatcatgattaggtcaatggaatcgttgcacatccaggtttgacaaaaaaaaacaaacatgattcagagccaacagtaatccattatctatgaaacaacagaacatggggaccacaaaaaaaagcatgttgcacgctgcaaattgcatgatcacttctatagtaaactgcaaattgcaaacaaaaagtctttaaaaaaatgaataaataaactaaaccaaatgtcagcttccacaaattgaaaacaaattaaggttgtgtttcagaagagaggaaggacaagattgaaaagatacgtatgagttaagccattagcattagcatatgattaacgagtattaattattttaaacttaaaaatagattaatataatttttaaagcaacttccctattgtcacatcacaatctggcaccgccgtacaacggcacctgataggagcgtgttgtaggaaaaacgacgcgaaccgctttctacgaaaccgcgatctcagtaccagtcccaggacatagtgctggtacccacagtgacaaatatgaatcattgcaatccttaaaataaatagaggacttatttaccttaacttagattgcagctcagaacagccagagaatgcaaccgacgacacgaacgaggaaacaccaacaacagcagcagcagcagcggaaccaacgaactaacacccaacaccacaggcgacggctgggaaccaggacgaaaccctaatcttcacttcacttcacgacggaggaactatatatatttatatagagcaaggatgagtactttcgtacttagcaagtcacgagaatttaggtgtttaatgcaagcttagaagagaggcaaggttgttttgcaaatcctttatttgaaatccattttgaaaccactaagtgatttatttctttttaagtttgggtcgaaaagagacttgcgtctcaactcgacttaagagatgcttttcaacaactcaattggtaatgtaccgacctcccgggtcagatcattacttctcggctcccagagccatttcacttgattaatcggctcccagagccttttcattttctcggactcccaaagtccagctgcccagcagcacaacaatctgcttccactcgggaagcctagtctatgatgcccgtagacatcccgaatcacatagattcgttccttgaccactcaagtcatccatctgccacataggctgattctggtaacgattcccaaaccacaacaacttttcacaaagcattggcaaacaaatctacgctacaggaaacacctcacatccgcccatgaccgtgggcacggctgttcgaacagttagttaacctctgcagagggggtacactttacccacacgacattactaacccggatcacccagcccgtgagatcaaccacatcgggagaccttaaggctttcatgacaaggcatttcgaaagccgacacaggtttaccatacgccgacaagaggggtcccagaccaacaacaggttaggtcccagaccatactgtgccaggaagcccaggggtcctacccgacaccaccctggagaatccacttctctcggcatcaaggctcccctgattagctacttacttagccaggggtgtcccatttcacccatgtggtcgcacttgttatatgctcggatgaattccccacaggaatcggtccttatatgcgaatacgggacagtgccacacaggcacaacccccgcatcgcgagttttcataatttattttattttcaaacacgccgacaccacatgtcgagttttcaaggcttcttaaacccatttcccaagttttcgacaatcaacggtgtatgtgggatatttggtatacgcgctcagagagcacggataccgaagtaccacaagggtggagcgacaaggaaattagggtatattagcctataggaagtagtgcgactactgggtaggtccatcggtttggcacgcaaaccaaggccaagcatgttatgagtgtgttgctaattgttgtcgaaacgacaaccgcatacgtcaaaagacatggtcacccaacagtggttggaaaagaagtaaagtgtattaatttgagaatttttcttcggatccccctattacatggccctatgagactatttatagcccccattacagattcttactactagggttttggttatacagtggaatttacatggttgcccttataaagggacatttacatgggtacatagtgtaattgaggttcatgggcccctgatgggccgtcgggcgatcatcggcccaatagcccctaggcttgatgggccggaaaagcttcttcggtcctcgctggggcgaacttgctatggcgaagtcgtctcccttcggcatatattcttcgccctgcatccttcgcccaagaggcctctggcttggcaaagcacccgcgcaatccctcgcctctcgccgtccctgttccatagtcttcgccatggggggacttcgccctgactaactttgacgtctcgggcttgaatccccactcttcgcatggtttcggtaggtttggtcgaagggcctcatgccataccgccaacaagcccctcatgggcaagggtgagattggagcttcggccgagaccatgcaaaccatgtggtatggtatgtggcgccccctttcgaccgatgctcctgccgaaacctacattgttcctgcaaatagagtttgttgtctgtgcggctggtatcgttttgccgctcttcgcctcctgcggacggtggtatattatttttatttttcccgggccgaaaggaacagtaatgggccctccctttgtggctttttactgtgcaacttggtcgatgggaatttactgtttcacctaccctcgcgacacgtggcgctttattactggtgggtaggcgaaacgtcacctgggtgggctatatattctctccccgttcccttttcaccgctagacccgtcactttcaccgctcacgcgctcttcctccgtttttgctttcacggcaccccttggccctttagacccttctctcgccccctttgttcgccactgcacacacccttcgtcactgcatatatccttcgtcatggctccccgcaagcctaacccctctttggcgaaagggccctaccccggtcggattgacgacgacaccaccgcctatttagggatttcactcatagacgacagcgagttggcgaagttggtcagctctggggcattagtcgaggggtaggctttcgccccggggaaagctgttgtaccgaagcccgtcgacaaccggacggtggtgttcgccgtgttttttgaggcggggctccggtttccgtgcaacgagttgttgccaaagatccttcgccttttccatgtggagctcccatagttgagcccgccggcgctggttcggatcgctatctttgactaggcgtgccggacttccgggtttgagcctagcgccgaactcttcggtgccatatttttcgccaccgtgaattcgaagacggtgattaccccggctagaacgaagaaaacagtgtttgggagtgtgaactttaatgttcgccccgagcggtccgatctctggccggtgaacgccgccatgtcgaagtgggaccaccattgatggcgaggtggttttaccacaccatccccttcgaggctggttctgactcagcgaaggccctccggtgccggcgcagggcgattgcgccgaaccgaaaacccaagatcgccgtggacgccgctatggaggcacgattcgctctgctgcgtaaggattgctcccgccttagctgtcgcgacttggtggaggaattttgtatgcttcgcatctttcccctctcccagtcgtggcaagtcgcagttgatcaaggcgaagaggttgatggtttgccgaagttggttctccctgagggaacgaacggtaagactgctctttcgctatgcactcttgcgctttgttattttgctttgttcgacgcttaatgtggctacaccctttatttttgcagtgttgaccctcgaccaggttgacgctgaagctcgtaggatgatcggcgacgtgtcggtcgtcgagtatagccagctgctaacacgacaaccagctggccaggcgaaccgagtttacaacggcgaattgcctccccgggcgaacccccacaaagccgacgacgatgcagggccttcgcgaaagcgaacacacggacaagtgaagcttgcccctaggaaacgaagggttcctacttcctccgattccgacgccgacgacgaggacgacgtcgaagagcgtgacggcgaggacgaaggagaggaagaagaggaggcggaggtcgcagccgaaaaggccgcggacgaggcggtcgaaaaccacgtcgacacccctggctatactcctactccaagtccaggtcacaacaagaccggggtggagtcgaacagctccccccttcgtcgaaaggatttggagggggcgaaagcgctagttgcattttcggcaggcaatgcggcgaagggaggtccgatcaaaaagatctccaaaaagaaaggactcgtcgacgtcgctcacgttttcagcgatgacgagtcctctaacgagactccgacttcgcccgctggccgcagcctggatctttcgaccgcccccattctttcactcggcgctgatggggcaggtggtagcgccgccgcctgggcttcggcctccgcagaacggatcgtgacagctgcggcgatggtcttcggtagccctcagcgtcagccggttgtttcgccgctagtcaaggcgaaggggaagggtgcggccgtcgaaacttctgcctcggaatattcccttgcggcgccccacttcgcccctggcgatttcgagacccgggcggaccttattccctttgtcgagggagtaagcaatcttgtcttacctgccagcaccccaagcctattcaccgaattgaatgagttcgattaggggtgttttgctattaaaagcttagcagttcgggtatgctttttctctcttcttgattttcctcttctttttacatgtctcataattaacatttgctctcttcgcctgctcctatcttgcacctagattcttgcggctcactgttcgacagagcgaaccgtgcgggcccgtcttgacggatttaagaaccgtcttcgggccaaggatgacgaaataggccgcaagaacttggagatggaagccctcgccaacaccctgaaagaggcaaaagccgaaaacaagcagctccaatccgagttggagaaaggaaaagaggcgagggccgaggttgatcgcctcaaggccgagcgggagaaagaaaaggctcattccgccatgctgaccgattattataacctcactgagccgaagatggaggctcttcgcctggaggtcagcaaggctaaagcgagcgctgtggaagagtcgcagcggttttcgcgggagatggcaaaaaccaccgaatccgcgagaacggcgtgccaaactctccgcctcgccattactgacatgggtgcaaaggtgagcggggtccctgccgaagatgcctcggccttcgacttctccgagtggacccagcaggctggtggttcgatttcgaactgcgccactgtgtacagcgattgttgtgcgtgcatatcggcgacctttactatgggccttctacaacagtttggctgcgagcacgtcgccgagttccccaactatgcgaagggggactgggagatcagtgtgcagaacatttcgcgcgcgcttcgtgcgtggcgaaaacagttctggcagaaagacgccggtccgctgacaaggcgcaccttttggagcaactggcgaaggcagaggcggcagaccagtgcgaagaagaggacgcggcagccgaagggggtggaggcgatgcccaggatcacccagaggtgtgaggccatccgcccttttcttagattttcctagtttcccttcttcttttgtgtttgccgatagtggcgaacgatgtatattcggcaagccaccgctaaccccccttattgtagccgaaaaagggccccttggatatttggaatatatgactcacttttagccacctttttgtggttgaagtctttggcgcattatgattacgcccatttcacattgtgcagtactttctcttttttttttctttcgcctattcttactatgcaaatcgtcttttgccctttttgcattgtctatcagggtgttcgccgaaagttgtgcattcagcctccttccgggagttggcgaagccaaaacgagaaatttgtggcactgaaggatttgtcgaaggtacgatgcccatttcggcctgtttatcacaaaatggtgataaacggccgcagctataaggtttttaaggttgccgggtggctgcgggcgcaccccgggcgaaccttagaagactacgagcttgttcattcaagacgtttcgaggatatggctcgcttttggcgaaaccatcggaagactgatcggcaggaggtgatctcccagcgtcgttacagtctagtctgtgtttcgcccccttctcctcttagggttgtgtatgatattagtagcgatgacgaacctagttcgcctgatcattccttagagagagagtgatcgcaggggcgaagatgtaatttatctgtaagctgagttgtaacgccattgctcttttcttatcacttgtaccattgtgatgggtttgtattcttcgatacatttttattcaaaatcaataaaggtgcgttttattttcttttcgctatttttgcattgtcacttcgcgtgcttttcgttgggtcagaacgtgtcggcccctttgcatatattagcgaaataggttttgacttttcagctttcggcttccatttttgatcatttttgtaagcacgagtgctttccttttgatcgagtgtaacggtgttcggctagttgttctccgaaacaagctgttgcggtttcaaagtttggcgagcgatgcttcggccgattcgtttcgccccctggcctttttcgctgatcaggcgtttgccttggggtttttccacaaattatcaatcatacaaacaaacaaaaagaaggcggaggacacagagattttatactggttcgggcctccgtggtggataatagccctacatccagttttttttgtcttttttcatttttcctcttttttttttcttttcttgacggaaggcttacatagtgccgaagggcttacattgtgctgaagggcttacataatgatatatacatttttacaagttggcgatttgggtgccacccgttctagacatagaaatgcttgaaagagacagtgttccaggaatggtcgaactcttcgccttccagtgtcgccagtcgaaaggaccccatccgggacttgtgcttgatgaggtacggtccttcccacttcgattcaagcttgccaacggctaccgggttcgccttcttccttaggacaagatgaccaggcaacagctccatcggtcgaacttttttgttgtaagttgccgaagtgcctgtggcgtacttgcgtatgtgctcgagtgcttcgactcttaccccctccaagagttcgagcgacacctcgcgcccctcttcgtccccagagaacatcacccttggtgagttagcccctagctctgtcggggtcattgcctcatcgccataaataagcatgaacgggctgaacttggttggtcttgtgggggtcgttcgaagggcccagagaacagatagcatctcctctggccatttgcccttcgctgccccctcaagcctttttttagtgcttctaggatcttaccgtttgtgtgttcagccgccccatttgactgtgggtgcgcgaccgatgcgaacctgatttccaggttaagcccttcgcacatttctctgaacttgtcagagtcgaattgcttgccattgtcagtgatgaactcttttggcaccccaaaacggcaaacaatgtttttccatacaaacttctgtactgctgccgaagtgatcgctccgaggggttcggcctcaatccattgagagaagtactcgacggccacaattgcgaacttgtacccgtttcacgccaccgggaacagcccaatgatgtccagtccccatctggcgaagggccagattggtgcgatgggctgcaactcatactggggcgatgtttggcttcggccatggcgctggcagctttcgcacttcttgacttgctcaacacagactttcaacacagtgggccagtaaactccttgtctaaacactttggaagcaactgttcttgcggcttggtgtgcgccacatagcccctggtgtatctccctggccatttcctcgccttcggcaaaagagatgcagcgaagcaagggttgaagtaccccggagcgatagagctggcctgagaccatcttatattttgtggctctgagttgcaggcgctttgcttctgcttcgtcttccggaagccagccagtttcaaggtgttttacgaacggggttcgccagtcgtatggatcttcgcccagtttctcctagtcgattgccatgacctccaagctctccacaggcacgcttggtgcaaacaggacttcaaaaaaggtgccaggcgaatgcggtccaccacaagcagcagattttgccaaggtgtgcttcctcgttctggcctctaggtaaatgttcgaccgttatgccggtgaaacacttttccatagaccgaacgacctccaaatacctcttcattccttcttcttttgcctcaaaggacttgtcgacatggcccgccaccagcttagagtcggttcggattagcaagcgccgaacccctaatgctttcgcctttcttaggcccagaagaatggcttcgtattctgctgcgttgttggtcgtgtcgaactgcagccttgcggcataccgaatcggcacaccacttggcgaaatgagcactgccgcaatgcccgcccccttgtgcgaccacgaaccgtcagagtacatcacccagggctgtttgacgggctcgggctcgggggcgagtgccggtgtccattcggccacgaagtcagctagcacttgggacttgatagcagtgcgggcaacaaaatgcaagtcaaaaggggatagctctgctgcccacttgctaagccggccggtaacttctttgccccagagtatttcgcccaaagggtactgcgatggcactatgactttgtgggtctggaagtaatgcttaagcttgcacgaagccatcaccagggcataagcgagcttttccatttcaatgtatcttgtcttcgctccttgcaatgctttggagatgaaatagaccggtttctgccctgaatctatttcttggacaagggcagcactgactgccactggcgaagctgccaggtatagtagcagttcgcttcctggtgctaggctgatcagagctggcgggctttgtaggtattgcttcagctcgccgaacgctgcttggcattcgggtgtccagtggaatttttccacgccccggagggtcttgaagaagggcaaacctctttcggctgcctttgagaggaatcgattgagtgccgcaattcggcctgcgagcttttgtacttcacgtacgctcaacggaggcttcatttgctgaatggcatcaattttctcgggattcgcctcgatgcctctttcagaaactaggaaacccaacaacttgccggcgcgaacaccgaaaacgcacttctcaggattcagtttcgtacccgccgcgcgcaagttgtcgaaggtctcctgcaagtcggacgcgtggtcgaaagccttgcggctttttacgacgacatcgtcgacataagcctccacatttcgccccaactgcttgtaaaggaccttgtacaccagcctcgcgaaggttgctccggcattcctcaggccaaaaggcatcctgaggtgacaaaaggtgccaaatggtgtgatgaaggctgtcttggggatgtctgccgggttcatgtggatctggtgatagccggaatatgcatccaggaagctcatgagttcgcagctagctgtcaaatccacaagctggtcgatccgtggcaagaggaaatcgtccttcggacatgctttgtttaggtctgtgaagtcgacacacatgcgccattttccgtttgacttccgcacaagcactggattcgccagccactcaggatggtcgatctcttgaatgactccagccttgagcaatttttggacttcggcttttgctgcctgttggcgatcagcagacatcttgcgtagcttctgtttccttggcttagcatctggcttgactgccaggtgatgcatgatgagatctgtcgaaacacctcccacttcatcagagccccaggcaaagatatcaatgttcttcttgagtgcctctaggatgttctcagcttcttctttgcccatgtcgccccccaacgatacgagctttgcggggtcggcatcatcaatctatatcttgattatcttgctgtgaggggcgggctttggcacatgcttcgcccggtcatgcggttcggcctcaacattgtgcactgctctgttgattatggccagatctccttttgaagcagccaaaggctgaagccccttgaccacgatcactcctgccgggccgggcatcttgagcttgagataattgtgatgagaaatggcttcgaacttgttcaacgttgcacggccgaagatggcattttagttgtatgggatgtcgacaatgtcaaacaatacttgctctgcgcgtctgttttcccccgtgccgaaggctaccatcaactgtgcttggccgagaacttgaactgcttctccgccgaatcctcggagcgatgctggtgctggggtaaaggcttgggtagtcaaccccatcttggcatatgcttcggcaaagatgacatcggccgaacttcctccgttgaccaggactcgccggacctcgaaaccagctatatcggctgagatcactagaggatcttgatgcgggaacattaatccttcggcatcttctggctcaaaagagatttgctggttcagatactgcggagcccctgccgaagcgatattgtggaccgttcgcaggtgcatcttcttctgtcgcttcgacagttgtatcagtgggtcggcccttgtaatcacttggatcactctgcgctgcgcatcatggcgttgttcggccgggggtgcttgttcttgagctacttcacgagttgcttcgaccgctgctccctgttgcgtccttggatcttgcgcgttgctacgttgccgaatgtttcggcattgcttcgtggtgtgtgaagagcgtccatggaaggcgcagtagaggtcttttcagaccttcttgcggacaggttgttgatggttgcttgcttgctgggcgtcaaactccttgcgaagggcttgcactccttcgacagccatcacagccttgcccgcatggttggttctgaacttcctccaggtcatgggggcttgaccttgccttggcagttgtccttagatcgccggctggggctggcgaaccacgagaggaggtggttcggcaacttgaacttgttgttgggcttgagcagcggcgacggaggccttatcgtactcggcttgtattgcttgccgtcgcttgcaatcctccttgccccttgcgaacccgtcaatgatgtgaagtaggtgctcaagcgtttgcggctccttgttggcaatttttcttgtgagttcgccctcgagtagaccagctgaagcggcgtttatgatagacgcatcggttatgtcttgaacttggcaccgggcttgcgagaagcgacgcatgtactcccttatcgactcccccggcctctggcgaatgctgagtagatgctgctgcgtcttcggcttctcataggtgcctcgaaagttaaggacaaagacatcgcgcaattgctcccatcagtaaatactattggttggcaaattgaaataccaagagcgggcgatgccgtctagggcgagatgtattacctttgccttggtattttcgtcgccatgagccgcttcgatcgcggattcataaatggagaggaattcctttgggtcagtttcgcctaagtagcgtgggacgggtgagaacttgaactggggtgggattggatgggtcttgattcccccactgagcggtagccccttttcgccccctgccctgttcacggcaccttgctgcgggtacggtgtggcgaagggcaaaatcacgacttgcgcgtgtggttgggccatggcattcggctgcccggccccgattggtgatgtttgctgagccgccatggatgggtcgaaagttggttgtgaccatgtcatggtgacctggtttggtgcttgctttgctccgaagcctggcgttggtgtttgcagccgaacggttggcgcctgagcaacattgatggagtcgaactgcagtccttgactccacggcgaagcccccagacctggctgattcgaaggcaaccaactaggtgcaccatgacttgtattcccctccgggtgagccgaaggggcagtacttgaaatgttgtggggttggctgagctgttgaaggaaagcttggagctgcgcctgcagagccgaagccccttctgccattgtatgtggcacttggccaggcggttgaggatgtacttgggcagcaaccggttgagcttgcagttgcacgtgaggggccggatgcgctgctgcggtcgatggctgcccggcgaagtacattggcgcttgtgcggcttgtggcggaaggggctgggtcggcacttgtggatagacttggggtgggacatagcctgccgaatactggaggattggtgccgaagtgaccttggaccgccttgccgcctcgtacgcttgctgctgttcctgcatttggcgaagcatgtcttggagtcgtctcatgttctgtcgcatggcttccatgtcggcttcggtttgtgtctcggggtcaaggttgacttgggcttgcgcagcggcgagcgcagttggggccactgccggctacgatggggcggcttggggcaccagcaattggcttgtcgaaaggatctccgtcctggtttggagtgccctcgccaccgcagccaccttcgccatgtcagccgcgttcggcacctgcacagaggcagtaggggccgaaggcggtagtgatggcgcaggtgcggaagcagatggcgctcctccatcttcggcgacaggcgccgaaggctctgctccctcttcggcggccatatccgtcccggcgtcgctttcctttcgcctcgtaaccttctccttcacaaccttcttcggtggcattcgctctcagtggtttcgctcggaggtccccacggtcggcgccagctgttgtcgaaacgacaaccgcatacgtcaaagacgtggtcacccaacagtggttggaaaagaagtaaaatgtattaatttgagaatttttcttcggatccccctattacatggccctatgagactatttatagcccccattacagattcttactactatggttttggttatacaggggaatttacatggttgcccttagaaagggacatttacatgggtacatagtgtaattgaggttcatgggcccctgatggccgttgggcaatcgtcggcccaatagcccctaggcttgatgggccggaaaagcttcttcggtcctcgcgggggagaacttgctatggcgaagtcgtctcccttcggcatatattcttcgccctgcatccttcgcccaagaggcctttggcttggcaaagcacccacgtgatccctcacctctcgccgtccctgttccatagtcttcgccatggggggacttcgccctgactaactttgacgtctcgggcttgaatccccactcttcgcatggtttcagcaggtttggtcgaagggcctcatgccataccgccaacactaataatgcgagttgcaaacaaattaataatgattttctaattataggagcaattggttaaagggtgacttgccttgctcaagatcttcacgaagcttcacgaatcttcgagaaatcccacgatcgacaaaaatccggtaaccgcaactatacgcaaacaatcaaaacctaaacaaaagaccaagagaagatcctatttagactaaataatagtgacattagatagatctcaaatttacggaattattggaagtggaacggaggttaatcggagttacggatcgagagatatgatttttggaagtttaattggattttctggacatggggatatatttgtggaataaggaaaattgatttatggaagggaaaaaaggatttattaaatttatggaagagaatatttgtggattattggaaaagatattctcgagaatattttgactcattgacaagtggggcaaacaagaaggtgagagcgtaaattgagagggagcagatatggactttagctcatgagggatggacactgggcttggagggagggactagaagtggacttttcttgtttccttaagccgagaagggaggccggccaatgggccaagcccacgagcgcggagagagagaaggggacggctgactgggcaggggttgactcggtctggtggggtcggcagatgaggtggcgtccacgtggatgccacgcaagcgcaagggaaagaggaggccggagaccgcatcggacggccggcggcgcgcggagcgtcccggcgaacggcggcgagacggagcgaggcgcggacacctgtggcgagaggaggagatggggaatcggttcaccggcacggattagagagaggaggcacgacggcggccggcggcggcagcgaagctcgccggatgtccgacgtggatgcgcgagggaagggccaagagcgcgcggggccaggcttagccgaaacgattcggcattgcgacgcacacgcgacggcacggagaccgatggttgccggacttgggctcgcggtggcgctccgcggcggcggaaggggcgacgcggcgaaaagggggagagaggagggagcggccaaggcgatgtcccggggaggctgctagggacgcggggagggtgatggcgatgggattcgtagggagaaggaccgacggcggcgggagactgcacacggcggcggcgagaggggaggcacggcgccggagcggaaggggaggtcggcggccgagggaaaggtttggggaggtcgagggggtcccgaggaaggcgatggcgagccggtttgaagagagggagaccgacggcagcacgcggccatgcgcggcggcggcgagt

SEQ ID NO: 9502 - DNA, 8828 bp, Oryza sativa
tcatgcagccatgggagtgaagaaactagtcggcagtagacgtagatagcttgtgttgaagatgatgacgcctattagcggtgatggcgacgtagccagccgtgaagaagatagcatcagttggcgtcataataggccagacgtgcaggcggaaacaccagtcggcggcggacgaggcggccggtcggtgaagaggtagacgcccaacaacggcggcataataggccagccgtgcaggcggaaacaccagtcggcggtgaacaaggtggctggtcggtgaagacgtagacgcccaacaacggcggcataataggccagccgtgcaggcggaaacaccagtcggtggcggacgaggcggccggtcggtgaagatgtagacgcccaacaacagcggcataataggccgaccgtgcaggcggtgacaccagtcgacggcagacgaggcggccggtcggtgaagatgtagacgcccaacaatagcggcataataggccagctatgcaggcggtgacaccagtcggcggcggcgaaagcaaaccggcagtgaagatgtagacgcctaacaacggtgttgtgaccaaccaaccgtataggcgaagacaccagtcggcggcgacgacggcaagccggtggtgatgttctgactgatccattcctggagcgtaagagataagcttaaagccataaatcccttttatgcatatctggatttggatcctacagaacaaacatataggatgagtagtatctgatgtaaatataatacttgagaaaaatgcaagtattttaaaatgtttataaatatgtatttctcctcttgtcaattttgatttccccgagcagatgactccttacgtttaaacactctgcctgactagtcatagcccccaagcaccgggagttggcctaggcacttcccaaacatgcatataagtgacaagagttcgtcattaatggaacaaagtttcacgaatcagtatttactactcgggtacttttgcaattgtaaagagcagaaaataaatttatcttatctccatgcttttgatttattctgattaatacttagcaccttgcgttactcggtccatataacgagcccccgggtgctaggaatcggcccaaaggcaactatccatcgacaaaccaaacggaaagcatacgaagatagaactccataactcgataggcacttttgtactcagattatgtcgcaagcaatcaagataaatattatgaaaaattgtttaaaaaatatgatataacatctgtagcccccgactcactagtcaacggcaaaccagttgatgtagtgaggcagaggaaaaggaaaatatcatataaagaagaaaattaattatgacttagctttctagtctttcccttggtgacgaccgaggtggccgatgtgggaacaaagtcatccattaatagcaatgaaaacaccagccatagaagcagcttgaggcaactgacgatgaaagtgaagatgcccatcaacggcggcataataggccagcagtgcagacggaaacaccagtcggcggcggcgaaggccagccagtcggtgaagacgtggacgcccgtgaacggtggtgtgaccaaccaaccatataggcgaggacactagtcggcggcggcgaaggccagccggcggtgaagtcgtagacgcccaacagcggcggcataataggccagcagtgcaggcggaaacaccagtcggcggcggcgaaggccagctggtcggtgaagacgtggacgcccgtgaacgatggtgtgaccaaccaaccgtatagacgagaacactagtcggcggcggcgaaggccagccggtcggtgaagtcgtagacacccaacagtggcggcataataggccagccgtgcaggcgagggcaccagtcggcagcggacgaggcggccggtcggtgaagatgttagttggcaacagcaaaggtagccgacacgggtacatacaaaataaatcaatgaacagatcatctgcttagtaccacgtaaaaaaatataggtataaagaagcttgtgcatgtatgtttgcatatatcaatgcatatacacggcttgcatatattgattaattagccaactaatctcctgtggcatgaacgctagacacatccacacatcacccgacaggtcctgccatgcgctcgcacagatcgcaggtccgagtccagatcaaatccccgtcagaagcttcttgagatggggatcggacacgttcgactagtggtgcatgcaaaataataaaccacagatcaaatagagattagtagcaaaaagaaataaaaaagtatagatgattatggatgttaatcgatgcatgtatgtttgcatgtagatcgatgtgtagaagaagtcggtgtgtcagccagcttgccaggaaaagcattgattagctattaaaagaaaacagatgctttacgatctctatgcatagcgttattaggtaaattgtgcatcttctccatagcttgcatgcatgctcctgtttgcacacgctggctgtgcatgcatgccgccatgaacgttccagtggacatgtgcttgtttgattcgtaaatcaacaaatgcacgaatttgcttctggtcgtcgggtgttcctatgccgaacctgcggcatctccatctgcaaggaaaggagcactcggacacggctaggcgccaaagtaggcgacggcgatggctgtgtctcaattttagccagaacgtgaaaataataaaaataacagtagattaaaaaatcaatctcataaaaataagattggaacgacaaacccgattgaagattagagccactaaaatcaataagattgatctcagcgtttcttctgaagttgattccatcgcacttttcgacgggtaattcgacgcaacccctacctggcgcgccaactgtcgaaacatgaattcggcaataataaaaggggtagcgcacgagacctaaaagtggatggatgcagagacaaaggatttagacaggttcaggccctctcaatgagaggtaataccctactcctgtttggggatttgaatccaccgggtgtattatagatctgacaatcatatgtgctcctgccccctagagggcctcctgcccaccttatataggatgggggcaggattacaagatagaaaccttaaccaatacggtatcggtttcctaaatctattttacaatattatcaaatcaggactttaggccgctccataatataaaaggaaacgtaatacccaagtcatgatttgttacatattccatagatataagctatcccctatgactagtcggataaccatgccgtgtgggtatggggtacccataatctccacaccaagatgttccattctattttgggtgatcgcacattttgttcctactctgacagtgacgatggcacaattgaagactctgacccaattcatgggagtttcgctatcttcactggccttcacatggttcgccctcgtggtaaacatgatgatgtccagatgatcaagcacaagtccatgtactaccaatttttcgatgattacatcgaatgggttatctgaagctcatgattattttgctataagcacagctagcatatgtgccctaaattcactttggtatttgaagcaacgcagctttaatctcatatacatatgtccatgtttctagctacctagtggtctatatatcagagactctacttaattggattggagtagtaattagtaggattgtaagagactcttctaaattagtagtggtttctaagcaattaatatttctaaattaatagtacctaataagtgccacatcactgccacatgcgacgaagacctagtcaaaagaggcacgtaggttccacgttagtcaaaatcggggccaataccgccagagggcatcgtttgcactggttttgtaagtttaagtttggagatacattgtatccgttttacggttcaagaatgattttgtaatttggtgataagaggagggacctctggtgtgctttttccttaaaaaaatggagcaccgtaccactcgagtaaaaagtttgtgggtccatgggccaaagacagctgagcaatccctaaaagcgacgattttcttttatattcactactacaaaacgattttcctgtacatgcccctctttagattgcaaacgaaccgtaactggccgcgtctgcaaaaatcgtactctattttcgtggcgggtccttaagaggaccgcacggaaaaatctaattctgcaaacaacacttaagtggacagcaagcaaaaatgaacctattttcgcaggcggacctcttaagtggaccgtacgcaaaaatacagtttttttatcccatcccctctctctcttttccctctcactcacttcaattttttcaccttctctctctctttctccctgcctttcctctcctctcctctcctctcctccaatccaagcgcgtggggcgcgggaagcggctagctctccgccgacgacgaggcagcggccgagaacaggcgggaggccgtgcggcggttggtgatcggcggccgagcactcgacggctggatccatgctgccgccgctgacgacaacgattaggcggctgggaacgatgggctcaggagcggcttggtggatggcggaggccgtcccccgcccagatttgacggcggtggcggcgagcaggcgggctcggacggtagggaggcgtggcggcggcagatccggcaacggcgacggtgatgacagcgaccaggaggagggcggcgacgacggcttctagggttagggtttcggatttttttcttttttttttttttttgcatgtgggcaacataagcacccactcgcgaaaatcagattttcgtgtgcaggtgcgccacccgcacacaaaaatagcgattcttctagaccctatggcgcgtgcggttagcccttcctcacacgaaaacccctttcggaccgcacggaaaaaaatccttttttagtagtgatttattttttaaaagatttacaaaactaaattaccagttcgaagttatgcagaaatgtactccttatgtcctaccgtaggacaagacatataaaacgagacatataaatcatcctatgcttggacgagaaatgtgacttggcaaacgaccggataggcgtgctgtttaaattttgcgagcaaggtgctgcctctgaaaaggcatgacgaaatcgctctttgttagggcaatctactgttgcaatggcttatctagaaaaaaaaataagttgggtggcaacggacatattttacaagtgccccctcccggtaataaatcgctctgcaggaggatgagtctcacatttcctattctacggtaggacgatttatatggctcaacgcaccatagagaggaggagtatattcatgcaaaatttcaaaacggtaatttaatttttattttactaaaaaaataatataagaaaaaatcgcgactagcaggacccagacggccctaatccgtgccatcgcgctgaggctgagcctcggcagccgccgccatccttcctgacttgtccaaccctcctccttccttcctgtagattgcacgctgcccctgtagatcagcagcttccatctgatctgcatcccggccgactgtcacagattgcaaggaattgaaaggaaatccacatcctttgctgctgctgctgcaggtatgggtttattttgctccatccattgttgtttcgttctattggttggtctggttgctcgtcgtgttttgttcagggttctaaatctcccgctaaactgccgctatctcccgctatagctctttcagaagagtttcagctatttgctctcatgtacaatttaaccgctatagatccatttagcccgctatagctgtttgagaaactaaccgctaaataccttagcctgctatttaaaacattggttttgtttcttttattcctttacggaattactaaaattgtgtctccacaattcttggctgattatagtcagatttatcaacatcatatcgattctcagattcgttctattgcacgcatgcaagcccgttttgaaggccgagttaccaactgctcttagctggcatttttcttcggtcaatgtagtgtatgataaagataaggttaaaaggtagtcacatcaaatttgaactacaattacatgtcacttacattacagttacaccgtattaaaaaatgtaggtttagttctatgtgcatgtaaatttatatttttatctatttttgcacagaccttgcctgctagctttggtttttagctatgcagctagtagttatgctataagttcagtactgtcaaattgtttcatcagtaatgagcttttgttttgtgtgttacaattgttttgtcctggccgttgatctgtaatggtgaaaaactgactgtttttaggctgaaattgtggcaacagttatataggcactcccacccaacaatagaaatatagaatcatcccatcagataagaagatcagttttggttcggaaaaagatatggggaggcgatttctgaaccttgtggtggagaacgcccgcagtggactgtattctctgcgccgcatacctgcaaatcatctcttctacccatcaacaagagcagctgaagaggccacggcaaagtcccaagaatcattcaacgcgtacgttaaggagcaccatggcaggaaacacccaggcctccacaccttggagatgttggggaagcttccctctcccatgctcaacttcgaaccaaccccctgggatggccagcgtcgatataggaatctcgagttcgcatctctcctcggcaatgagaacaggatcctctttgccgaccacagtggacataccatcgtctttgacgccgactcctccaccgtctttgcctttcccaacctcatttctgacaagggttgtgcagccatttccctctccatcaaaaacaacaacaccaataagaacattagtggcggcatgtgggatgaagacagcctctacgtgatgtcccagagtgctgaccctgaaaccaaggattactgctttgaagtgctcaactacacttcttcctgtaaggattttcgtgggaggactccctattggagttctctacagccgccgcccttcgccaactacatgcatgccgacattacttcctacactgtggttgacagctccactatatatgtttcttctatggagccagatgctacttatgcctttgacacagtggggcatcagtggcgtcgcctgggctgctggacaatgccattcgatggcaaagctgagtatgtgccggagctcaagctgtggttcggactatccgtcaaccacccctacagcttatgcgcttgtgatctcctctccgatgcagcaaagccacccacggtgcagcagcagcacacttgggtggacctcgacatacctgaatcctggttgccctataacattgacctcatcaacctgggcagtggcaggttttgcgtcgtcaagattttccgtcatatggcagatgactgcactggtttctccgattacgatgacgatgacgcaatggactctgacctgattcaagggaaattcgctgtcttaactggcctacagatagttcgcccttgtggtaaagatggtgatgatcaaggtggtgtccggatgatcaagcacaagtccatgtactacaacttttgggactatgaaatcgaatgggttatctgaagctgagggttttactataaaaaaaatgggaccaatctagaaaggactagattgattttgaattaaggagggggtgaggctcgaacccggaccggctagctcgcagcttgcgttgctagccgggaagaccccaggcctttctcatgagggttttactatcaagcagctatctagaatatgtgccctaatttcattttgatatttgaagcaattaattctagctttaatctgataagctttatatcatgcacgtttctagctagctagtggactgctgtaaaagaccctagttaattagtaattaataggattggatttctaaattagtagtggtatctaggtataatatttctaattagtacctgatatgtgtgtacccattctaacgcaaatcgaattggttctgaaactaatatcattttgctatatatgaagcagaatgggttcgcctaaactgatttcattttcatatgaaacaatatgcttcatttgatatgcaatttatcatccatatttccggtggactgtaagggactagtgagtaggattgaaaatttggaactctaaattagtgcatgatctgtaagagtctactttgctaattgtatgaagcagtatcactcttgctggttgtatcttcaagagagctatcttgtcagaaatggaaaggcagagaaaacagtggagactgaagatttttccttgtcagctgaactaaatttggccaagtgttctatctgaaactaatattatcgttatgatttctatgaatcagccaatatggcctaatcttattcattttgatactctgaaaactgaagcaatgcttttatctgatatgcaattttgcgtccacatttctagtggactataagagactaatgatcaagtaaattagtggtggtatacttaacagttaagtaggattggaattctaaactagctagtggcatgaaatattctagtgtcttttggccataactgaatgacattactgggctggcgtgtcattgtgctagctagttagtggtacagcaatatgtatcttactgtcatctcctgattttcactacctctctgcaaccagaa

SEQ ID NO: 9503 - DNA, 14285 bp, Oryza sativa
atattttgtgacagaggtactttttagtagaatttttcattgttggatttggccatatcatctatagaattggtatagagcatacccccattagttttatgtttcttgctgcagagcttttttcattttgcagggttagccattatatttgtgtcattttgaggtgctatcttgtgttttgctgactttgttcaccttgttcgatttgtagaacttgtccaaagacaggtcaccttctggacgaggcggaaggggaaaaactcatttcctgtcacataaccatcaaagaccacaccactacggtagagctgatatgtcagcagatttgactccttcggaggaattgagacatatttatgatcctgatgcaaatgacttgggaatcccctcttcactgcacatatcaataccttctccatcttcggaatctccaagggaaattgtgcatggcaatggttttattcagcctccagctaagaaacttgagtttgggaccttgggagcattgcctttggaagttacatcccaagagcttggtattaacagattgaatactgcttctgacagccaaccttctgcatctgcaagccctatgtctctggcacataatcctggaattagttctaatcaaatgaggtaagtatgtttcgtttttttagctgtcagtcagcaacgtgtcaacgccaagtgtttatcagagtcatgccataactaataatttcctaaagagaaattgcggtccacatgcattttccaaaaaaatatggtatggcaatcatcagtattttcaatctaaacatgaaaagcatatttaccgaaaatgaaaatgctgttttcccctcttttccttcatattacctcattcaccttgtaacttaacctattcagttctaatgaatttttaagaaattatgttgcataattcctcattaaacaatttacaggaatgctcagccatatcatctcaaggacaacggtgatttcccaccgctatctagttgatgccatatagttcattgcatatcagaggcaacttggtccaagaaaagatactgataaatggtgcgagcacttggtgcaacaatagcaggggttattccacaagacaaacatcatccatcatgtacatcctatcattaacttcacattctcctatcttcaattcacccttgctgttgctttccaaaaaagaaagaaaaaaaaacagaaggctgatgcatcgcagcttgctctgccataacattccctgcaaaggaaatatggaggaaagatagaagcacaatgtagatacttatgttctctttacctttgtccccttgaagagggaacaagtgtggtaaagtcaaaaaatgctagaaagagggtgagctgtgtcttgctctgttgttttgacctcatgagcattccagttactggagggctcattgagtgtgctctgttttggtttggagaggccttctgttgaaaggccccattgtttgaagtaacatttgctgcctcaagcaatgggtagttataggggatagatatgtacgaaactttcactagatttactgtcttcatagaagcagtttagttagtctatactagctcagagtaaaaatgatccttttactttgcctgttgtgcttcacatgtctttttttttgtaactaatttgacttgtaacatagttttgctctgctgttgttagctcggctccaggttaagagaaagtggtatgattttgagtaacacaagcatgatttctatttacgttttgattagcatagttttgctcttctgttaaatcggggtagtcatttagcaagtttttcatagctccatgtcagtaagatcctaatgtagtgttgagatggccaagtcttgagatgttcagtcgccacgtaagcaaaccaaggtggttttggtttgaatggggtataaaatggacatcttgagaagtttgaggtcgtgaaatgtacgcttttgtagtttaaggtcgatttctaatctttttcaagagcttaggtagtaaagcagactaaagttgaagtcatgtcgctttcaagatgggaaacttcaaactctcgatggaactacaattagacgaatcatgaaccccatcttgataaaagataagactgtcaaagcagagcagtactcaaggacatgtttggagtttttcattggatgattagccgaaaaaattaattaccgctagtcactgactctatttctgttatatgatttcacactagatgccactctacgtcgtagcaatcttacaattatttctataaaatatttctgatggtagcattaaactacatgaattattgtattgatacccaattatgtcacttcttatattttgctttggtggctgggaaataaatagatttggcagatcaattattgtagtcaacttcagaaagctgaagaagtcaaagctcagctcgctaatgtgtatggtccttcgttcttactttagggtattaatttaggttgacaaatgctcctactagagtttaagggtaggttacttaccctttgtctaactctgaggggctgaagaaaaatgagcctaagatgtatattttgtctctggactaattgacggtataaataattctcgtttcggagtacaattctcggtaaaatcaagaaattgtggcacacgtgtttgttttccagctcttacattagctttttataagtacgaggacaaaagtaaaaaaaaatcaggttcatttccacgagaaatacttgtgatattatgaaatttatgtactgcccttttgtttaaaaaaagttagtctcatgaacaattgaacgtaagttcacaaaatccatagaagaatgaaccattcacaaaatccatagaagaatgaaccagtcaattcttatcctggcgactgatgatgtatcattctctaggagtccttttccttttctctgaaaaacgcaccaaaattgcatttaaaaaatgtataattgaatcgttgactttgtgctaaatctgtcgcagcattctgctagtggataataccttttgatctttagatcggatctttctgaattattgagagacaagctgattgtcatcggccatcattgggacccagatccattttgcctgttctcattctaaaccactcgtatgctgagtttttgtccaagtgtcatgagagctgggatagaatttttctaaagttgaaatggcatagctcctgcccgcttcctaaaaagaaagagagaatttttctaaagttccaaatggttgcagcaagataacttgtcagtttttgttagcatgagtgttttgacatgcataatagactcctttctcccaaatcatgcgctttcctatgtgtataaaggttaacatagtttgaaggttcgtattgttcctttttaagagaaacaaatatgagtatatataagcttagtctcttttcttttctttctttttgttttgttgttcctttagttgtggactacttgagtctatgtattcctgtaatccattatctaaaaagaaaaaacctaacaagtactccttaagtagtctgaagatgcttacttgttaatactactatttaattagttaatcaggtgtcaatcttaggagaagcgtgtgttccggttgaagccggtggtggtgttactagcaccctggcctacaagggaggttggacatgacaaggactccaggaaggagaacctgaaacccaaaatgaagatagaaaaaggaaaagagaaatgatcgtttgtctgagttcaagatacaatattcagtctagtcaaggaaaggaatactaccatttataacaatttattaggcatgctctaaaatttgtgaatactcaaaggagttttttttttcaaaataagagtatataagatacccctgacattgcttaagctaagataaaacgtgaaaacaatatgtcagattttttacgaaaaaaataagcaaagtcaaatacggatcatgtgaacatattctgaaaattcagttgtggttggtcttgtgctgttccaacgtaaccaacctttcctcctcttccctctgcacatctgaattgtcaagcaaccacaactctttccatcctctccaatcttaagcaggataacacaacgaattcttccttcccattcccattcacaatccttccttattcaacaatttgtctgatacttgcatgcccacaggcagctcaaaaagctagctacttgtttctgacttgtatcatttctacatagatagctcaaagcctctcaaaatcctgcatttcttgctcaaatggatttttcaaggcatagattcttcaaattcagatcagcagctgtctccttcctctccatgtaactaatttcaagctctcaagatcagcaagttcagcaatcaccagactagctaggctcactccttccacatatagtcacagctgctctcatcaatcaatctatctttccagcttccaggtgacaatcgagacctgaatttctgaacttttttttccctctcgtcacttcgtcagtagaaatccaaggtttatattcctctgtactactacacaacagagtgagcgtagtacgtgtctcatcagcatcaaaaagtgacatactgcaagcacgccacaattgaggccgattgatagaatcgaattccactcaaatttgcacggtggaagagaatcccctgcgtgcttgatttgatcaggatttatattggaggcatccaattccatcactcaaccggagctgtctgtctgtagctatcgccctatttctgctagctcgtggcgtgctagtttaatttcttccaaaattctccggcctcacctcgcgtcgtgtcgtgtcgcgtcgcttgcgttaggaggtgcctaagtactggcttgtcggcgtcagatgagtgcagggccgtgctgctcagaggcgcccatggcgtggatcgactgctccctcctcgcctggctcctcttccgcgtcgtcttcttctcctgccacgccaagcagttcagcatcttctaacactcgatctcagctaggctgaaaccacatatactccagcatatatacacagcaactgattaagtaagctgttgctcgccgacggtggccgagcatgtccggtgcacggcggtgcggtgaccggaggtcggagagaagttcggtggtgggcgacaacaggaatggatacgtcgagactgacccaactggtcgctatggccgggtaatttatttacttcttcttcttgcaatctgaacttgctcactttcttattccaaagagaaatttgacttgtttcctttcaaagttcaatattatcatgattgccaaatgatcagcaagcaattccgagctattcagggtcaattcagttcattgcttttttttttcgttcaaaagaaaagaaaaatcagttggttgcttttgattctacttgaacatggattgtgcctatcatgcacgagtttagttgttcagttctatcatgttctttagatgtgggctggtaattagtaattacatttcaatacacgttgtaagcatcagttaaaacatgttggcttcattctctttcagaaaagcatgtaggctttatgttctttagcataattttctagagtagattccatgttgatgtacacatcggagctaacacctctaaactatgcaagacacaattattgtgtcttcagtactttcatcggatccatttggcttttgctgctatctatgggctgcataggacaattgaatactccatccggttttattttaattgacgtttcggacaacgacacggtctacaaaatatatctttaaccttatttttctattataatatacaaaataaataaatgcatgtttactttattatagtgctttgaaagacaaatctatatatgttgttctagtttttttaaactaaatatttttaaagtgattgatggtcaaagttataaaagtttgacctcagccttatccaaaacgtcaattattatagaaccggagggagtattgcacattgaaacatatcaggtttgaggcttcgttattaatcctaagccattgctgtactgaaagatgacatcgtttttttctatatttggtcaaataacggaagtgcatcataaatttgagatgatgagcgagaattcaattatgatttctcttccaatccaatcagggaaggtataaggtgttccttatcaaacaagctagagttgttgtttggttggcatttgaagtttcctaatatgttggatttgatctgaatagataagcatgttccatgtgtcaatatgccaataatcagatgttgaaaaagtttcaagagtggagtatatgccctatctggtcatgctcatgcccaacgatttgatacgatcctctcacctttttcttagtgggttgaagacgtattggcaactttattagttcatctttttttcagtagtttctctagggttagaggtgtacttaccggcaacttatttgtagttatgcgagctttgcaaaagtgtcttacttttataaatttgacaactatccactactttgagttaactttttatatgtatagtaattttaacttttgatcagaagtactggttctttagtgctaaattagggagagtagttaattgaggtgctaaattggttctcgtaactcaaaagtgttgattttatttgactagagattttctaggcattactgtagcaaaacccgtttggaatctgcatttttcacttcagaacattatgaaaagaaaacttatataagattttgaaatcccatgtaaaattaaattttaaaagatgactataaatgcgcactacaataaataaataaataaataaaatttatcgcattctcttgaagaaaagcaattcattaattgcactttctagtgtagtagtacagtacacaagaatattgttttctgaccatgtgctcatgatctataagtatatattttctctacatatgcaagcatgtttgtttcaaaaactttttaaagtgcacgaagtataaaatatttagaatttagtgaaaggaagcatttcgaatcaaaattaaacttgtcaattcagaataaagtagtctggcttgcttgacaatatatagataaattatttcgctacgtgttagcatgcatatttctgacatttcagaaatatcagaattttcggatcaatatttcgctttgcactttctgctactatttcagaaacttgaggaatttcgcccccgcccccccccccaatttgaaattaatttggctgaaaagaaaaacatttattaattaagcaaattttaattaaaaactttaacgaaaatatgttgaaatttcaaccttttcggccttcgatttcctaaaatttccgaaatttcggttctatcgaaatttgttcaaattttgtactgtatacaatatgtgtgcagttgtcggaggtgctggggaagggtgcgatgaagacggtgtaccgagggttcgacgagctgcggggggtggaggtggcgtggaaccaggccaccatctccgacgtcctccgcaccccggacgccctccaccgcatgtacgcggaggtgagcctcctcgccgacctccgccacgacgccatcatcgccttccacgcctcctgggtccacccctcccgccgcaccttcaacttcatcaccgagctcttctcctccggcaccctccgctcctaccgcctccgctacccgcgcgtcagccgccgcgccgtcgccgcctgggcgcgcgccatcctccgcggcctcgcctacctccactcccgcggcgtcatccaccgcgacctcaagtgcgacaacatcttcgtcaacggccacctcggccaggtcaagatcggcgacctcggcctcgccgccgttctccgcggtgcacctccgcccgcagcgtcatcggcacgccggagttcatggcccccgagatgtacgacgagtgctacggcgtcggcgtcgacgtctactccttcggcatgtgcatgctcgagatgctcaccaacgagtacccctacagcgagtgcgacaacccagcgcagatctacaagaaggtcaccgccggcaagctccccgacgccttctacctcctcaccgacgccgacgcccgccgcttcatcggccggtgccttgtcgacgccgcccaccgcccctctgccgaggagctcctgctcgaccccttcctctccccgcctcagaaccacgacgatcacaataccattgctcatgccactgcgccgccaccgccattgccattggcgtgcagtaattccagtgaggagcaagaggaggaggaggcgccggcagcaaagacgacgggcatggcgatcaccgggaagctgaacaaggagcacgacaccatcttcctcaaggtgcagatcggcggcggcggcaacgtgcggaacatctacttcccgttcgacgtggcgaacgacacggcgatggaggtggcgacggagatggtgaaggagctggacatcgccgaccgggagcccacggagatcgccgccatgatcgagcaggagatcgtgaggttggtaccagggtacaagcagcacgagtattcgtacgcggatgacgacgacgatgatgacgtcaacggacaacctaatcccttctactacctctcctcttcgccgacctcctctcagggatctctctgcggagtggggcccacatcgtcagaggggtttcctggcccacatggaaaagttgactggtcaagaggtataacaaagtgttttcatcttactttccaatatatcaaaaataacgtgctattctaatctaaatatggttctagctatagaagataaaaagttgggttttctacaaatcacttgagaaggtagaagaaacttgcataaacatttttacatgcagtttggaaatgataaacatttgttcagaaaaaaaaaagaaatggtaaacatgacgtagtagcatgcatgcagatgataatattgtggcaccaacttccaaatgcatgtatacaaacatgtagcttttgttcatttgcccaactgcttttgttcctagctaggcaagaaattaaatttcctagtcaccatatatatgaacagagaaattggaagtcagacgtgcaaactactagaggtagttagctagcaaggtggttgatatatctttgtccatttgtcgttgctattcgtgccaatcctgtgacaccaatacatgcgtcagcgttatatcgatcgttttgttcctagtactagctagtggcagcttacagacagccatgcattaggttcgtgctgcttaattgtggctatatatcactgtcacaattgatctctgcagagacattttagacggataaaaattgcgttcagttagtcgtgttacaatcatcatcccggcggccagcagcataaatgtcaaatggaatattagtcatgtaacatacacatcaatcatatatcctaggcactatacatacacatggtacatatatagctcgccatttcactgtcatcgaccgcatctttattcatatccattcatttcatgcgcacgttattaactgcactaaccagctagtggtagtacttgtagtagatgatgttttgaattgactaatccgtttgatttgatgcatggtgtagattactgttactaccctccaagcagcgtcagcgtgagcgacgacgatgacagcagcacgagctcactctctgctgcagtcagcgcaatcagcctgcagcagcagcattgttcggcctcttccagcagattggggccagcatctgcatcagcatctgaagacggaggaggacacgccggacggccacggcagcgagagggggaggaggagcggcggcggaggaggatgagtcggaacaggtcgatggtggacatgcggagccagctgctgcacaggacgctggtggaggagctcaacaagcgcctcttcttcaacaccgtcggcgccgtccacgacatcggcttccgcgaccctactacttacggatcgtcgtcgtcgtcttcttcgtcacagcatcgccggagaagcagcagcaaggtcgaccacaagcaccactacatgttctgaataaactttttcagagcaaattagtactctaatttggtatgtacagaatgatcgatcagatgcagagtacgtaagtgtgcagctagctatctagcccgcggccacaaaattgtgtatatttggagagaagtgcatatatgagtgttgttcatgacaattttgccatgcgacatgtgaatgaatatatgagtgatatttgtacatatggtatgagtgatatttttcccaaaataggtaccccagcatatgcatgcgctgctgaccagagttttaactgctgaacagttcccctcaattgcactccttttgtttttaagtttcgattttgctattaaaattggctctcttttttgtttaaagtgttttaaggttaggtgagtttgctggtcgttctccgaaatcttttccaatccaagtattttccccgaaattgattgtggaaatcacgaggtgcctataaatcaagcgcccaatttttttttcaaaagtcgggcgctgtttcaccgagtagatcgaacatgtttcactaaatagatcgaaaatgtttcggtcttttaaaaagttgaaacacaaccaaataacctcatgaaacattttgctacaacgtatgaaacaacggttttcaaaaaaatcagagttgtttcaccctatttaaaaataatgtttcagcaaatagcaaaagaatgattcaattcttagaaaagtgaaacacggtcagatcgctagatgaaacaatttggttcaacgtatgtaacaaacgatttgattcccgtgtacatcaacaaaccacgtgtccatcaagatagaaaatattaaacaatataaaacccactacaatatttcatctatgcatagtgaaacatcatgagtacacttgctgaaacattgttggtggaatgaaaaatgaaacgaattctcttaataagacgtttccgtaatatatggtgatttgttgcaacggcgcgtgtggtggggatgacgcggaggcgcagtagagcgcgggtgcccgatgtatgcgtgccagcatcgggcgtccgatttgaggcatttaagtggaaatcaaccaaaattttctacccaaataatcatgggctctggacacactgatagccctcccttccggggccacgtccatcgatctctgggctgcagtattgggccttggcccatcaccgcgcgtgtgcaattactgcaacgcgtaaacacaccctgcaacttgctgtatctgtatgcgtgtcgccagcttcagagggcggcacggtgttctcaaaaaaaaaaagagggcggcacggcaaagatccacagtcaacggtcaaatgttccccatcccatttgcatctctctcttgatccaatgcattgtaccaccaacatcttctccaagcacagatcctaaaatgcctaattgtttcctcttttttttatgaaatagaaatcaagtatttgcctcatcttctcaaggtgttcaatgtgtctcagatatcgcgcgttgtcaaggaccaaattaagctacatatcttgctaacctctttacatttgtatctagctgatcatctcctaattaaaaggtagtaaatttgatctgtaattctaacatcaatgtgtatctagctgatcatctcctaattaaaagatagtaaatttgatctgtaattctaacatcaatgtgcatcacagcagtcagaaataattcagaaaactgcaggggaaaccaaagaataacgttccattaattgttgcgaactaactagcaaatcgatctcatgtgtatatatgtacatagtttctgtatatcgaacaaatcaacaaaaagaatgaaacaagaaaaacaagtagcgtgtgtcatacactcatacatacacaactaagatagaaagcctacagaggagggagaggaagagggcaaatacgagtagctagctaagctagtttgtgcgcttgctggggctggatggctgtggcctccctctgggcttcatgcttctcaaccaagacagctgctgctgcatcacttgttcttcagtcgtcgtcgtcgtatctgctgatgctgtctccgattcgtgcttcagctgtggctgcatcggcgtcggcgacggaagaggcagaggcctgctgcaactgccgtggtgtgcgaagaagacgagcaggaggagcagcacaagcagcagcaacgacgacgacgagctgcagggcttcttgttgcttgacaatagcaatgtggccattgttgtgatctccttgtgttggaagctaatatggatggatttgcagaggaattgaagcacaggtagctatccgggatataaatacaagagataggtagccgcagagcgaagaaaagggggcgtttcaattaaagtcaatggagaggagacgatcgatggaattattaactcaagctaagacgtgtttcctcttccaaaagattagctctcaagacgtgtggaatggaaatatggaatcaattaagccagttttgcaagctggaaggaagaagcagaagaagatgtagataaagaagacttggtgtgaggggaggcgtgcggatcaagttgaagctagctagcaacgatcgatggagggacgacgcgttttgagtagcaagctccacctggcgagaccgtgtagccgtctacacattgatgccactagtatactgtacattcttcttcactcataggctgacaggccacgtaccgactttctatcagcacacctctagcttgtaagcacgcatctatcagtaattccatttaatttgtaacgaaaatgtttagctatcgtgcaaaacgctaggccccataggcccatacgatcgaggccatgtcttaccgataatgggagtattagagttgtaagcgatagaccacaacaacaggattgtaaaaggtctcagataaaagcccaatgtttcactggaccagtagtgactatgtctttgggtgtgataatcctattgagagcgttgtcgaggtacacgttctctttctgtgaggatttttgggtgaacaccatattcagtgtatttggacgggcgacaacaacgtcttttttatcgcaaacttcgtggagacatcgtttttttagtcttctttttgtggtgttgttgttggcctagtggtgaccaacctcgtatatcagtggttggtttgggctcggtttctctcttagcagcttatgtttgtatggttgatatgtgatgcagggtatgcatgtactttgatgcacattcttcttgacaaccggttggcgaaaaagaaagaattatattcgcaatcatatatatatatatatatatatatatatacatacgtatatatacatatattaaaaaattatatatattataaaatattgtcaattaaacacctcaaaatatccataataatagctgatacatctcaaaatatatatacagaatcactgaaatatatatatatacatggagaagtcaggtggatcagcacgtactcaatcaaacagaacgagttagtgactaactaaatcacaaatagttgcccttctatctcagtattaatcttctaccactagtggagaagtgatttttagtcccagttcgtaaaccccctgtagtcccggtttttccaaccgggactacgaatccgggactaaagatcgctatctttagtcccggttcaaataaccgggactatcgctattgatttcacaccatcccctcccatatccaaatcatcacatatcacaggacatctccaaatcctcaaatccttgaataaatcatctccaaatacatcacaaactcttaaaaaatagatcatctccaaatacatcacaaactcttaaaaaaattacatcacagggttctaaaaaaaatcatcacagattcacatctcacacaaaaatacatcacagattcacatctaaaaaaaaaaagaaaaaaatccggccggcggccactgccgcctcccctcctcccctccgcgccagccggccggcgcctcgccgccgccgccgcgcgccccccgcgccgccgaacaagccacctccacgcagcccccggcgccgcccgccggcccgccaccgccgccgttgccgcgtggccccacgcgccgctgcgcaggccgcctacgcgccgtcccccgcgccgccgccttcgccaccgcggcgccggccgcctgcacgctttttcactgtggggtgaaggaaaaaagg

SEQ ID NO: 9504 - DNA, 27344 bp, Oryza sativa
ggtgttactaaccgggactaaagatcctaggaccctaacacggcctgacatggaatcaaccgggactaaaaatgaacttgctaaagatcatttttagtcccggtttttaatggaaccgggactagtgtggatttgggtcgaccgaccaaagatggtttctctaccagtgtacgtaagtacaagatactagttaatcagccaattaatcaatacagaattactacatacagtgacatattgcagaatactacaatatacaacatgttcgacattcttttttcagtacaactgcatggccaaaattaaagcgaactctagtacagcacaatccatctgctatctgaatttgggatcagtttcatcagaaatagtgtcatgttgatcgtgacagaggagcactctgcacgccaccatggtctcacccaccttcatccccggcgtcacggtgaatgcaactccatctccttcgccacgaccagcatcggcggcggcggcggcggccacgacgctgtccatgtactccgccgcgtacctgctccctctcctcgcgtacaacatcctgacacttccacggccacaacatcgccggcgcgccgtcaccgccacccgcagcgcccacgccgacctcgccatcgtcgcgaacgccctgtagaaccacgtcctcgggtgcccgcctcgcgacacgaacgccctcacgtccagattatttctgaacatagctgcctccatctctgacgacacggccgctaagtactttgttcgacagaacctcgcgaagctggagttggggtgctccatcaacgcgtccagagggtcacagcatctcatgattcgatcgaagcgagcaagatcgagttcgtcgtcgtcttcagcaccatcatgtactgcaagcattgtccgtgacaggtaagcttccagtgagtacctcttgtatggtgaatgttcgtctgcattgttgggacagcgatgatcaggtgaggaaatcaagctaaagatcagctctgcgaaatcatgcaccgatgtcgatgcaaccttgaacagctccaagactgcactaggcgtcgtcaattttttcaggacaatggagtaatccttatgatggttaactgatggtttgctgctactgatctgtttattcagtctcgaattcgcactcttcagaccatccagctctcttctcaacagcataatgtctgaatctttcttcctcgtctcggcctccagttcctgcaccagcgaccatcgatcattgataagtgacccaacgctgccattccaactgcataagctctgtagagcagtgaccgagtcgagctcgtaggtgatgatctcgtcggcgaaggcaatctttggacgattataagggatatgagctttctgcagcttgatgtaggttgacttgagagctccgatttcctcaaacagtcttgtgataactagcctctgatcatatccgccacaataatctccaaattctgtcttcgtgtcagcaaattcaggcgcggcacaaatctttgtgattttgcagagtttggagaagcctaatacgagtccaggaacattacaggtgctccttgcaactgaacttcttggtgttcttgactccattggggctgattcagtgcaaaccaagaaacaaaagaagaatctttgagacgacatgggagagtatggtaaaattatctacgagaaaatcaatgtaatcgatggtttgaacttgctttacttctctaatttgatagaaagactaacaaacctctgtttatgaccacagaccaaatgcagcaatatctttcattttctgagatgtaaacccaagaggaaaccacagactacatgggcatgatgcaaatcttgtgctccatctccactgttgaacatgaagggtagaagagcaagcatgcatgaagtacctgagagggaggctgggactgaccagtgaagtgctgaattgaattggtgcagagtgaccaagaggatagcctggtttcccccggctaaaattgaaacatttctaagtctgctgctgctgcttgcaagctatgcagagaggaaagcgaaagagcaagcaggagcagtagtacaatgaaggacaagaaatggacatggcagtggcattgggaacaacaaaagcaaaaaggttgcagagacaaggtttttgcgatgcattgtgggcactggaatggatagtgtgtgctgtcccctcccctggtggcccgttgtctcaaagcaaaagtgaaacaaagtggtaaatgaacgtattgagatgatctttcattccaaccaaaccttttccaacatttgactacttcaaaatcaaatttcagacactttccgatatactactagtagctaggtaaatatatatcacttccaacggtgatatcaaataatggactcttttctattgtcataataatacagaaatttaagtgtatgtaaccaaacttctgaagcttccaaccaattaattacatttttttctaaaaatagaaaaaatgtcagctatacacctcaatatactcttgcgtgaaattcatctgtcaattatacatctcaaaatatacttgtataaaaatactagcggtatgcataagcactgactgcacatatgtataaaggtcaggtgcatatatatatatatatatatgctctcaatcaaatgagttagtacttctctctccgttccaaaataaatcaaaatatgattggataagataaatctactcttctagtttgatttattttgaggcggtggtaggatagagttagtgaaatctgagatagcgtcagaccatgttatctgcggtgctaataatgtcatctgcggcggcgacggcgacgtcagaacggcagagcgggcatgttgtgcggttgcgcagccacttgacgacgcaatccttgtgaaacgcgtgcgcgcaccccggcagcatcctccatctcccccgctcgccgccgccgtcgtcgacatcatcctcgctctccgacagacagatgacgcactgctcgttgtcttggtcgtctttaggtcgtagcagcagcctctcgatcagcatgtcgtacttgttattggcgtcgtcgttgcggcggcggatgagtccgaccaccgtggcgatggtgagggcgaggaagcagagggccacgccgatgcaggcgaggaggaagaaaaagatgatgccccacatgagacagtccacgatatcctccgcgtccatgcctgccaatgcactgcacacacactcgactcgatcgatatgtctcgattttcttgtgtacgtacgtatatgtcgatggatcgatcatcgactctgaattggattagcaaaaagtaaatccgattctgacacgtgaccgtcctcctgcgccgcagccacggccacccttttgcttctcctcctcatcatacattcatactcatacatggacagggcctcgtcgcgcctctggaagcagagcatctcacagatcgatctttttttttatccggtgattaattaaagatccaatcaacaggcaataataatatcgtagttgatccatttctttcttgtatgtatgcagatcataacaatatttttatctcatcttaaaaggattaaaaatcaagtccgagctaacaagagatccatatattgtgcgtacagatacctaaaatacactgatgctactattttttttttgaacggaatgctactattttaggatctgcatatatataaagggtgcaacatatatagctgattgatgcttgcaacacattattacgcataaatgcatgggcggcgcagaacacaattcaagtggaattggaaaaacagaaaataaacaatactatcaagatatagttgcgcgatgctgttcttgaaagagctgcccatctggcaagcgttcgggttttccttattcacaggggccctcgccggcagcatcctgtacgccgtgtgcgtgctcctcctctgctgcgtcgatcgccgacgtcgacatgccggtgcgccgccgcctgatccgaagatctggctgccggaccacgcgcaccatcgccggcggcgggatgagtcgtcggagatggagtgcagcatatgcctgggggaactggaggagggggagaggtgctgcacgctggcggcgtgcaggcacgagttccacaaggaatgcatctaccgctggctcgccaaccgcaacacctgccctctctgccgccacatctccctcccccctgcttcatcaccaccacctgcgccgccgcctcaccatgcttctcctcctccttccaatgtactggctgctgctcatgtttagatcatcatctgaagagattttgtttcttaaaataaactaaaaaggtttcttccggcttaatttgttttgaagccaacaaaaaaaaaagaaacgtctggaagaaaaactggaagcactgatggacgattgctcttttacgtgatcatatatgttcaaaaactttactattttgatataataaaagcttagaaaaatacaacttgtgtgtgatatatggcgtcggcagccactcatccatttttgggcgttatgtaaaatttcctgcgcagcgccggcgcccgtccctctcttgcgcacgcgtaattagcaagaggactgctacagtctacagtacaagatatatagttagaaagctacactttaataaacccttctcttttctctacctgcataagcaactaaccaactacgcgtaaaacacaatgtaccaagagataattcaaggaaaatcaatagaaataatttcaattctaggaaaaatctaataaaaaataacaacaaactactcccatagccagaaaattcctacatattcccattgcccctaaaaacaagcaatcaagcgtaggaaaaagcacgcaaagtccttcaatatgactagctaactcaaatcaatgagcaaaactagcctgagaaatcacctctaaaaaatgcttaaaaaccacacgaaaaaccaacaaaaaaaacttgccaatccgattcgccaccacctcaaaaaagcctcaagaatggcccctgcgatttcttcacctcgagttgagttggttttccacaacagcacacaagtcgttgttgaccacacggactgatgaccacatggtgctcaccgcccatgagccatgagggtgagagggggaagggggggagagagggagggagggagatggagagagggggggaggggaagaagaaatacagggataggataagaccaaatacgtggtatactgacatggataagatgtttaagtagatgattatttagtcacatgcatgttcggacgggagactgttctatagtattttcagattagcaatttggaaaagctagatactggtatcccgcgcctagcacccgcgacggtatcgtctccctcattccctagagcacaagcgtaggcatgcggcaacggagcagcgcaggcatgcggcaacggagcagcactggcatcgggcatgcggcagcggaggaagaagggagagaagggagctcactggagaaggcccccgctgcctcgcctcactgcttcgtcggggagcacatcaccggagaagatatgcagcaccacgggtgatgagttccggcatgggactaacgagcctcggcgtggggcgtgggaagacgcagccaccggcgaccagccctggcgtggggcgtgacaacagaggacgcggtcgccggcatcgagccccagcatggggcttagacagtggaggacgggctcgatgtggaggacaaggctagcagtgacaacgtctcggtgaccggctcctgatgcctagtaggaaacacatgatatctggcaggtatcgcgctctggtatcgacgagtatcaagtggtattaacaggtatcaacatctagtaccaatgggtatcagtcaatacctacaagtattacctgatacctgacagaaatcgtatgataccggttaggtatcagaggatatgatgataatggttaaatgccctgatacttaataggtatcaaatcctgatacttaactggtatcattccgtccaaacgagatttattgtatagcagtttagatggtctatctttttctctaatagagagcttgaacaggagatttgggaggtacagttgaagcgatattactacttgataggtggcaaaatttggataagatagggatgcgatacacgttatcataagacccttcaaatgtaaaaattaaaatcatatataaaagtaaattcaaatgttaataaaaaaattagtttatcaaataaaacttaatttgtaataaaatattattgatcaaatatttaaaaatttgaattttaaaattcgtatgtgtcttgttgagtggatcgagcagagggggtaatattttgctcatcacctagacacttgttaagagaatatttgtaagttgtaacaaccaagacgggttagaatatatccccttcatccttaaaaaaaaatataatctatgagaaaatatgacatagtctaacgacgaatctaaacatgtataatctaacaccaattcaacttctcctcgtcggagctacaaaacccctacaggaagctggtgtgggggcatacgccgcaccatgccctagtgggtgggtccacgcctaatactcatatgagcacgtgtatacatggcgatctgactcatcagcgtcagcgtgacagcgtgtacagtacagggatcttctactacgtggagtatatatgtacatgcatgatctagacatacgtatactctagaaagaaattaaggaagagaagagagacgaaaagtcagagttgtgtggtgcggaggtgtacacatgcatgtgtgcgtgccgtgcagacgtggcagtgatccagcatcatcgatctatatgattagaggaatttttgtcactattttcattattgcgacgaccctatccaactgcagccatccatttgttcagtgcatgctctagtatattctcaattactagtctcttcccgtttcttaaagcttcgacattaatgtattcaaccatgtgaaacaaatacaaatcctagtttcttatatttggtatatggagggactatgttatttgcttcatccaaaaaccgacgggtaaaataaatttatttatactacaacacctacatatgctcagagatgataaatttcagctatttttatttgctctatccgtaccaaaatataccaactagtaataaattagatataataagtacattgtgtctaatcccgtatttactatattttcggatggtggaaaaaattattggtaaattatttatgctgatatgtacttattatacggataaattaaatattttaggaaacaaacttgcaagaaaagcttaaaacaaatagtctaaataatttaagtaaaagaacttttctttgagaaaacatatatttagagctgtatagcaaataatctattgcactgacctgatgaacaagcttgaaaaaaaagccttagaattaattaatggttataactgaattttgcacaaataaaaaaaataattacctcctcttattgcttttttcttaggaaaatcgtttatcattaagcaatgtttgtttctcttcttaggtacgtttgaattttgataccccaaacgttagttttgttcattttccattgtcatgccattatgttggattttgaaagactcaatgtgtcagtattttttttaaaaaaagatggtaatagcgttatttctcttcacatataagtttgcatgatctttctcagtgtgcaagttatgtccaactagataaaaccctgcacgtggtgttgcgcgagttttgtatgataatagtataaacaaattttaagatagctagacgacatacccttaaataatttgcatctttgatcaatcattttttaaaaaataaggtgatgatatttaaaaagtaaaattaaggtgagttggcttcataaaagaaaaaacaaaaaggaaggagacaatatagattggtcattcaaaagcaaaataaaaatgatattgctttatgagaaaaaaaagaaataatatggatcatgtattaataaaaataagaaataatttggataatgtattaatcatcaagtgctagaaacagtgggggtgagagaaatgcactactacgaaaacagtttttctttgtgggggaaaaacagtttttacgtgcggaggtggcgctcgtctgcccggaagtgtctgcaaaaataaggatttctctgtgcggacgcgaaaaataaaaatctgaaaaaaaaatcaaaaccctagttgccgccgcagctcgtcatcgtcgtagccgtcaccgccgccattatcgccgtcgccgaatccgggcggcggagggcgggagagaggtgccaccgccggatccgggcggcggagggcgggagaggggcgtcgccgctggatccacgcgggggagggccggagaggggcgccgttgcggggagagcgcggggatggccgccgtccgcctccgctccggccaccacctcctcatcggcggggcggcgtggattcgtgggaccaacggcgctgctcccggccacctcgtcaacggcggcggtcggtgccctgctcctctcgccgttgcccactgccgagccgcccacctaccgccgtacgtgagtgtgtgagaggagaggagagagagcgtgcctggcttagaggataaggataaggaggtgagagagttggaggaaggatattaggatgtaatttttgaagtgttgaggaaaaaatgagggagggtattttcgcgtgcgacggtcttaaaacgcccgcatgcgaaactcaattttcgtgtgcaccctattaagaggttcgcctgcaaaaataggtttatttttgcacggggatccttaagaggctcgcctgcggtcctctcaaggatccgcacgtaaaaataggaggacgattttttccagacgggactagttacggtccgtctgcaatctaaagaggaccctgtacaggaaaatcattttttaagtagtggcggcatcaattatgaagtgaattaattgacagactgaaaggcgcattaaagtacataaaaacgcaattgagatcccctgtagtactgcatttgcagctcactggcatgacatatgggccccatgccagtgagcagtaatacacatgcagtactgcagacgacttgcatccataaaaacgatcaatccacgctttcctgagaatagatctgttgatccataatcataatagaggaaatgccatcttatgaatgaatgaagacggaattcactcgaaattacttcttgaggcaatggttcattgattcctaagaccgtggatagttcttgaggtggatgaatgaagccaggaatttggtgcacatgcatgtgctgattcgtgttccgataaatgtaccacataaaaccatcggacgaatcaagccggggttctagacaagattcaatgtggggctgagatcaagttcagcagggggacaaaataaatcatcagaagcaacagagaacaaaatcaacatcaataatagatgccactatatcaagattgttcttacttgatggaatactccatacccacgtagaaaaaaaaataaaaatgcttgatcgtatttaataagctagataggagtattagataaaaaaacatttagtaatcactattatgatattttttggcccctaagaattttttcattgtaactttgaaacctttaattcctcgccaataatttaatgaaattgcagttctcctgcaatttaaaataaaagttactagcgcttgtttcttttcaacatagttgttgctctgagtaaagataaatggtcaaacgtcacattaagtcaacaattaatggtgttatctattaaaaaatcaagagtaacaatctacaaataaaatgggttgcttgggaagtgtgtgtagcttaactggttatattccttgtggtggaattaccccacccaggtttaagtcctagactttacacgatactactagaaaaacgatttttaccgacgttagctttttaatttttcaagaggacaaaaaaaaaaccctcttataaccatttgcgaaaatagctaaagagcatctagatttaactctgcctgcgaaaatcaattttttcagtcggaccccttaagacgtccgcctgcgaaagtataccttaagtggtccgcctgcgaaagtattttcgcaggcggaaccttatgtggtccgcctgtagagaaaatatctaagtcccatccttatattctcctccaccatccttatcctctccaccactcattttcctcccccttctctctttctctcatcacacgcctgaggagcgtcagcggctccaaggaggtttgccgccggccgtgacaacgactgggtcccaccgccagctgcgatgacgacaacgactccgcctggatccaccgccggctcgcctcgggcacgcggatccgctaccggccggtctcgaggaggggaggggaggccgcggcttggctgctccctctcttggcgatgatggtggctcaatgacgaggagtggagcgcgtcggccgtgaggaggaggtgaggcggtggttcaacttctccctctcctggcctggcgacggcaaagatgaggagggccagcaatggcttggtgatgaggaggggaggcggcagtcgtgctccaatccccccttcctcctagatcctgccggcggtagaggcgagctagccagcagtggcggcgctctcctcgggcagtcgggcagcagcggcggacggcggacggacggacggacggcggacggagggggaagggctagatggggaggccggcatcggcgccagcgagcaggggtggtggcggcggatttttttttgttcgctgaaaatatttttgtaggcaggtggatctaacgtctgtgaaaatcatttattttcgtaggcctttgcttacaagcggtcctttcccccacttgaaaaaattattttttggcagcctaggaaaatggttttcctagtagtgtgggtgctcatctttatggctaattattctttcagtgctaggcgacgtactcgtcaacagcgagacgcctgcgatgacttcattaatttcaaaatatatcggtccagtctttcggatgtgctcataggaatagggtgtacgtgtctacgtttgtaaaggtgaatatacgctcgttgtgagtttctgcgtttgtattgtgtttataaaaaatgggttgcttggtttaattggatgaatctgataagtaattggtattttcgttgattttgttggaaggaataggacatgtaacgattcgtgttgtatgtgacaccacgacgctgttgccattgcaacgtaaggtgtacattcaccagcttccctttccgttttcgagcagcaaattccaaatgtaattccttttgtcacacgcaggcaacacaacgcatgaactccacaaatcgtgtgcagataattaattttggacaaagacatttcttggaagtggcacagatttttttcactgtcatgaaaggcttgattgatgcaaactaattgagccgtcatcggctatctgtacattatccgtacagctgccaagtttgtattgatcggttttcctcgaggttaatttgtaacttgtatgtttttcttctagtaacttaagtaattatttttaaatctaaggtcaatatgcataacaacatattcagaaaaacttatgaacaagctgattgttcattggtaaaatatagatatgccgatgtcaataaaaaccgacgatgcctgaccgaaacaaatactacatgtctacatccatgctaaaattaaataagttcacttctatacatgaatttgactatattcatatttatgtaaaaaataaatttatttttgaatggaggaaataagtatatacggtgataattgaataccgctcaccaaagatccagctagtagcacacggataaatggctgcaagccaccaaccatttccggtggtccaatacctgaagaacagccagcccattgatgagtcagcaaaggatcagatcgtgagagatgagccaatgccatgtatttgagttactccaaaccaaaacacaccatcacatggaaaaagtaattaatctaacaaatgcctcaattaacattggttatgcagaaaataaagctgcagttaacggaatcagattaaagaaggaaacaactgctcattttctgtaagacagcatcacggccttcagatctataaataggattaggcaaggtgattagtgatacattatgtgctgtacctgtttcaagaacacaatgatgagctgtaccatcatcaattgtgaaataattaattaaattatcattaagccccaaaccgagccaagccaagccaaatgaatgattgctgtggtgaagggcgacgactagtcagggatgagtcggatggatatgctctttatgtgatgcggtgcccaggaaacgcggcccaaccaaatcagggtcattaacgtcaaatcattctctgctaataatgcaaggcaccattgtttcttctccaactctctccctggcggctgcctcctctcctcttcttgctcggttccccctgtataaaagagaaccccgtcttctcgctctcctcgcatccactccacatactaccactcaaaaactctctctctctacccaaacaggttttgagaaagaagtggaggacagatccaaaaagttcaccttttgattatccaaacaagtttggagtttgttacctgaatctcctcttcttcctgtcaccggaaggtatgcagttcctctctccatatcatcttctagcgtttctttctacagattcttgattgctcgcttttttccattattctcttttgctccaacgtaggggtagggccacatcagttggacaagtagaaattgatggcacatcaattgagtagatgcggaaatttctggtttttagttaaagtttagaccatgccgatgccaaagtgctgccgtttaatcgaatacaacgatatatactcttgcaatggcatgtgtcatgaggtgtttgggtttggcgaggctcagttttcattgaatttcccctccttcccatgtggccgtatcaagcctaatctttgaaaaatattcacttcatgtggatgcggaatcactagatgcagcttgactccatgcaaatcctaactcctgccatgtgcccatgtgcctgtcccttatcctgatttgcatctgaattcatttgctcagtaatttgcttgttcagtgcctaatccgatagacgtccaaacaaagttttaattaggagcagaagatccagcaatgttattttttctgaatttgtaatgtcttggtttctgaattcgtaattgactatttttattaatcacctttctgaacctgaacgaaagatgcataatgattcacatcggttgcaaatttactgaatatttcctcttatttctagtgtgttattcatagagttccgaaactcaatttcccttttttaaaaaagcttctgatttaccattccagatttctgataagtacttagttaaagttccttattatattaattatctatattatctattacacaacacgttgaactcatgtaagttctgattgattatagggaacacttatattatataagtagtaggtataattatataaaaatgcagttagtactacaataagctttcaaaattcttcgtagtgacttttgtttggttaaagttcttacagacttccagattattatacgtaccttgttagcgacattcaattactgaatctgatgcctggttttgtttgtgcagggaaattgataaaaaaaaagcagtgaaagcctcaaggaatgctgaaagatgtgcttgcatagaagaaattttccgtgtgagataaagcagattgctggttcactagtgctactgatctgctcaagtcttgatgtgagtgatcaactttcctgcactaattctacaccatttagactccgaaacgacgatgatataagaatgttgttctccattcatgatcatgaccttggggaggatggctaaagaattgcagtccatctgattggtggtcaaaacatagtgctgagatttatatctttgtgggcatggagagtagagggaagatactaatggagaggtatgagttgggcagattgttggggaaaggaacatttggcaaggtgcactatgcaaggaatctggagtcaaaccagagtgtggccataaagatgatggacaaacagcaggtgttgaaggtcgggctttcggagcagatcagacgtgagatcacaaccatgcggttggtggctcataagaacattgttcagcttcatgaggtcatggcaacacggaacaagatctactttgtgatggagtatgtgaaaggtggtgagctatttgaaaaggttgcaaagcgtggaaagcttacagaggttgttgcacataagtacttccagcaactcattagtgcagtggattactgccacagtcgaggtgtgtatcaccgggacttgaagcctgaaaacctgctgttggatgagaatgagaacctgaaagtctcagactttggactgagtgcgctttcagagtcgaagaggcaagatggcttactccataccacctgtggaacacctgcatatgtagctccagaggtgatcagcaagataggatatgatggtgcaaagtcagatatttggtcttgtggtgttatcctgtttgttcttgttgctggttaccttcctttccagggcccaaacttgatggaaatgtatcggaagatacaacatggtgaattcaggtgccccggttggttttcacgcaaacttcagaagttgttgtacaagatcatggaccccaacccaagcacaaggatttcaatccagaagataaaggagtctacctggttccggaaaggtcctgaggagaatcgtattttgaaggaaagaactttgaatgaaaacaccaccaaaaatgttgctctggtgcttggtgtgagacgcaagaaaaatgctcatgaagatgtgaagcccatgtcagtgacaaacttaaatgcctttgaaattatctctttctccaaggggtttgatctctctggcatgttcattgtaaaggaatggagaaatgaggcaaggttcacttcagataaatctgcctcaaccataatctcaaagctagaagatgtagcaaaggcgctaaatctcagggtaaggaagaaagacaatggtgtagtgaagatgcaagggaggaaggagggaaggaatggtgttcttcagtttgacatagagatatttgaggttaccacttcctatcatatcatcgagatgaaacaaacaagtggcgattcattggagtaccgacagctactggaggagggcatccggccagctctgaaggacattgtcttggcctggcatggagatgaatagcagcagtcgcaagagtagattttgatgtctcaagcatttagtttccgctcctcaaattcattaggttttagctcaaatgaatttatttgtcttgcctatgttctttttagcatctatgtttttgtatctggagagttcatgttgaggcaatctatgcacaatttagatggagtctgtcgagagtaattttatgagaagttgagctgcaatataaaagttggctttgagcctttcaagctttcttcatatattcgtccttgtcctgtcataaagctatgcttgggtgcaatgttgtgacaccattagcaaggttactgcagcatgaagtatgcaattcttggtattcaccagtcgctcaagaatttctagagtttttaactttttattaccaacttgttgacgaaaattctcatatcaatagtgctacagaggtataccttatcagctattgaacataagtctttatcaaacaaataaaagaaaaaccgaagcgacttctcattctgcggacgaacaagataacacgagtgcgcaatcctacaagatagtagcaggtaggcaacgaaataccaaaaagctgcagtttcattggaaggccaaaaaaaagatttttttttaagaataaggatatccttgtatttgccaaatagccacagagagcgaagttattggtaaacaaaagaaaatataatacacatgttgaaaaatctgaacaaaagctatttaaacactagttgtgaggaaaataaattgtccctgtcactgaggatagatccaacatccaagagctcatttttcacggtactaattgatcacccaacatctttccaagatgttaataatactgctaatcagactgtccaaatgtcgactggatttggttaatctcaacaacccaatcgtagctgtgacaagttgtacatatgacaaagactacactcttcataatttcatattgcaacttgcgaatttcccacctagatgcttttgtcctttgtaagatttgagaatttttttttgctttgagaaataatactgagatatcattatatcaatgatagattcctgataagatcgctgtaaattagagagagggagaaaaaaaggttttaagataagtcatgttgtcatgcaaaattcagttctagtgttctactactatacatttatatatctttcagatgttgccagtttatatacattagtgtttgtcttgataggatatgttaaaaaaaagtctggccgacaatatgtgatgacgatgaggtaatcctttatagctagtaaagcagaacagagggaatagtagtctgaatttgcaagagatggggaaaaaccttgacctgctctgctgtcctgtcaccttgaccttattatcctcttggagaggagatggaagaaggaactaggctttgatctgtacagcttgcgtgccattgatctctgcaacgcggagacaccgccaccctgagtggtgtatacctggccggacctcgacatacctcggtcatggttgccgtttcagccgaagctcatcaacctcggctctggcagattttgtgccgtcaagatcttcacttctggtggttactacaacgactctgatgatgacatgattcactctgattttgctgcggattttgctgttttcactggcctgcagatgctgcgtccccatggtaaagatgatccaagacaggttcggatgatcgagcacaagtccatgtattagtacattttcaacgcctataacattgaatttgttctctaagaaactaatttcgagtttttatagatgagaattggtgtattgaaagtaatattatttttctatgaatcaatatgattttctttctatggaaatctatttatgatgcacattaattaatttccggtggactcacagactcacagtagcctgtaggctgtaggagagtactgactactcactactcagtggagtcggaggctgacgattttcttttcctcttgcagacgcttttacaagtggcattagtactactacgcacctagacacccaacaggttaattcagaaacagcaacgggcaagctactttgaatcgaagatgaacaaagtaagaagcctatattgaagtagtataattttaaaataaaacgttactgtccaagcatcatctgagaaaactaggttacagtccagccattttattcaaaacattatctgttgcaaggaggaaattaaaatgaaatttgcaagtggagtagtagactggggcccccgcgtcgccctcccctgggcggctcgggaggcgacgcgcccgccgccgccttcctctccccgcctcctcctccgcctcgccgccgcctgagcgggcgccggcaaagccgcgtgccgcaaggacggcggcggcagggcctcgtctcacccacattgcactcagaggccgggggagctgtgtgtggcggcaacggtggtggccagatccgcgccgtgtccggccagatccggcaggggggtggccggcggcggcggctgacggtggtggcggcggcggcagcgctggtggcggatatggcggcgaaggtgatggtgatggcgacgacgacggcgggccgcggcgcgtgtcgcgacgccggccgggctcgtcaaggacctcgctgccacgagacctctggcgcagcaccctcgtcgacgctccctccacgacgccgatgacccgcgcggcgcggatggcggctgtggcggcggcggtggcggctggcgacggtggcgcctgtggcggtgatggttggcaggccatcacgaccgaaggggctgacggtgtgtcgtcgtcggcggcagcatgtggaggcgaggaaggagtctggcggcggggaaggagaccaggtgtaggcgtgacgttgacggtgggaagatctgtggcagtggcctaggccggatcgctgaagggacaatattgtcgaccggcgatgatccttcttgtgcggattggttgtgggggtttggacagggaatcgctagcaaaagcctcgccgagccgtttggccggctgatgacggcgacaccttttggcgtcgttcccctccctgaaggcgtcgttttagcgtacccctctcctttccctaccattctccaggtgaaaaccttgcttcggcttccgaacgagcggtggcggcgatccacgtcgcgtcctccttgggggcaccgctttggagaaacttcttcgtgcaaggatgtcgttgatggtctatgcatttgctttgaagctttttagccctagcttttgatgaggccttctatttctagctccaccttttgttttgcggtggacgacctcgctctttttttgattttgttaggtggagtcggagctgctttgtccgagtgacgaagctgggcaacgatgacacgctgcattttctttctaggggttttgttgttggccgtgaatagattgtggcgcttaggcagctttggttgatgttcatcttgggaagtcgaaaccacttgatcatttgcagcatctaggttccgatggtgcatccggtttgaagtcgaagctgctgtgtcgcttggcggcaagcttggcaacgatgacacggttgaaaagtcagaaccccctatgctgttttggtcaaccttggtaacgacatcctacgttgggctccgtcagtggtttcagctgttagtgagttctggcgtgtgctgtgtaactgttcagccagtcggtggttggtttttcttttcttgtaacccgtctagggtttttactactacttattgaaaatataattggcagctctcctgccggtttagttttttttttaaaaaaaaaagtagagtagtagacttcacctatcgtgcagagttggaaaaggacggcccattgggcccaataatgaggagagttatgttaatcggaccaaagaccgcaggttcgccttcccctagcgccggtcgtctcggactgcacctccgccgccgcccgccgtcgatctccagctccactgcatacaatactacgtacctccataatatttggtgtaaactccagggaaggaatttctgctggtcggtaggtatgaggttaatttcttctttaatttctctctccatttattattgatcttctcgttgctagctgtgtttgcatggtgtgtctaatctggattagaatcaggccggataaataagtatcgtctcggcgtttggagcagatacgtaccatgggacgacgacgatttgtgaacctggtggtgcagggcgccggtggactctattctctgcgccgcatacccgcgaatcgtctcttctacccatcaacaagagcagctgaagaagcaacggcaaagtcacaagaatcattcatggaggagcacggtggcaggaagcatccaggcctccacaccatggagatgttggagaagcttccccgttcgacgttcgccttcgagccggcccccgtggatcgctaccatcttaggtctctcgacttcgcctgtctcctcggccacgagagcaggatgctcactgcagacaacaggggaaacaccgtcgtcttcgacgccgactcctcctccgtcctcgccttccccaacctcatttctcccaagaggtataacgccatatccctctccattatcaacaacgatggcagcaacaacaacaacgggttggaaccaccgccggaggacggcctctacgtgatgacccggagtcccgacgtccacagaatcaaggatggttgctttgaggtgctcaactactcttcttcctctgccgatttccgtgagatgacccctcattgggtttctctgccaccaccgcccttcgccggctgcatgaacgccgaaattacctcctacacggtggttcacggcaccaccatctacatttcttgcaataagccaatccattctacttatgccttcgacacggttagccatgagtggcgccggctgggctcctggacaatgccattccatggcagagctgagtatgtgccggagctcaacctctggtttggactgtctgctcgccacccctacagcttatctgcttttgatctcctctccgacgactcatccgtcgcagcaaaaccacccacggtgcaccatacttgggtggaccttgacatacctcagtcctggttgccctggaacattcatctcatcaacctcgggtgtggcaggttttgcatcgccaagtgtcgaaacatgaattcggcaataataaaaggggtagcgcacgagacctaaaagtggatggatgcagagacaaaggatttagacaggttcaggccctctcaatgagaggtaataccctactcctgtttggggatttgaatccgccgggtgtattatagatctgacaatcatatgtgctcctgccccctagagggcctccttcccaccttatataggatgggggcaggattacaagatagaaaccttaaccaatacggtatcggtttcctaaatctattttacaatattattaaatcaggactttaggccgctccataatataaaaggaaacgtaatacccaagtcatgattcgttacatattccatagatataagctatcccctatgactagtcggataaccatgccgtgtgggtatggggtacccataatctccacagtagcccctgagaccttcatagtcgaaaagataatgttctctcgaactagattactccaaagccgagtgcttcaatcatctttgccatggtctcccgagtacttttaccaaatctgaagactgtgtagggctggaaaataaagtcaggtgcatcgactagatgcacctaataggtgtgtggttaattgaacaaaccaagcatatagtcaaggaaaataatccaaccaactgagtgatttcgataatcgtagtcaaccaagagacttgatattaatatatagcatatgcggtgtgaatcccccaaataacatgatccatgtgatataccgactgcgttgtaaaaattgatgcgagcaacctaaagttgactacattgaaaattcacatagcaaaatagctataaaaagagcttgatgttgtgaataaagaaacttccaaagtattgggcatacaccatgcgcacactgctttaacaaatgtgcttaagtccctaaaagacacatgatttaaccacacctggaagtatatggcatatgtggtgtaacatccgagtaaataaactcataaggatttaccaaccgtatggaaaatgaccaaaatatataatcagcctaagccataatattggtcaataaaaatgcacacttacgtggcaaaaggcaatgatattgtatccaatcaattgctttataaacccaaacagcgccatgactatataaaaaagtcagcggggcagctatataaagctttactgtttgacactttttaagatgcattgtaccaactcctaaaaagttgagtaactgtggtataaaaggattttaaggtattgagcacttgatcacccgcactttagcctaagcaaaaagtgcctaagtccctaaaagaacgtgacagggcacacctgaaaatatgggctgcagacatattaggcctaggccaaaaaatatgccttcaacaccctttaaaggatggcgcatgtaacatgctcccgagtaataaatcttccgggtgatatagaccaagtgtagctcataagaatagcttctgatctgagtgattatctcttatggggtactccaaaatagatataaaaattgaatcccgactggcgcaagtagtcggttgatagcccttgtggggaataatgaatagtccagccgttaagcatatgaaatcgactcgtgaccataaattcatgttgaatgtatccggaacaagtccaaattgaagatatgatccttgtgattgagttgataagcccctaagcatatatggcttgtccttctgtcatagtcaaaattgtccattggcaatagctgatgcagtcgacatgaaggcaagatgatgaacatggggatgatatcgcccgtcagaggtgacaaaaatgttggtggtggtaaaaacggtgacaccaatcaaagatgatgaagtcgcatagccatggaggcgaagaaaccagtcggcagcagttaggtcagctagcagtgaagatgaagacgcccaacaacaacgacagagtagtcggtggcgacgaaagcaagccgacgatgaagacgtagacacgtatcgatggtgatggcgaaatccaccaattatgaagatgaagaaaatagtcggcgatggcaaacgcatccgacggtaatgatgattagcggcaacagagatagccggctatgatgacgaagttgcccatcaacggcagcagagtaggctatgttgaagagacttgacaggatgttgatgaagataaccatgtcgttgatccagtcaatagtagtgtagcagtccatgataacgatgagatcctctatcggcagttgcatagtaggccaaccgtgaagacgaaataacaagtcggcgatgaaagtcggtgatgacaaaagcaaccgacggcgaggacgtagtcaccccttagcaacggcggagacgtcagggccgatgaagtaaacgtgctggtgatgatgtcagtgacaacaatccatcaaaccattgagaagatatcgaagcttgagaagtttccttgatgtgagcgtgtgcataaagaaaactgatgcaatgcttcttgatttacgaagatgactgtagaacttagtgttacagctgttgtagatgcttcacttggaggaaagtagatgttgttgtccaactcgtctaaaccgagctgattggttgataactccaaactcccgaacatgtagattaaatcttgaacttgatacttgagaattttggagtagattatggcagcgctgagaagccaaaattgtcggtgaaataattgaagttgctgaagtagaacatctgctccgaagcaaagatgaagacaatgactcctggataaattgattgcttcagcttgtcgaattttgagagtcttgtatttgtgtagctcccgactctttggttaattgggaaacaactgaacatagagtcgagaactgtagcttcttgtcatcgagtagtcatcacttgagtgaagatacatgttgaagatgtccgagtagaattcttgaaaattggaaaaccacttgttgtaataatataacacgacatcatagttgataatgcatgccgagatgtcgaagctcctatagacgtcatggctggtgaaatagcaaaacttgcgaagtagcggcaattgagtttgccgatgccgaagataataaagatgaagtcgctccaccatggtgacaaagttgcaaagccgtgataaagtgaacacgagtcagtggcaacagaagaaaaccggtggcaaagacgtgtagttgtgaagatagatactccagtcggcggcggcataaccagtcggcgacggaagacgatgatgtccattagtagtggtagcggtataaaccagacatagaggcgagggcactagtcagcaacagacgagacaactagtgatgaagacgataaggccaatcaacactggcagaatcatgcagccatgggagtgaagaaactagtcggcagtagacgtagatagcttgtgttgaagatgatgacgcctattagcggtgatggcgacgtagccagccgtgaagaagatagcatcagttggcgtcataataggccagacgtgcaggcggaaacaccagtcggcggcggacgaggcggccggtcggtgaagaggtagacgcccaacaacggcggcataataggccagccgtgcaggcggaaacaccagtcggcggtgaacaaggtggctggtcggtgaagacgtagacgcccaacaacggcggcataataggccagccgtgcaggcggaaacaccagtcggtggcggacgaggcggccggtcggtgaagatgtagacgcccaacaacagcggcataataggccgaccgtgcaggcggtgacaccagtcgacggcagacgaggcggccggtcggtgaagatgtagacgcccaacaatagcggcataataggccagctatgcaggcggtgacaccagtcggcggcggcgaaagcaaaccggcagtgaagatgtagacgcctaacaacggtgttgtgaccaaccaaccgtataggcgaagacaccagtcggcggcgacgacggcaagccggtggtgatgttctgactgatccattcctggagcgtaagagataagcttaaagccataaatcccttttatgcatatctggatttggatcctacagaacaaacatataggatgagtagtatctgatgtaaatataatacttgagaaaaatgcaagtattttaaaatgtttataaatatgtatttctcctcttgtcaattttgatttccccgagcagatgactccttacgtttaaacactctgcctgactagtcatagcccccaagcaccgggagttggcctaggcacttcccaaacatgcatataagtgacaagagttcgtcattaatggaacaaagtttcacgaatcagtatttactactcgggtacttttgcaattgtaaagagcagaaaataaatttatcttatctccatgcttttgatttattctgattaatacttagcaccttgcgttactcggtccatataacgagcccccgggtgctaggaatcggcccaaaggcaactatccatcgacaaaccaaacggaaagcatacgaagatagaactccataactcgataggcacttttgtactcagattatgtcgcaagcaatcaagataaatattatgaaaaattgtttaaaaaatatgatataacatctgtagcccccgactcactagtcaacggcaaaccagttgatgtagtgaggcagaggaaaaggaaaatatcatataaagaagaaaattaattatgacttagctttctagtctttcccttggtgacgaccgaggtggccgatgtgggaacaaagtcatccattaatagcaatgaaaacaccagccatagaagcagcttgaggcaactgacgatgaaagtgaagatgcccatcaacggcggcataataggccagcagtgcagacggaaacaccagtcggcggcggcgaaagccagccagtcggtgaagacgtggacgcccgtgaacggtggtgtgaccaaccaaccatatagacgagaacactagtcggcggcggcgaaggccagccggtcggtgaagtcgtagacacccaacagtggcggcataataggccagccgtgcaggcgagggcaccagtcggcagcggacgaggcggccggtcggtgaagatgttagttggcaacagcaaaggtagccgacacgggtacatacaaaataaatcaatgaacagatcatctgcttagtaccacgtaaaaaaatataggtataaagaagcttgtgcatgtatgtttgcatatatcaatgcatatacacggcttgcatatattgattaattagccaactaatctcctgtggcatgaacgctagacacatccacacatcacccgacaggtcctgccatgcgctcgcacagatcgcaggtccgagtccagatcaaatccccgtcagaagcttcttgagatggggatcggacacgttcgactagtggtgcatgcaaaataataaaccacagatcaaatagagattagtagcaaaaagaaataaaaaagtatagatgattatggatgttaatcgatgcatgtatgtttgcatgtagatcgatgtgtagaagaagtcggtgtgtcagccagcttgccaggaaaagcattgattagctattaaaagaaaacagatgctttacgatctctatgcatagcgttattaggtaaattgtgcatcttctccatagcttgcatgcatgctcctgtttgcacacgctggctgtgcatgcatgccgccatgaacgttccagtggacatgtgcttgtttgattcgtaaatcaacaaatgcacgaatttgcttctggtcgtcgggtgttcctatgccgaacctgcggcatctccatctgcaaggaaaggagcactcggacacggctaggcgccaaagtaggcgacggcgatggctgtgtctcaattttagccagaacgtgaaaataataaaaataacagtagattaaaaaatcaatctcataaaaataagattggaacgacaaacccgattgaagattagagccactaaaatcaataagattgatctcagcgtttcttctgaagttgattccatcgcacttttcgacgggtaattcgacgcaacccctacctggcgcgccaactgtcgaaacatgaattcggcaataataaaaggggtagcgcacgagacctaaaagtggatggatgcagagacaaaggatttagacaggttcaggccctctcaatgagaggtaataccctactcctgtttggggatttgaatccaccgggtgtattatagatctgacaatcatatgtgctcctgccccctagagggcctcctgcccaccttatataggatgggggcaggattacaagatagaaaccttaaccaatacggtatcggtttcctaaatctattttacaatattatcaaatcaggactttaggccgctccataatataaaaggaaacgtaatacccaagtcatgatttgttacatattccatagatataagctatcccctatgactagtcggataaccatgccgtgtgggtatggggtacccataatctccacaccaagatgttccattctattttgggtgatcgcacattttgttcctactctgacagtgacgatggcacaattgaagactctgacccaattcatgggagtttcgctatcttcactggccttcacatggttcgccctcgtg

SEQ ID NO: 9505 - DNA, 11176 bp, Oryza sativa
tactacagctctcccaacgtcgactcgcgccccacggacatagtggagtacgacgagtttagctctcgctacaacgaaccggatctcgacgacttcgacgaaagcctagatgacaactacacccctctctacttcggcgtcttcatggccgataacgagacggaggagcaacgccaagcccgggagaccgaagcacgtcgcgaggctgagcgtctccgactggaggaggagcgtcaagcacaagaacaagaacggttacggcgtgagcagcaggagcgtgagcggaccgcgaaggaggctgaagatcgacgacagcgagctttggaagcagggcgccgagcgcgtgatctcatcggccaacaagatgttgaagggacaccggttttccgcacccctcagcagaatgcggttgccgcgatcaccctcctcgacaccctcctcaaggaaaacgagctcaatcaatctgatcacgtcgtcaacatcttgaaccagacgaagaccatgattgcggcttcggtcccagttaactccgaaagcgtccacacgccgactggcagccgagttccccacttccgatctcatgactaccgtcatccaagcctcagcatcaccggcgcaggatccaatcgcaggagcaggggtcacgacgggcggttcactcacctcccgaccatcatggggagcgccgagtggaacggcctcgctcaccacctcgtcgccgccccgtcgatcttcgcgacacgatcatacagcgccgagcagctcgaggccatcatcattcgccggaccgccatgacgatgaccttgacggagtagcagccttcaccgacgatctgcgtcgagtggattggccagccggcttcaagccgactggaatagagaagtacgacggtaccactaacccagaatcgtggcttaccgtctacggtctcgcaatccgcgcagcaggaggagacagcaaggccatggcgaactatctaccagtggctttagcggattccgcccgatcttggctccatggattgccccgtggtacaatcggatcttgggccgaattacgcgaccacttcatcgccaacttccaaggcaccttcgagcgtcccggcacacaatacgacctctacaacgttattcagaagtccggagaatcccttagagattacatccggcgattttctgaacaacgtaataagatctccgacatcaccgacgacgttatcatcgccgctttcaccaaagggattcgccacgaagaattggtcggcaagttcgggcgtaaacctcccaggacagtcaagcttatgtttgaaaaagccaacgagtacgccaaagctgaagacgccgtcaccgcatcaaagcagtcgggtcctagttggaagccaaataagggtacgccagctacgggaggaggtggaagtaacaatcataaggaccgcaagcgtaagcctgcggaacttgttgcaaccgccagtcactcttctcgacagcgttcgcgcgtcaacacgttcgacaagatcatgaactcccaatgcccgcaccatcctaactccaaccacgtggccaaagattgtttcgtctacaagcaattcgcggatcaatacaccaagactacacggaagaactccgacgaagaacaaagcacgtcgaggaagaaggacgacggcgacgccccggcaggatttcaagaccaccgcaaggagctcaaccatatcttcggcggccccttggcttatgagtctaaacggaagcaaaagttgactgaacgggagatcaatgctgttcaacccgacacgccccagtatcttcgatggtcagaaatcgcaatcaagtttgaccgctcggatcatcctgaccgagtggtccacccggggcggtaccccctggtactagacccagtggtccgtaatgtcaagcttcgcagaaccctcatcgacggtggcagtgcgctcaatatcctcttcgccaagaccttggatgacatgcagatccctcgctccgagctaaaaccaagcaatgcgccttttcacggagtaattctaggattatccgcaactccactcggccagatcaccctcccggtcacctttggcactcgggaaaacttccgcacagagaatatcagctttgaagtcgccgattttgagacagcatatcatgccatactcggacgcccggcgttagccaagttcatggccgtcccgcactacacttacatgatgatgaagatgcccggtccccgaggagtcctatccctacggagcgacatcaagcaagccgtcacatgcgacaaggagagttgcgacatggcccaaacccgcgagatgacgtctgtccgagaggatatccgactggctgcagccacggcgagcgaaggagaagtgcccgccaccaagacttcaaaaagtggagaaagcgaagccaagactaagaagattcccctagatccttctgattctactaaaactgctgtaataggcgccgagttagattgtaaataggaaagcgcgctcatcacctttcttcagaacaataaagatatctttgcatggaaaccatctgatatgcccggtattcctagagaggtgattgagcactccttacatgtcaaagaagatgccaagcctatcaaacaacgactccgccgattcgcacaagacaggaaagacgcgatcaaggaggaattaaccaagctgttagcagcaggcttcatcaaagaagtccttcatcccgactggctggcaaacccggttctagttcggaagaaaacagggcaatggcgcatgtgtgttgattatactgacctcaacaaatcctgccctaaagatccttttgggttgcctcgcattgaccaggtagtcgactcgaccgccggctgtgagcttctcagttttttggattgctactcggggtatcatcagatccgactaaaggaatccgactgcttgaagacttcatttatcacgccctttggagcatactgctatgtcaccatgccgtttggactaaaaaacgcaggagcaacttatcaacgtatgattcagagatgcttctcaacacagatcggtcgcaacgttgaggcctatgtggatgatgtagtcgttaagaccaagcaaaaggatgatttgattttggatctagaagaaaccttcgcgagcatccgcgctttcaggatgaaattaaaccctgaaaagtgcaccttcggagtaccgtcagggaagctgcttggttttatggtgtctcataggggcatccaagccaacccggagaaagttattgctatcctcaacatgaaaccgccaagtacccagaaagatgttcagaagctgactggatgcatggcggcgctcagccgatttatttcaaggctcggcgagcgggggatgcccttctttaagctactaaagaaaacagacgacttccagtggggacccgaagcacagaaggccttcgaagatttcaagaagctcctcaccgagccaccagtcttagcctcaccacacccgcaggagccgttgttgctgtatgtatcagccacctcccaggttgtgagcacagtcttggtcgtcgagcgcgaggaagaaggccatctccagaaagtccagcgaccgatttactttgtcagcgaggtcctagccgactccaaaacgaggtaccctcaggttcagaagctgttatatggtattctaattactaccaggacgctatctcactactttcaaggtcactcggtaacggtggtcacatcatttccactcggtgatatactgcacaaccgtgaagcaaacggacggattgctaagtgggctttggagttgatgtctttggacatatcattcaagccccgaatttcgatcaagtcccaagcgttagctgattttgtcgccgaatggaccgagtgccaggaggatacccccgcggagaagatggagcactggaccatgcattttgacgggtcaaaacgactttcgggcactggagcaggagtagttctaatttccccaactggagaaagattaagctatgtgctttggatacatttttcgacgtcccacaacgtcgccgagtatgaggcgctccttcatggactacggattgcaatctccctagggataaagcgtctaatagttcgaggcgattcacagctggtcgtcaaccaggttatgaaagagtggtcctgccttgacgacaacatgatggcatatcgacaagaagtacgcaaattggaagataagttcgatggactcgagctcagtcacgttcttcgacacaacaatgaagctgccgatagactcgccaactttggatccaagcgtgaggcggcaccctccgatgttttcgtcgaacacctttatacgccgacagtacctcacaaagatgctactcaagttgcgggcactcatgacgtagctatggttgaagccgactggcgagagcccctcatacgatttttgacttctcaagaactcccccaagacaaagatgaggccgagcggatttcaaggcggagcaaactttatgttatgcatgaagctgagttgtacaagaaaagcccttcagggattctgcaacgctgcgtatctttagaggaagggagacaattgctgaaagacatacattctgggatatgcggaaaccatgctgctgcacgcaccattgtcggcaaggcttaccggcagggtttcttttggcctactgcagtatccgatgccgacaaaattatacgcacgtgcgaaggttgccagtttttcgccagacaaattcatctaccagctcaagagttgcagaccatcccactgtcttggccgtttgcggtttgggggcttgacatggttggcccgtttaaaaaggcagtcggcggttacacgcatctctttgtggccattgacaaattctccaagtggattgaagctaaaccggttatcacaatcacagcagataacgctcgagacttcttcatcaacattgtgcatagatttggagtgcccaatcggatcatcactgataatggcagacaattcactggcagagtttttaaagacttttgtgaagactttggaattaagatttgctatgcctcagtagcgcatcccatgagcaatggacaggtggagcgagccaatggcatgatacttcaagggattaaggcgcgtgtttttgaccggctaaaaccctatgccggcaaatgggtgaaacagctgccatcagtactttggtctttgcgaactacacccagtcgggccacaggccagtcaccttttttccttgtctatggggcagaagcaatgttgccgagtgaagttgaatttgagtctttgcgctttcgaaatttccgtgaagaacgctacgaagaggaccgagtggatgacttgcaccgattggaagaagtccgcgaagcggctttgattcagtcggctcgatacttacaagggttgcggcgttatcataaccgcaatgttcgatcccgtgccttcctagtcggcgacctggttttgaggaaaattcaaactacacgagatcggcacaagttatctcctctatgggaagggccatttatcatctctgaagtcacccgaccaggttcctatcgactcaagcgcgaagacggtactctcgtcgataactcttggaacattgaacatcttcgtcgtttctatgcttaggcttatcattgtacttccctatcttgactgtcaacattaagttttcttcttgaagttgtcagtcgggggctatcattataataatggagtttgattacttatcaattcaatttgcttacttggtctatcattgccttgtttgttttttctacttagtctgcgaggactgaaagtttttaatagcttctttgggttttaggctcaacaaagcttgataaaagcttttaagaaatcaaagacttggctagaattatcaaacacagcataaatacaccagtattgtacaagttgagcctccatttgttacattcatactcagtcagaatcagttctttcatcatcagagttattgttgctcggctgaaggtcgttgttgcggaattgctctacaacgtcacttgcaatcttgtcagccgcattttgagcattggtgatgagatcaagagcagcttcttcgcttgtcccgtctgcaaagccatcaatggcgtcaatttcaattctcgggtacaatgatttggtcatcgccaatgccatgctagctcccatacttccagctttcttgatgttcttgaaatatacatccggagcaactctcagcttgtcgaaaatttcggttgcgtcgagtgcactcggaccactgttattgaggaacatagcttggacgagtggtgtagcgacattggcgacttcatctcttgctccttcaagcctcttgatcttaccaaccaggacatcaaattgagcttgagatttgattttgcagtctgcaaaacacatttatgataagaatctgctgtatttaaaagagagaagtccagattgttagctggtagtaccttcaacctccttcaaggctgagtccctttgcgcagccagttctactttgtcttttttcaaggcttcaatttgtttctccatttgagccatcctggtggcttgcgctgtttgaaatccaaatgtttgaggatacagttatgacagtacaaattaatgggacagatctagaagattaccttttgatgaaccactcagctcgaagtttgaatcctggagctgggcaattcggtcccttaattccttctctgtctttttggcgtgctccttggcctcgtgtagctggtccctaactgcttccagagttcccaaatgaggaaccagcttttctaaagttgcagtcttggcctcattgcgaagatggattctctgcatgatggttcatggtttagttctgctaaaaagaaaacaaagtcatcaaaggcagtcgcctgaaagatttacattcacaatacgagtggcttccccaagcgccttcttcagctggcacacttcctcatcttctttttgacggtttatgacgatgccggcaacctgtgagttctcgtcccaccatttgagcaagataggaggacgagaatcatcagccgcctttatgcggggaatttcttcttcgccatcgcccggtggtcctgatgtatttccaagacattaggcaaacaaactggagttatttaaatcggtatcacttgagaagatgagttacctgaggatgttcctagctgagcgtgaggtgacccttgttctttatttggagacccaatcattgagtctttactagtctctggtccttgggaagttgtcgtctgcgctccaacttcagggatttcttgatcgggacctgcatccgactggtttccagtcgggggctcttgggttgttgcagtttcagctgctgtcgactggtttccagtcggcggctggtcactcggatcggccttatcacccgaagcatgggcaccagtcggctggctttcggcagttggctcaggatccttggataaatttggctctgtcacggcttgatcaggatcttttccagttggatctatgtcggatggtttcctgcaaagtgttctttcaatatttagtataatttctatgagagaagcatgtcaaagggaaatggtaccgagaggtttatacctggaagatgttctaatctttggcatttgacggccagccagttttttcctgggcatggtacgcttcgagagtttattaggcgagcccttgtccccagatttgttgtcgtcgtcgccttcatcgttgtcaagcaccagttttctcttgcgagaacctgtctgtccagttggattggaggtttgaggttgcgaatctggtctgattattggccctccacctccctgaacggtgtgctggcgaggagaccggcgctgagtgattgggggatcagattttatcaatacatattcctgaataagatgcctccatggttagttaactcaacatgaagacaagatactattttggtcataggttgaagatttcagatacatacctgcggaggtggattgaatgcattatatggcacaactggcagctgatgtgagtagctgacgacaatagcatttgagaagattttatacattctctccttcatgattttaaaatccagagagtctggttcttcgcgattaggatcatgcttgccgtcaaactcaaaagctgtacgggatctttctttaactggcgccagtcggcatttgatgaagtgccgagtgatctgctctccttgtaagccttgttctttgagttttagcatgcggtccatcaactctaaggcttgggctgcttcgtccccaatcggaagagagttccaagtatcttggtacactggaggaagacaagagtactcgggaagagcaggctcaggattctgaacataaaaccagttcgcatgccaccctttgtttgaagtcttgaagggcattgagaagtacttctggctcaaagttcccctcagctgaaatccggctcctccgactacacatggcttgctcttgtttggttggggtttgagaaagaagattcggcgaaacagagcgaagtggggtttaattcccaagaaggcttcacaaacatggatgaaattggcgatgtggactatggaatttgggtttaggtgatgcaagctgattccatagaagcttaatatcccgtggaaaaatttcgaggtcggaagagcgaagccgccataaaagaaatgagagaagaccacaacctcgtgtgtatcgggggacggaaaagcctcaccgcacgctggccgccacccgatgatctccttggcagggagaacgccgtgcgccactatctccttcaggttctcctccgtcacgtcggatggcgcccattggccctcaaagctttctttctcttccgccattgattttacccgaatgcgctgatttgattcgggggatggctagggagaggtgagggattgaggcggtgaattacgggaaggattttgatgaacttttcgaaggtggatttgagtggattggtgaaccctagtttgcctgcgcagctccgtactgtagcagggagtggggaaaatggcgagagttccggcggggaagactaagtggcgcttggatcacgggattttttgttaagggtatcggaggtgcgaatgggcttaggcctgaacagtacctcagcccaatacttttaacagcgtggcccattgtgctccttagggacttaggcattttttgctttggcaacttatgcgcacaatagtgttgtccaatgctgataaaattcttttttacgcggtcatataattcttcggaattattgcaatgcgaattttcaggtgtggcctgtcacgttcttttagggactcaggcacttttcgcttaggccaaagtgcgcgtgatcaagtgcccaataccttaaaatccttttataccgcagttactcaactttttaggagttggtacaatgcatcttaaaaggtgtcaaacagtaaagctttatatagctgccccgctgactttttaatatagtcatggtgctgtttgggtttttaagcaattgattggatacaatatcgttgctctttgccacgtaagtgtgcgtttttattgaccaatattatggcttaggctgattatatattgtagtcattttttttaggcggttggtaaatcctttatgagtttatttactcggattttacaccacatatgcctgttttcattatggtggatagtcatagcttaggctattagacttattcattaccataatttttataatatttggtgggtaatctttagagttttttattcggatgcctgtcaagtgtgttcattcgtgaaccttttagagtgttaaccattcggattctttttattatggctaaaaagcagtcggctagaatgcctctttatgcgccgcatatgcttttgtcatatgatgcatgattgtgctattattttgttctcaactatatgtttagtttgttaactaatcacatagttgggggctacacctaattaggtgcatctattcgatgcaccatattccttattttttcgccctttacagtcttcgtcttcgctactcggcaggccttggcatgaaaagtttgaagcactcggattattatctttgagaaggctatgatggttgactgcaaaggtctcgggggctactgtggagattatggatatcccatatctacacggcgatgatatttggactggatataggataccgaatatatatagaatatcttatttgtatctcgggttcgtttcttaacttgtacatcaaggaaacaccttgagacttagtcggttacgactgtattttacctgtatctgcatattccgttagggatatagattatcttttgtaacacggactccttcccatatataaggggggtccgggtgcctctaggggcagagatgttgattttctccaaatcatacaatcaataatacactcggcggattcatccccggacaggagtagggtattacttcttgaataagaaggcctgaacctgtataaatcctttgtttccaaacccatacacttttccagcttgatagccacccacttttattattgccgaaatctagtttcgacagttggcgcgccaggtagggggagcgtcaagcttttcgccgatcagtgcaatgggttccgtctccggcatcgacgacctcgtcttcccacccgggcagacgtttcggttcggcagcctcgacttcgtcaccaacaacttcggcaagatctctctccttgactcggtgtcggcccagtcgggagagaaccggctttcagtcccgtttggactcccaaacgcggctgaaagttacttcaagaccatctcaatcgagttggcttcaaaccactcgggcgagatcgcatcttctccaacgacaccagatcaagatgatggggcttacccaccgatcctaatgaagctccccgacgattcggcggccgcctccatcacgacagcgtcttcatcccgtaggcctaggcggaagtcggcttcaacaccgatttcgcctagcttcagggaagtcggcgtcatcctccaaccactcggcacggtttcgacggatcagttggacggctactacagctctcccaccgtcgactcgcgccccaccgacatcgtggagtacgacgag

SEQ ID NO: 9506 - DNA, 1434 bp, Oryza sativa
  unsure (1)..(1434): unsure at all n locations
accaacactggggtgtcaattaaaaaatcaaaaacacttctgttttttcaaccctattttatttactggaaaatggaaaagtttgcactagtagccctataaatgttgcgcatttgagcaatcaaacttatcacttttggttgggtgaatctgcttgaacagtgcaacttgtacaagtagaggtataaaacctaagcattaaataaaggcacggacaagtgatgaaacaagtcgaaggaacagaggcatcagattaactatggaaagtaaaatagatgaccttacaaagctaagattgaggcctaaatgactattcgatcatgagctttttgctaagtttcgataaatctgctaaaacaccaaaatagaaaagaacagattcataagttcgcttggctagaagtgtcattaatttcaaaggaaaacatgatagcagaccttaatatttttttaagcagtaatcagcagctaccagaaaaggagagatgatacctgcaatagtttaccaccagcgacgaaggaacgtaatcccatggtatcctgaaaggcaaattgggtcagtagaagtgccagtgccagatatgcgtcacattaaagtaaaatttgaatgggtaactgaagcaagcacaaaaagggaaaggctaaaactatattaccttgtttttgaaagtgactaggaactgagcagcagggtccctgtttgtagcatttgacacgatatcaaggatccaaccaccaccaccagcaagtctctgtcttgcaacatggaaccctgaattatcttttgttctcaaggctacaacaaaaccatctttgagtgtatcaggatatttccttctgagaactgtaggcaacttcgtctcagaagttatttccattggggattcagcaggagatttctgcttgtattttgagtcctcaggagacgcaaatcgtgaactggaactcaatacctggtcccttccactcattgcagtatcatcatctctgcgtgaggaataattactgccactctctacagcagataattcatctgttttctgttgagatctgcggcgagcaggtctctttttccctttctttccagaacggctgcgccttccttctgatcgggggacaatatgttgagatctaacagatgcttgaagctctttatgcctggatatggctcttctcttttcgtacttcatttttaactgactttcatctgtctgctgctcagaataaaaaacttgtgaactgctaaccttttcttctagctgatcatcttcatttgcagcttcgctaatttcctcatcttcatcagatattgcactacttggaacagcaccatcaaagaaaaaggactgcaatatcgngattgctttctctcttatttccatccacacttcttcactgtagtctgcacttcgaggaagaattaaaacatttggc

SEQ ID NO: 9507 - DNA, 11177 bp, Oryza sativa
tattttccgctctgcccgcgcgccgcgcgcgcgtgcgcatgagccgcgccgagccgagccctccctctccgctccctcgatgatgcttcccgcgcgccgttgttcgcatgcacgcgcccgtgcggtcgccgcccgtgccgcgcctgcgccgtctgcgccgcgagtcagcacgcgtgcccgagccgcgccgctcaaatcgccgcgccgcccgttgcttcccgcgcgcgcgtgccgtggtggccgaccgcctggtcgccgctgccgtcagcctctgccgcgcctgtccgcgcctgccgtccgtgtcgccgctccgctccaaaccgccccgccgtcatcgccgtcgtcatcaacccgaccccgccactccgcgcgctagcttccaagggacggaggcagagcccctcctccctctgccgcgtcgcccccgctccctcctccttttcccaaagaggcaaggggcaagccccctttctctccctccttttcccttttttcctcccgccggcgtcatcctccctccgccctgtcgccgatttggccgctagccggagcgccagctcgctggcttgaccgtccaaagtcggttcccctctcccaaaccgtcattgccatcctataaagcccaggcgccctccctctcttctcctctcgttgtcccatcgcctccactccattgtcgccgcctcccgtgctctgttcgccgtcgccgtttgtcgtcgcgcgtgtcggaggagccggcacgagcgaggacgcggaaggggactccgggcgcgccctcttcttcctcttccccggcccgaggccggagagatcactcccgtgccgtcggcccatcgtcactgcgccccgtcccgcacggtagcgcatctccctattctccctcctcgttccatccccttcccttagactcgggtagtagcacgagtagcctccccgtagctagctggcgccgccccgactgctgccgtcgctcgccgtgtgctcgccgccgtcgccgcccgagctcggaagcgcctctcgtcgccggcctccctcgatgcgttcctcctaatccggcgcaagggacggattcccgtagccgcgtagatgctctcgccgccgggaatcggcccctcgtgacctcgtcgccgtttccctcttccctccccgccggttgccgccgccgcaatccgccgccgacgcactccctccggcgaatccaagccgttggctcgtctcccctcgtctcgtgcaaccacccggtgtgctcgctttcgcctgtatcgccgtggttcgctccgccgcccgccgctgtcgtccgccgtccgttccggccggcgtcgtcgtctacctcccgccggcccgcgtggctgccacttaggcgccatgtcggcgccacctcggccgcgaccggatcggctgacccggccagccgctccctccgttccccccccgtgcgcatggtccgcggtgagccgtgaggctgcgcgtgggcccgccgcaccgcatcttccgcgaaccgcgcgcgtgcaccgcgtccctcccccaaaccctagcgcgcgccgcgtgcgcgttccgcacggtgaaccgtgtcaccgacaagcgggtcccacccgggaccacgcgggatggacccggcccaccggctctctctcccctccccgcccgcgcgcgcgctttgggccgccttcttgggccggccggcccatttagctcggccgagccgccccttttctctcgggccgcgccctagccgcccgagggaagtctacttcccctccctcttccttttctttttcaaaaaggatttaaataaatcctttttcctttagaccaaaaatccaataatcttagaaattcaatatcttcccaaccgtaaatccgtttgactccgttcaacttccaaaattcctcaaatctcgagatctatctaatggcacgcttagaggtcattaatagggctttattttcgccgtttgttgagttgtcccgttttgcgtgtagtttcggagcccgaagacccgcagtgcgaggatttcgaggatcaagctcaagatctcgagcaaggcaagccacctttgaacatcttgagcctatatctgaacttaattatgttgcttgaaaaaaatattatgcattgataggatcgcacttaatttgcttgtcccgtctgcaaggcagattggcgaacctacctaatttgttgcatctgatccttcctttgttaattgttataccatgttcccttgtaaccatctagttgcgcctcgatattcgtgcactctatgcgagtatcgacggtcgccttcaaacttaaaatctgagtaacttcttgggtaaaacttgggttttacaaaagacttggaaaacccgacacctgggtcggtgcttgcgaactaaatgaatttccaaaaccacggaccggggaacgtaccgggtgtacggtttcccgctcttgcacttaaggaccgtttccttggaatttcatccgaacataagacaagtacgaccacatgggtggaatgggacacccctggctgagtaactagtttatcaggggagccttgatgccgagagacatgtggattcgccggggtggtgtcggggaggacccctgggcttcctggcacagtatggtctgggacctaacctgttgttggtctgggacccctctcgtcggcatatggtaaacctgtgtcggctttggaaatgccttgtcatgaaagcttggagatctcccgacgtggctgatccccacgggttgggtgatccgggttagtaatgtcgtgtgggtaaagtgtaccccctctgcagaggttaacaaactgttcgaacagccgtgcccatggtcatgggcggatgtgaggtgattcctagcgtagttttgtttgactactgccttgtgaaattgctgttgtgaaaaggggaatcgatgtttggaaaatctgcagctgatgggatcagctaggcccgggtggccgtttgaaagttgttggcccgggtggccgtttgaaagttgatggccaggtgccaatcttgaacaattctaaagactgatacattgcacatactccgaccggacgagacgcactgtctcatccgtgtcgtttgagaagcactcacttagttgttttcagaaaagagttcaaataaaatcaattgcaaaaacaacagcctttccttgaagcctgcattaaacacttatttcccatggcttgctgagtactcccgtactcacccttgctctatataaataatcccccccagttgctgaagaagatgaagcggatcccgctgacgaggagttcttccaggagcaaaccggctacgatgagttttagggtttcggcctaattcccaagtcgcgcctgtgttgtttggtccaagtcttggcttccgtttccctttttgcaatgcagttgtgagcttgggatctgtccgcagcccaacatgactgtacctctactctataataaagagacctttgttgctgtgatattctgtcttcctgtgataccagcactgtttcctgggactggtatcgattaacaggttaatttggagcgtcacgggctagttccggtcgggactagttcggggcgtgacagtagtataataattgtttctactcataatagaactcataaatcaatggttaaaatcaattctaaggctgtgttctataatacaccttttcaacttccattccctcatttttcatgtgcaagctttctaaactgctaaaccatacgtttttttaaaaaaatctaatatagaaaagttcttttaaaaatcatattaatccacttatcaagtttttagctaatgctttattaattatgtgctaatccgttcctccattttacgtgccaggagaaaggttcccaacccccaaacaaacacagcctatggtgataatgccaatattagaatactaattagtaaggatcaccgtcatggtacttatttttaatagtttttatgaaaataaaattagaaaaggtagtgataaaatatgtacattaaagattatcgatgtctaacaataagtaaaagaaaacggagacaatattttgttcattctactgcaagctaatgagtaatgaaacatgataaacgtggagccgtggtttgttggagtattggataggagtacttcctccatcaaaaaaaactaaacattgaagaggagggtacaatgaatctgtgataactctttgttatctttcatgaaagcaaaaggtctgtttgtcccggaatttgtttagaatggagccctgtctctctggcacatggtagccacagcccacagctagagtcgttcaggttcagagtggttttttttccccaagaactgttcagagtggttagcctggcattttcaaaccacctcgaaacacatcgttcagtatcacgcaaggagcgaaaaagattggtcaagtactatagttcttttctgtccgtggggtatggaccaaacttgaaaatggcaacgttttactttggtttccaaggattaaacattttattttaagaaactccgtttccctaaggaaaaaaaaagcaacgctgaaacatgtggggacttggaattaacatctgtgtgcatgagttgtgagttgtgaatgggaaaggtaaccacttgtaattgtgggcgtgtttagatctctaatttttcttttgccaaaaatatcacatcaaatgtctggacacatgtatagagcattaaatgtggacgaaaaaaacaattgcacagtttgcatgtaaattacgagatgaatcttttgagcctaattgcgttatgatttgacgatgtgatgctacattaaatatttattaatgacagattaattaggcttaataaatttatctaacagtttacaggcggaatttgtaatttgttttgtatacttaaaaaaaattgtgtaaagaactagacacggcctgcatggagtaatttcaccagccgtccaagctagctattcgtctgtcctgttgtttctttcaataccaaagcgaagatggagcagtgatgactgacttgcagagtcttttgagatgagcaagaaatggtctttggagtacttggaataggagtagtagagaaggcaggaaaagtggagtaacctgaaggaaggggggttggatggccaatcagggaggtagcggtgaagcgggtagcagtggaggcggaggtagtcgcgccagttgtgcacggtctccttgcggacgttgaagctggtggagaggcggatcttcttggccgggtcgtcggagtagagcttggccttctcctccgccggcagccggaagaagtcgtgcgccaccgccagcaccgacagtgtcagctccactggcaccccatggttgagcacctgatcaactccatcgatcgattgcatgcaacagcaacatccaacatgtgtgagacctgcttatacgagatggacgatgtagtaacgtaggtagtagtgctagtgatttattatacctggaagaagccgtgggagcggcaggcggcgccgacctgggagacgagcttggcgcggtcggggttggcgaggtcgacgacggggatggaggcgtcggagagcacgtcggcgaggcgcgggcgctgcgcctcggggcgcacgtagttgcccggcagcgtgtcgtggtctgccgtggagatgagctggtccgccatgccgcggtacacacacacaacttggcacgcaccacaccacggggggattactactataaataggcgcgacgcggcgccagcggagaagcgtagtcaggcggggagaggaagtcgagtcaggtggcggggggagaggggccggatgggtcgtcagcgatggggctgggcgtaacgtcatcgcggtggtgtagtataaggccctgtttagatgagactaaaacttttaagtccctatcacatcggatgtttgaaaattaattataaatattaaacgtagactattaataaaacccatccataatcttggactaatttgcgagatgaatctaatgagcctaattaatccatgattagcctatgtgatgctacagtaagcattctctaattatagattaattaggcttaaaaaatttgtctcgtgaattagcttttatttatgtaattagttttgtaagtagtctatatttaatactctaaattagtgtctaaagacagttaagtccctgatctaaacaccaccttactccaacgctacggcgacagccaatgctagcacgagttgtgtactcgtgttgcggtgtttgttttttattttctttttgccgcgtgcgagagtgggagcgacgcagtgtgtggttcggaatccgtgtggttcgatctctgtcacccactcacatcagtctccctccacatcgagcctgcaaaagataaaaaataaaagtataacctgagctttggtaggcaccgtcagcctcttattgtctccttgttgttctattaaccacgattgaaatttaaaatttagatccagtttgaatggagaaatattgttaattctatcagcaacgtaaaatcggattagacacatcttattaacgattacgaatttgaataaccaatctattcctagattattatataggggttgtttagatcaaatggtgtaaagttttggcgtgtcacatcagatattatatactatataggatgtcgcatagagtgttcgggtactaattaaaaaactaattacagaatccgtcggtaaaccgcgagacgaatttattaagtctaattaatatgtcattagcaaatgtttactggagcaccacattgtcaaattatagagcaattaggcttaaaagattcgtctcgcaaattagtcacaatctgttagttggagtatttttttagcctatatttaatactttatgtaggagttcaaacgttcgatgtgacatagtgtaaaattttagggtggaaactaaacatgcctataatagactccataagaaagcatttcacttctctctctcttcttttgttctagaggagccagctagtctctcgaggcggcgtcaatgcatccagttgaggccctgtttagttcccacgtaaaaactttttacactgtcacattaaatgtttggacacatacatgtagtgttaaatgtagaaaaaaacaattacacaaattgtgtgcgagacgaatcttttaagcctaattgcgtcatgatttgacaatgtaatgctacagtaaacatttgctagtgacaaattaattaggtttaataaattcgtctcgcagttttcaaacgaaatttataatttgttttgttattaaataatgtttaatattttaagtgtgtgtccgtatattcgacgtgacacgtaagactaattttttttccaactaaacagggcctgagctcgcttggggcattgtacgttgtctactgatattaatggctgagcaatgaaccaagtcaaacatataagtagagtagcactgatactgattactgaaacaagtcaaatacgagtactatacagtacgtattgaacgactaatcttatcttcgctggatattgggcgtactgggcggcgcattagaagtgagttataagcctactttaagattatatggaggagagaggtaaacaaaagagaagggtattggctctcatgcaagagctagtttaacacaagctccaagacaaatacattaaatgcataagtgagagatagagatagaagaagaaaattatagctaatctattatagcacccgcaatggtaaagtaaggtgctatctataaaacatgtacatctcagcaatagactcgattaatagtaaaccaccttaatagtatgtctacattggtatctatagctctctcatgcattgtctcgtttttctctatagactatctctaagttagtagatagctttgctctctctcttcatttaatacattccaagtaggaaaatatgctgacatggatctcttgtagagagcctatagataatcattgtgggtgcccttatatgtattgattttaggatgggctaataggaggaagtgggctatattattatctttgctcttatttgtttgttttgtttggccccttcttttttctgtgggcgcagcattcaagcgtttctcgcgcagaaaacagagcgcggttcatggttcggttgcatttcccggtgagattgtgactgaatacaagccgtaggttcagcttaaagtcaggcggcagtgccgtgactgccgtcacgtagcggcgtgtgcagatgaaattaatccctgctcagcgtgtaccagttcctcctcttgacgccgtcgggagcgtttttttcttctgtacgtcaaagcggcggcgttcaaatttatagtcgactcaccttcgtcatctattttttgaacagtcgtcgatcggactaaaacgaattaattatagtggctgtgcttagaacttggatcaaaggccacatatatcttatccgcatagtcatttttgtgaatttagttgcactttaacactactaattaattatagcgtttaccagaatagtctggttcaattcaacttaagaaggttgttttttttgaacacacaacagacccgcgcatcgatatattaaacgaaaacaaacaagttacaactgaccatctactagaagcagggccaaaagttctactccagcttaaaagattacggtaaagcttaaaagacgctactaagcaaacgggctccagctcaaagggtcgggaagagaggctgaatcacgaagagacgagggtgaccaacaggaagccgagctgctgctgtccccttgctgcacccctacatctatctagaggcggccttctttgcaagacagactgcagtaatgtcagcacggaggtcaagacttcgtcgaacactctagtgttccagcacccgtaatagtaaagtaatgtgctttttataaaacatgtacatctcagcaatagattagattaatagtaaaccacctcaatagtatgtctatatgagtatctatagctctctaatgcattgcctcgtttttctctatagattatctccaggttagtaaatagctttgctctctctcttcatttaatcttttctaagtagaaaaatatgctgacatggatctcttgtatagaggctatagataaccattgtgggtgcccttatagagatgccacgccaccaggatgatgagcaagtcaaagacacgtctccgcaccttgggtagaatgttcttagaccatccgcaatgggtgtccctggggcgtagccctgggaacgaccgttcccctcccgttagctttttcagccggaccgtcttctctgccagacgcgcgcctcctcgctggggtcgcgttcctcacaagctttttttctgagacaccgagccggaagacgcattgcagagggcgtggctaggtgagtgtcccatgaacaccgctcccgccccacattttgtcgttccacccctcaccctcgtcattgggagtaggcaacgaccggcgacgaccccgcgacagcgacggcagaggaagaggggtggaggcgtggcacgcgacctccggcggcgacgatgggtccgcgacggcgactactagatctgcgcgccgtgcccaccaccgccggcgcgcagagacgggcggtagccgaagggcagcggagggagcagcgacgagagagatggagggaggcggcccttctcattgcctcgtggccgctggcgatgagagagagaggcgagcggcaacggggagagaggagggaggtggcggcggcaggctgggagtcggcagcgacaagatgggcgatgaggagggcgaaaagaagaagcgagaagagaggcggaagaaaagaggggtatttggggatttttcatctggggctactttaggctaaaacacctattgtgggctgtagtaccctcaccggattgctttagattttgaggaacctatcaaaggtttgatggtatctttcattgcgaactgagtttctctactagtgttctcagttaataagaacactttagtagtggctcacatcatagatgcccttatatttggccactactctacgagacttactggctagttgggactgcaacctgaagactggtggcaagcagcaatttccgccgctagagatgccacaaatatgcacaggaaagcaagatgtggtttgtcatctccgactcccgagtcacacaacggacacgttgagtggcatccatgtctctgtcagtaagctggtccgctgtccagcatcggccgcgcgtggaaggcaaatcagatgaaaaacttgcattttcaccgacgttcaaggtcaccaaagctgctttcaacatgagaaggtttgactgcaagaaagttgatttaattgcttgcttatgactcaaatctattggctgtgcttatgtcggctccatctagataaatggacagttttattcacttacatattaacacagggattttcttgtagtgtgtcgtgtacattctagtacatatttacaaatactacctccgttatataatataattttttttatataattatgtgacagatgtagtaaatagataggtatggatcaaggttgatcgtgatgtctttttcatgcatggctggcaagccaatttgactccgagatatataaccttatcccggaacaagtgatgtgcatctactcgtttgggatttcgtgaagacaacgcatcacagctagccgtgacaacttgataaactccctccatccatattccttttacgtaaaattatttttgagcttttgtagattcgacctacgtatttgactcccaagcaaagcctctctattcgattcttatgttttatatacgtgttcaatgagagaattggatgatcatttgcatgaacatgcacgcaaacccgatcgaggtcctgcactgcatgcgaaagtttgcaagttctcatgcccgataggacggtggcggatggtggtgggaacggctgagatttttgccggccggatgcggggacaacgacagcaactcctcctcatccacctgcgatgggatagcagcaaacgctgctgtgtgctgtgtggggacgagaaggaaatggctgcagcgcggtgaccaggtgcggtggtgttcgtagctgcccctttctcgatctcctcatgcttagccagggggggggggggggggggggg

SEQ ID NO: 9508 - DNA, 12869 bp, Oryza sativa
aatatgttgcagtttgattctgttgttttacgtcacttgctaatgtaccttttcaaatatgcagacaaatgaactctatcagttggcttctgttgctttctgcttgctgctagcctgggtaaggttattcaactttattgcctaaagctcattctgacatcagaatgactttcatcactcttattttaacaataaattggtaaatatttaaatataaccatacaatttttattcagcaaaatcttataatttagaagttattgatggtcaaaggtggcaagtaaatgggaacagaggaagctacaggacaaatgcagtcagtatcgaatgattgcatgtgcgctagtgcggggatgttcccccaaaatgttaaggatggctagtgttttgtcattatcaataaataatattctaacaataatcccaatgtttgccgaacaagtacttgattattatattcacaaactatttaaaggtgatacatggatagtcaaggagagtttctgcccatgctactgtacaatgtctctaacctgagggataaatggttgcatagtgacttttttttactgtcaaactagttgtattactattaatttcacttcgatcagcaatcttacacatgcaacatcatttctgtagatagagtaatgttatttctttgtatttccagtgtagtgattatcttggattgagtcttgaactaggctcatttcttgctggcgttatgatctcaaccacagattttgctcatcatactttggagcaggtaatatgctacttactgttgacttgattcttttatgcagggatttgacttgggtgtcaatgtttttcttttcctgttctttttattgatttaagaataaacggtttagaccaatttggatggtctgcataacagtttgctaatatttgaacttctggaagtttcttccctagtgtaattttgtttttgtagctaaatcagtacattttgttctgattgaactcactctctaacatgtaatttctttgtttttattcaaggtggagccaattcgtaacttatttgcagcactcttccttgcaagcatcggcatgctcatacatgtcaagttcttgtggaatcatgttgacatattgcttgcagctgttatactggttataatagttaagagcgtagtcgtaacagttgtggtgaaagcatttggatacagcatcagaacagcttttgttgtaagtatctctttcttgatggttttttcataagtattctgcaataagccaataatgatataaattctcactcctggtttttcttctctcacaaggttgggctatcattagcacagataggagagtttgcatttgtgcttcttagccgtgcttcgcatcttcatcttgttggggtgaataattctttatttgttcatcgattttttttgagacatacttcatactaaagattagccattctggcttcaatacatgcatgatgtaaaattcttgttgaaattttgtttttcagggaaaaatgtatctattattactgggaacaactgcacttagcttggtaaattccttttacctgatgatggagcttagttgtttaatacacactagaaatcatttgttttgctttgctttttctggcaggttacaactcctctcattttcaaactaattcctgtggtaatgcaccttggtattcttatgcgctggttcccctcggaaagcagtatgcagaatgaggtatgctttcttagcttctttgctgatggttgcggttataactactagatatattctttcatcaccaattactaaatgaatcaacatcctttttctgcagaaattaaataagccaccttgttctatctttgcttggaagtagatattagaagtgttcttattattcatgaaaaccatgatattgaaatgctttgtatatccatgagaagatttatatttcagtagtaaagccaaatgctcaatgactgtcattagtatctttttaattccatatctgatcatatttcagctacctttacaggataaagcaaccatgcttgaagcctacaacagatcactctaacattacaaagccacagacattcattcatttgactgacaatgatttattcgtgcattaactctttgcacatgccgtggaacattggacagacaattccatcatttctttttgcggcaatacgtctacacaagcgatgactaaagacacagtttgacaggccggggatctgttggtataccatttaagttgaaaaattgagttgtacatactgtacatgttgtcagcgtagcatattctttagactgtaaggccccaagccttggttttgtatcatccctgccaactcaacctaggagttaggtaggatttttggtgtaatgctatcagatataccgagagaaccgatatgtgctgattccccatcagaagaccatgggaaagctctatgttagtatatattgtccatttgtcctatgtatgagctgccaggtgacttgttctgttcttgtcgtatggataaacattttgtcacaacattctcttgtcctagtatgagctaccattggaaagtagcagcattttattctcccgtgaaggttaattctcttctcctgcctttttgtgtggtgaacattatttttctggagaaaacagcttgttagaatcgtcttgtagcgctgggcttttttggtgtatccgcatgattgcgatgataggtccctggacaagtatttttgcagaaactttcggtgcgtctgtccagtgggtaatggttgtgctggctcgtagtcggagcagtagaaaactagaaatcctaaacaagttggtgcaattattaaaggagaagctctgaccaagctagctggagctgaagagctggagaagatctggcccgaggtgctgacatttgacgctttgtggcgaatcttgtttcagtggttgcgggacgcacatgctcacgtggtcggcctttgcaggggtagagttcaattttcactattcaaacttcatcgtagacatagaaagcttttgttccacacagtgcaaaagctggaatagctcagttggccagagcgtatggctgttaaccataaggtcggaggttcgagccctccttctagcgattttttttaatctcatcacaaaaaatgtaactcaattgttttttttactctttcaaaaaatgtaattcaaatgtatcacaaaacaaatttcaatatattttttaatgtcatcacaaaaaatgtaactcaaatgtttttttactctttcagtattttttttaatctcatctttgcaatatctttttcactctcataataaaaaaacttttttactctcattataaaaactgtaattcaaatgttttttactctttcagtaatttttttaaactcatctttgcaatatttttttctctcatcatcaaaaatgtaatttccttttaattttttaatctcatctttgcaatatcatttttactctcatcataaaaaactttttttactctcatcataaaaactgtaattctaatgttttttactctttcagtaaattttttaaactcatatttgcaatatttttctctcttatcatcaaacatgtaatttccttttctttttttttacactttcactttcagcaaaagtgtaatactctcaggaaaaatgcaatttccaatattattatgttctttagcaaaaatgtatttgttcttttgcgagcctaagctcatcagcagaccagaataatcgtttcagttgcttgtataagagcttgccaattccacttccagtgctttcctccgaattacaagactgataaaaagttgaaaatttagtggttctcttagaacacaaaaagaaaatagcttcacaagtttagctacatggcagtacaaacaacaccgaaaccgctaggattttacacttggaacaagccacgccttgctgaacttgctcaattattatgggatctcacatgcacacagtacagttcgtccatgtgccgcaaccatggtgccttgcagctaagaacacacaattaaaaacttcttgatgagttcctgaaacagcaaagcaagaggagggacaaagtacagttaattaaaacgggagcagttgtggtgtctgcatcacatgccgcttgcacgttataaaaaattcctgagtgccaatcaggtgaagcatccgtgggattcctcaacggtaaatgtagatgcaatgggtcacattctcgtaaggataggagttatattttcaatatgctgcagtgatatgatttttttagtgttctaaatcgtaatgcaaaaaaaaactttaagttgtcaagaagaatagagataccatgcttgcaaattgagaattgcgatgttcattctgatttctgaacgaaaaatgtttggtatgaatatttgcagatgcaaaaaacaaaattcaatgaaaattttggaggcgttaccgttgatgagagggagaggttcttcttcttgacatcaactggcatcccttgcccgcagcacaatttgcggctaagcatcataagctcctccagtgtaaatgtgctcttgggaggactccacggattcttcagctgatcatcgtcattagcaacctcccagcttttctctgatggtgcccgtggaaactgaaaatctagcgctgaagtgtctccacttgagttgctgtaagcttctgtttctgaaaatgaataccatgtgccatggcgactggaaccacctgcgcattctgcagttccagatgcttccttgctgtctggaaatccaaatgcttccagatcaaaccctagagaatattcttcctcactttcagccaagaaagggtttagcgaggaaggagatacagaaaaatcagcatgatcaaacagcggatgaaaaggagatgcatcttggagaggcttcccgggcttttcttcccactggaagggcacgctgacgacaagtttcgccggagatgggcatgagatggctgatggcactggattggaaatggcccagtccttttttggcgctccaggcttcacctcccagagaaatgggactgaaatctgctgcttgacgcgctcccttggattgaattcagacagttcaagctcatccattttggatgtgtggttttactggtttcggaatggaatttgagctgttgtagatctttcaggcactgctgatataagtaggagagaacaggtggtttagatgagctgctcctgtaccacaatgctcttgttcaactgatccttcgctaccctgcaaacttgacacacaattagacagtaccaactaccaactcctctttagctcagacatgcagaaagaggtactcaattcagagtggttgatcttacatttgcattttccacagtactagaaagaaaagagggtgtagggagcacccgaaaaaaacagagataaatcctcacagggtttggtaatttgaccaaaataaccacttattcagatgcaaatctacattttacaaatgtgactggggacacaataaagaataaaaacaatgtgatcatctgttcaaaaaccagaaaacgttttttcctgttttaacatcctattctgctactgtaccgtgacgtcaggagatcatgaattagttctaacagactccaggtactgtaccacctctgccatgtttggtcgggcagatggtgtgttcgaagtgcataccagacctaatttgagcacttggactaattcagcctcaacaaatcccttcatgctccgatcaaagcagtctgacacagtcccatcctccaatatcgccctaacataatcacgcagaaccactgctgtcgccaccccagggctctccactggtttcctccctgtcacaatctcaagcaacaccacaccaaagctaaatacatcactcttatcactatatctcaagcttggagatgctaactccggggcaatgtacccaatggcagcatgcaatctactcaattcatagctacctagaataggcaaaagctttccaaatccataatcagataatttagcctcaaagtctttatctaacattatgttggaggacttgatgttgagatgcaggacttgtggtcggcagtcatggtgaaggtatgcaagtgcccgtgctgtaccgagtgcaaccttgaacctctgctcccaggagagaccaactctgctgctgcttccggaaaatgtatgaggactcccgtgaaggtggtcgtacaagctcccgttaaccatgaactctgacagaatcaattgcgttgatgatgaccagtagtaaccctgaaaagcaaccagattggggtggctaaggttaccaagctggcccatctcctgctcaaactcatcctgacttctcacccttcccagtgtttccaacttcttcacagcaatggataaaccattctcaaaggtggccttgtaaactgtaccaactgacccaccaccaacaaggcagtctttgtcaagcagtgccttagttcctgcctcccaatcttcataccttgaaggcaagctcttgctgaaaagcaccaactttccaataatggcatttgagccttgtctgccaggagatgcaagcatcggtgtgctctcggactccagcacctcatcctcctccttcccctcttgctcctctttactcctcctcatgtaagcctttatgttcatagcacaaacaatgcaaactccaataagtataagcgctgctgcgactatgacaattatgacagacacagccaattgtttcgccctccggctagccccacacagattgttcagtggaggtccacatagtaatgggttacccatgaaggcggagctaccgaaactctgtagaactggcaaggcagggatcatgcccgagagtccattgtaggacacattgaaatgggtcaggttagacaggttcccaagctctgaggggattggtccagtcagttggttctctgagaggtctagaagatcaaggtttgtgagctgtgcaagtgtcactggaatcccccctacaagatggttccgatgaagatcgagcaacttgaggtaagtcaagttgttaagcgtgtccgggatcactccttgcaattggttgccagacaaattcctgcagtagttcaaattagtctgtcagtacatgaaaccactgtaattcaaacgaattggactgggttgcgtagttaacagacactcacagctcaagcaagaactggcattggctcagggacaccgggatgtctccgatgagagcaagaccagcaagatctagtgtgacaagcatctcaattcctccgagctcggcagggattgaaccggcaatgcctgcatttcctgcgagcctgagcactgaaagcgacctcaatttcccaatgcttggtggtatgtctccagcaagagcattcgtccccaaatccagaaccctcaggctgcggcaattggccacactctccggcaccggcccagtgagccggttccctgaggcgtcgaagtaggagaacttggtgccgcacgttgcaatgttggggatttcaccatcgaaggcgttggacgagacgttgaagtaggtgatgtttaccaggccaagaaggccgaaaggtgccggtccggcgaaatggttgctcccgacgtcgagcaggtcaatgctccggcaagcgttgagctttccggcaatggcgccggagagcgagttgcttcggacggagatgtagctaatttccggcggcgcgcagagctgatccgggagctcgccggagaggcggttgtaggagaagtcaaacccggcgaggcgcgagcagttggtaatggcggtcgggactggccccgtgagggcgttgtgcgcgagggagacgtaccggaggcggaggcatgggtcgaacagcgaggcggggatctcgccggagaacgcattgtaggagaggtcgagcaggcggagccacgggaacgcgccgaggaacggcgggatctcgccggagagcgcgttgcggctgaggttgagcttgtggagcgtggggccgagcgcgctgaagctggaggggatgccgccggagaggccgttgccgaagagcgagacggactcgagcgacgccagccgcgccagcgacggggtgagcttcccggcgatgcccgcgccgtggacgcgcaggcgctgcacggcgcgggacgacgggtcgcacgtcaccccggcgaagtccacgcaggggtcccctcccgccgtccacgacgcgagcgcgccgttcgggtcggtcacggcggccttgaactccagcagtatccccctctccgccgccgtcgccgcgtccaccacccccacccaatgcagcaccacacccaccaccagaacggccgccgccgccgccagcgagcgcgtctgcctcatcgcgacagctggaggagcaggcgcagtgcgagtgcgagcgcatgcattacccccgccgcggtggcgacggcaccggcgctctacttctactgctgtgactactgactactactcccctcgtactgagagagagagacaaggcgcgccgagtaaaagagtggcgagtaggtggcggtgggtggcgtgcgttaatgtgcgggtggtgctgccgcgcggccatgagccctttcttccttgacgtcggttggccagaaaccacgttcttctgggtgtttggtgcgtggcgcgcgcggcgtttaccttcaccttacccgtggaaatctaggcgagacgcgcggtcaaaccgaaacgcgaacgcgaacgcgatcgggagcagcagcgcgcgcgcgcgcgacgtggtttggtgccacactgccaatctgccggcatgttgaggtgggcaggaagtgcgcggcgcaggcgcagcgaagggtggggtacggcatgggacgcgcggttggggaggaattttttctcttcaattcgctggctgcgcagccgcagccgctgttcacgtcaaccgctcacgcatcgtgccgctgttcacgtcaaccgacggccgcggacgtggtgtcgttgcccgtttcgcgttgcgtccgtataggtcgtagtactgtggcctacagggaaaccatgggtacaccacggatgcataaatgagcttattcactgctcgtccgtcgtgccggtacggtgctactactatggtgctaccaccgtgctgcggctgtacgcacagatctacagtaatagcaaagctactagtactgctactactagtattcattcaagcgtgagtggcaaacagatcagcatattgctgcgtgggcttcttgtatcatccgccggcgcaactgcgcgagcggacgatttaactactagctagatgtgccatctgccatgccatgccattgatgggaccaacataagatgcagtaggcatggtcgcatggagaaagtttgttggggtttggagttcagcgtgcctttctgtcggcaatgattcgtcggaacgtatcatcatggaccgacgtgcttgctaattaccccgatgatgcgttccagtgccatggctttcgactctcaaagcctgaactgcaaggtctctgtcaagatttggttaccaacctccacaaaagcattgccatggatgaaaacgatgccatcaccgggtccttaattacctcaaatagtaccagatccttgaaaaattgaaatgaacagaaacggcacgatcaaacttggcggaaatgaaggaaagaaacgtgctacctcatctactctactctacatgtctgtttcagaatagaaaggtctaatctgttatagtgctttgctacgatacccaagtactccctccgcccctaagttcaaatttacactaggggtaccaagtcctaacatctaaatcgatcccggcaaccaaatcgagccatcaaattgttcatgaattcgatgggcatgaagtaatgatctagcaatgtggcatttgaggtctgaagtactccaagttgaacttaattattcttctgttacccaatgtgtacaaacatatcacgtacaagaccacaagacaaacattatagcttacactctcatcgtctacttgttagcttatcagtcataagactcacaacaataaaaagtttaatttcaaaagaagttaaaccatctttttaaggagtaaagaggggttgtggcatcttccccctctctccccagtggtgacctcagatgacaaggagaacacctcaacggtgacctcagatgacaaggagaacataagctaggccatgatagtcgaggtggtagcatcaagtgatcaaggaaatcgaggcttgttcccgccattactgcttgtttccatcctcgttgcctccgccttagtcgttggatcaagaacgagctttagcagtagcactggaaagctccagccgataggaatgagctcaacggcaatagaggtaactatagctgatgatagcaataattgggtggcacggacacaggtcaatacacatatgtagatagaggcgacaagctcccaagtggtaagctctttacctctcttatcatcagctttcctcctcaccccagcctgaaatgctggtgataaagtaacatcttaccagcagcaacgcaaacgccttttcttatatagttgctttccactctcaaaacaccatgtcctctatggactacaaaacctttcttcaagccattttatttttctccactatggtagctctggttccgacgtgggtcaatgaagcttgtgtacccttgaatgttgaccggtaagcatggcctaaggtccatgtggtttcttcacatggattgtatatgttcgtgtttacaagagaaacaagtgtagcgtttttttttcaattgcaagaaatacgcaaacgtgcgcacaccatgcacaccgcgctcacatactagtaagtgtgcccccgaacacacgcttaaggagatggagactggcaacacatccttggacccatgaaattcctgatgaaagcatgctaacatatgattaatattcgtatacaccagaattttaaccctagtgagtagtcatgcacccatgacccaactatcacacgagtgatgctttcctgtctctgtagcaaatatagcatttgacttgacaaaaactttacatgtgtcgaataagatttgcactattaaacacaagattttcaggccaagtgaataaattaccatatcataaaatcagataatcgaaaaaaaaaatctaaaatctcatgcgtcacgagcagaggggcttgttggtataaaaagtgctattgcaactgctacgcaatgtggactctggttccttctcccgcacactacgattcggtcaacttgacgcctcgtggaccctctctggtctccatctaacggccacgatggtctaatctcacccccacgcgaatctcagaacttgtatccctctctccgtcttccaccacgacccgccacgacaaacacccccttcccccccactccactccccttccctacccgcccccgtcgccgtcctccttttcccgcgaatccgcgatcttccgccgcgcgcgtcactcgtcgacccccctaagccgccgccgggcgatggcggcgctggacccaccgagcgagctgttggtgacgccgaagacggcgaggaaggacgaggccgcctcctgcaatgcggccaccccgcccaagccctcgccggtgtcccccgaggagatgcgcgcggtggcgcgcaagttcgccgagcaacccgtacagaaccccgacgacggtgtctgggctgtcctgacggccatctccaagaatgctcgcctgcgccctgaggtccccctcccttaaaccctaaccctaaacccccaatgtttccttttgtaactgctagtactaattcagcattgccatgaaaagaggttgagatattgaatcgtaaattgctgagttagctcccaaaaaagtgctgagttagctgattggagccattttgtttaattgtagggaatgaacattcttttaagcgccgatgagcactacataggccgtgccgttcaggaatccagcttcaagatttcctctttgcagatcagtgggaaacattgcaagatatatagggacactgtgttgggggagcttaaccgcaatgaacctgtacctgttttcctcaaggactcgaggtttcttgtgcttctggttatcttgtcatgtattacaataaacagcaccctttcttaaattaacttattgtagcactgcagctcaaatgggacattcatcaactggaccaggcttaagaaaatttcacctccaaccaagcttaatcacggggacattatatcatttgtctccgctcctcatgacagtaaagattctgagcttttttcactttctatgatccaactctactgttcttataaacaattatgataaattcattgccttgtaacttttttagagctttcctgcacatggcctctgctagtttacctctgtgtacttgattatatttactgtgttttccctgtttaccttgcattgtttttcttgtatataatcgatatcgaactttttttggccatttatattgcgtgtttcatctacagatacttcctttgcatttgtctaccgtgaagttaatgctgtcagtcgtgcagagaatgaagttaccatccttaaaaggaagtcaggtaagagggaacatgtgctttcctaagatttggtgattacatttttccagctacattacaagtaatgatatatgtaccacaatttgtatttgatcttaaagaggatattcattctgaaagaaagagactaaaaggtcttgggattggttcctctgatggtcctgtttcactagatgatgttcgtcggctagagaaatctaatgctgtaagttgaccccttcaagagtt

SEQ ID NO: 9509 - DNA, 2972 bp, Oryza sativa
atgacttggctcactatgagtaacttttccagttgatggtggcagattgtaacatggaccgttcaatttaatgagagcccttagatttccatacacctattgcttttggagttttagtttgcactagatatgtccctcaacacatgttataatagttaaaactcctggtaccctaaaactaaggagaggatgtccaaaccagccatactcaaggtcattctaaaaccttgaaccacaatggaaggccttcggcaacatatagcaatccttgtcttcttttttttaacactaatgcattaggtgcctgcttctttccatctaaaagtttgcccactaccacccttctgggtctgtttataggttacaaattatgagaactacaaccctacaaagttcaaaccatgctgattgtataaatactatggtatcatggccataaattcttctgtttattccatctaaggctcaccttactctgtgtgtttaatgtaaacatgggtgcagacttacgacaccagcaagggacgcgaaggaaaggagaagatgagagatattgccttcaattggtagggtgacaacatatgctttgaactaataggctcacagaccaggaattacatatataaccggtgtcggatgttatggagtactgattgcactaccccttttaaattatatttacaaatttccaccttcacctttaatatctttcaaattgttttaccttttgcaactgcagagcacagagatttgtgtgggctttctacattattttggttgcttcttatgaacattcagtccatcaagcagaggtaaggtaatgaaacacaaagcactaactccaaagtccaaacagatatttttcaaaagcaataagaagaaagaaccaagtacaaaagaacagtaagataacaatgaagagattctgaggtagtcaccaaaggctactcttgcgatcaaggtatttgcaccactttttgtagttcttaaacaactttttcatcacttcattcagcgcgttatcatccaactgcaacgaaaattgctgataactcaggcttcagagaaaataaaagggaatatcaaaagggataaaaaatgtttatgtaaacatatgaaggaaagaaagtaagatttttaatctgttcaggctcagggtttgaatattttcagggaagaacagaacctttgattgtggatcagtctttggatttcgtcgtatgtgtacgttagcaagaagtaaaatcagatgctcacgctgattggaaacattgtctgtctgtatgtcaagaagtcgatgagacatcaaaaccccagataatgggtaggttaagagtcagaatcatagttatgaagaacaaataagcaacgaaaaatattcaaacaaagtgtggattgcctttcctgaaaaccaaacatagattgtagccagtccaagaggtcttcgttaaccttgtgttcataagttttgggccatggaagacctctagtattgcgaagagcaacagcggcagcttggatcttgaaagtgagaaagtatcagaaagtccttcactttgatagcattaagtcaactcaatagaatcgtaatataaaagaaacctcaggaaatttcatgactgcttgattgccactgtctggatcaagagggagtatattgaaagggagatatatctttgtcttctctttaactttatcagcggcttccaagatctaaagatagtaaaacagatgatctgattggtaaatactactacttggtagataagtaatatccatatgaacatgaatgatgattaaagttcagcaacagccacgggaaaaaaacaacttggtaggctatacctcatggtcaacttcaacagaatgctgttgagtgactgcctttaaaacctcaaatagaacattagcagtctggtatgccttggtaagttgagcactgcatgaataaagaaaaattggcaacaatgttgataagaagaagattatgaaatggcaatataacgcaccgatccacttggtcggagacattttgaagtgcttgaatatatttcttataatagtgttgatagaaggcctgtatttcccgtgcatcactcttgcgggcccttcctctcaaggtgggttcattctcctaatagaaaaaaaaacaacaggctattgagaatttgagatatatatccctgtgacatggttgggtttttaattcatacgaggcattggtgtggtcacctaaaatctttcaacattttctggacaaaattaactacatatttttttagaagctaagactaacctcctatgatgatataagatataactcttaatgagcacaatgaaagattcatttacacgatcatgtaaatgttgcaattattagcatgcataaaaatgttgaaacatagcactggctaaggggctatgtgtaaaggaaaaaggtagaggaaaggatataagcagaggcaagcagtcaatggcgccatcacaggacagttgtaggataaaacaaaaatggatgcaaacaactgactagagctagaagtacttgaaatgcataccctttcaagccgttgcaaaagagccgtcttgaattgccggacaccccggccacttgaagttggatctaacctgtgagccttttcaaatgcatagaatcgacctatccattattacagacatacaaattaatgtgatcaaacacattgtgaagcagaataagattagtattctttttttatggtaataagcaatgagtgaacaatgtttgtaagtggatcaccaagacgccagtgtttttctgtagctaacttctttgtacgtattgtggaagtgtcgagataggggtccccccaaaattcttatccaagaaagaagtctaagataatgatagcataaagcatttccatcaccaaggcgcaattaggcaagagagatgttcgtttgtgcattcaaatttttaaaacaaaacatta

SEQ ID NO: 9510 - DNA, 4884 bp, Oryza sativa
ccccatggccgacgagaagctggccgagatggcgctcgccgacccaaagcgcgtcaagaggtaaataatattcgatcactctcccatccatccatatcgtctcgcaaatgcaaatgattagaaaacgatcgatgattgcaatgtatattgagcgctacgacatgaggggatcgatcgactgatcgctgagagctttcttcctccggtgacagggtgctggcgaacaggcagtcggcggcgaggtccaaggagaggaagatgaggtacattgcggagctggagcagaaggtgcagatcctgcagtcggaggcgaccaatctgtccgcgcagctcacgatgatgcaggtaacacgcactgatcccttcgccttcccgctttctcgtgcaattgccgtctcatcgtcctgatcgccttttttcctgcgtgaaatccacacggttgtttacgttgtctgtgactgttttggcttttggcagcgcgactcggcggggctcgcgacgcagaacaacgagctcaagttcaggctgcatgccatggagcagcaggcgcagctgcgcgacggtacgtgcctcccctaaacctcctcgatcactcgctcctcccatgtttgtgctcgccaacgtcataagatactttagatgtgctcggcactatgatgaacagtcttgtgtaagttattgacgttgacatgcttgtttgtcctagtgcttgtcaactgttgccataatctcgtgtttttgcgcttggaggttggtagttagcttttctttatgcatatatttttctctcgggaagccggtggtcgttagtatgtactcctactactggtagggaggaggacatgccttagcaatcatccaagaacgaagatttgctattgtgcgtgccttttcccccaatcaaagataaaatatatagtatgccctatggcgtctctgaagtctgaatccgttagttgctagcatgttaggagcctgcagtcccgtgtaggagaagaatgttttggagtattcaatattctgcggtgacttctccagattgccaccctagttttcagggctttcacgtatcaaatgtttctccttggatgccatattgccatgtgattgccacatttccttctctcacaaggagtctttcgtttcaagaatctacactgatctaggatgtctactgccttttacatgatgacttcatccttaagggttaatctatctattaatgttatgagtagctgtatttttaccaagatgaattcatcctattgcaatatactgttaaacactgcaccatgaaagtatgccacgaatagagttcaggaattgttcacttgttagttctggttttgatgctcagttcctcactgcttcgccattatcttatgttcaacagcgctgaatgaggccctgacaaccgaagtccaacgcctaaaactcgccaccgctgagctcggcgattcttgctcgtccagcagtctagctcagcagatccaactcaatgctcagaatcagatgtttcaactgcagcagcagcaggctacgcagataccattctatcaactgcagcagtcacaacagaacggtgcagcgaagaacaatgaatcaaaagaatgattccagaggcattttgggctggttcatggaaagagaatattggtttagatgagcgcaattcgcatattcctaactcatttgttttaatgttgttaataatcaccttgcatttttctagtaggtggtggttggtgaacctccttttacctttctatgttcattgattctttggatgatacagttgtcatttttaagttaccaaactgatgaagttgtaggtgattgttattcttttgtactaatatctatgtcgagtattttgagtaccccggttcgttaagatacacttgtatttatcgacaaaaaggaatgtggggaacattacataaaattgccattgccaaccattcacaataaaaactagttatgccaggtcatacgaaaatgataaagagaaatttgaaatgaaatgaaaaaaaaatgcacattgaaaaaaatggtacaagctcatacccgagtgcagggtaaaatggttaagatatttacgaggaaaagtagctgccttatagcctatccaacagaatcttcaaccatggcctcctcactgtcgctatctgtatcattcgcctcactgccttcctcagtctccgcatcagacatcagatcatcttttccaacaccacttcctgggagttgctttctgaaatctggatcaacaatttcgatcatagcattaagaacacgatgatgatcggttattttactgatgacatgatcaatattactctggctcccagcagcctgtccatcagagttcactaaagcatcagctgctgagctccctctgacattttcatcctgctccccggcatggtctgtagtctcccccaagctcctaggagactcattctccccattgacagatggacctgtttccactgcccagctaccagcaacttctgaggccaacaaatcagctgtaccaatggttctggtctgggtatcctcgtgttttctctcagaacagttaacctcaagtttttcttcagaatagtgaccaatgccatctttgagggttaacgaggcttcctcatttccttgtggttgccctctatctttgcaaatcaagatggactcatcattctcttgtggttgcacttcatcatctagctgcatggtatcacctcccatttcactaaatctttgaagagctgaattgtgatcaccacagccaacattaccagcttggctttctgtctcgggaacttgctcagtatctgttggctctagctcaggagctgtagcagccagatcaccatgagaatcagacctgaatctctctgttgccatttctggactattgcactctacctcttgagtgtttgccccttcaactctggtaaaatcatcctgttgttcagtctccttggaatcatcacttgaactttgttcacttgcctgggtattctctgttgaagcaccagaagcttccattgtattttttgagtagtttactctcgtgcgggcatcgtcagcagttacagttgccagtggcactttattgagatcatcacccatgatactgttctcataattctcttcatcctccagagttctctgcattgctttaagctgttcctgctgttttgcaaacagagaagatatttcctctgtagttgaatagaaagcacgcagctgagtctccctgcagtaagcaacataggaaacaaaagaaaaggtaagctgatttgtagtttcacaaacttggggttcacctctatatgaaactcaaacaatgtttcttaccgtaaaataattctctctcttgctccttgatacctctgtttctcgattgatagatctctaattgtagcagctatttcaagctcaagagctgagacctttgcccatgcttcttcccgagcagcctgctaacagaagaacacagataatcagctagtaagtaaacaagagcaatcctctatgcatgcgaagaccagggtagattagcttatgtgatgaaaacatcagaggaacttgaaatctttttctaccttctcgtgttcaagttctttcttcacttttctcagatccatttccagtttatctgatttctgcgattgcaaggggggaggaagtgaagaaaagatgttacatacattcaatgaactacaaatgaaacaacttgggcttaatagctctaaacatgtttacgactgtaaccttctgattgttggcggatacaagctgttcatcctgaagttgagcttccagctctcttgcttttttctcagatgtgacaaggttctctcgagtatcttcctgaatgtgaaggtaaataattgtagaatggaaaaggaatgagtgttcaaataaacaacagcaaaaaagcataccagcttagatctcaatgtttccacaagcaaacggatttccttttctgattcctgaaaataaaagagaaaggtccacgcaatacattatttcccaattcctgatcattccctagaattggaaagaaaaggtaaaacctgaagcttgctaataacttctttctgttcccgttgttgtctaaggtgagcctcagcttgtctcttgatttcttcttgagcttctgcattcactttatgcagtgcagactttaagtcttctgcagccttatcacgctcctctcttcgcaagtctctctcctcacttagctgtgcctcaagctcacatatatttgatttctggctgaaaacgtttgaatgagtggagagtgatgttaaaattggacttcctatatgctgaaaaagcctaaatgtctatccagaagaacatctcacttttctccctggatcaactaaagtgctatataaaataatacttgggcatatctgtgcatgaatttcacgggaattttctaggaagcagtacgatccctccagaagttttatcaaaatctatcaaaatcctttattccaaacaaggagtattttacggtttgctgaatccatgtgccctctaagatatgggaccctcaagtaaaccagcaaaatgtcccagttcaacacaactatgctgtaagatactacaatacatatacctgtaatttgggaaacaaaagggtgaaatataccagtgtttttaaatgactttagtgatcacgactgaaaaatatatgcgacttttttctctttttcctaacgctaataacaccatatacggaaaactaaaagttatgagtattgccacaaagcattaatcaaaagaacagaaaaaataacctctgaattatctcatcagcctcagcacgtgattgcttatatgcgctaagcctctcatcgagat

SEQ ID NO: 9511 - DNA, 11354 bp, Oryza sativa
  unsure (1)..(11354): unsure at all n locations
cctgcagcccattaacagcattagtatgcttctgtcttggaatgatgaacctcgggctttgattccatcagacattacagctggttccaaatttcagttgtatagagttgttgaaatatactactcgtactcacctgcacctttgtctgtgaggggaactttcaacaaatctctcctgatcatgtgagcgagtctctacttgtactataaatctttgtataatacagtagcatcgtgtatgtgtgatctgattttctttataatggataaatatctggcccctatatccacttgtgatctgaatactgcagtatatattggtagtaaatcttgttgtaatttatgaactgtctttttcctggacgatcgattgattccaaaatcgtgggatttgagtaccagtatctgactcaagcgatctgaatgagtggtggtttagcgttagttgggagaaaattatcaagcacggagcaacagcgacccattgaaagttgtagctcaactagtaatcctggtggcttattggaggcctaggtggttaggacttgggagatcgcactcagacgagtatactcgtggcagttctgtctgtataaatcagaatcactggtctgtatgtgacgcactgtcattttctagtagaccaatggagcagaaacaacggacattgttgctagaacaccaaactagcatactagcattcacgcgtaaatcggctgaaaggatggatttcgcaatcagacggcaataccgtagtgggtcgtgatgatgatgagatattgagatccatccaacattctccaaaccacttaatcacctaagactagagtagtagactgaagaggcttaagctcagctaatgctcgagtcgtcagaaaagaaaatcaggagtgaacagaatgaaagcttggttgataatgcaggttggcgttggtccacccactcaactagaagtgacagcttcttagggtgaaaatccaccaggcccacccaataaggccaccagcccaatattattaggaataagttcactttagatccctcaattgccgagtctaaaatttatccctaaaccgcaaaaccagacgtgcccctcaacgttaaaaaccagtgcgaatttcagactagtacctggtattggaagctgagggacgcgctatatctgtattgcggctgaggatgaatttcagacttgacgacaaaggacttaatcggttgtgctggctgcagccagcaagccattcacagctgccgctctttcgtttggattggggctgactggctgcagttgctgcagccagcacttccgattagggccaaattgagggatccaaagtgaacttatccatattattatacccagccgcgcgcagcctatactaattgggccggaacggcccatccctctggaccacagtattgggccggaaagggatcgtggtgtatgcgtggcctatgaatattgggccggaacgggatcgtggggtatgtgaggcccatgtgagttcggctcgaacgtgtttgttgggccgagagtacggcaggttggaaaaccatggcaatgcgtcgctgctgacagcggttggtgagtctacttcaggggatcagcattccggaaccttcgaaaagagcgcctcaccttgttcgccgtcatcggatggctacttcctacctaagaattgagcttggaacgcaaatgctggtgcgctgatccatttcgccaatggaagcacgaaccgacaaggcggcaatacatgatgcggatgcatgctctcaagtctgaatctgatgaaccaatcaagttttcctagccatgttaatttggagagatctacatctactccaggtgactgacagacagatagcaagcagcaatatatactccagaacggtaaaatctatgggcaaagcagtgaaatcacgtgtatatttatgaccttactgtactttacttgcaaaatgtattgtagtagtagttctttaaaaacaacatgcagcctcgggattctacaggtaaagccccacttaaatcaactagctagtcgtcttcgaatcaggtctaccctcgtccctcgtccagtggttgttctgtagaagaaaccactgctttgtttctttacggcagacgtgatctgaaactggcaagaaacagtgccaacgcccgtccaacgataacgagatacacgcaacagaagcgtataaccaacaatttctggaatcattttggaaggatacccgacacagtaatggtctaccggttttcatccaaatggcagagcagaacgaacagtcgaaacacccgacccgacagaacggcaaaaaacgggcctgaatgccagcctgaaccggcaccgcgccaccgccacgtcgtcatcgtctcgattggcagctgccctctcacttccccaccaatgctagggcctgtttgttggaacttttacctgctacagtttttctcaaaatcagaaacttcccccaaacaatctagctttgatttgtataatctagaaaataaactataacccaaaacttaaaaaacctagcttctttaattctcataagctagctaccaacaacttctcggaatgcatgccctagatctcctgcgctgccatgccgcatcagcttagctagcgccttcacgtgcgcatgtgctcgctatattatccaaatcgcaaaaccatccaaggcgcgcggcctcaccaaccaccacgcaaacccattgttaattaattagcggcacactgtcacggcgcattatttgctagctccagtgacagctcactcctcttcttgctgctgagggcttagctagccagtccacctcgtcggtgtgtgtcggtgtagtctagcagctgcggcgggaggaggagttgccggccggagatggcagcggcggcgcagcggcttgtcgccgctgtcgtcgtcttggtggcctgcctggcgttgccggcggcgcgggggctgaacatcacggcgatgctgaacgggtacccggactacaagatgttcaacaagtacctgtcggagacgaaggtgtgcgacgagatcaacgcgagggagtcgatcacgctgctcgtcctcggcgacgggccaatgtcgacgctcgtcctcgacgccgaccagtcgctggcgggcatcaagaacgcgctccgcctccacgccatcctcgactacttcgacccgaagaagatccgtggcctccccgacgccgacacgatgaccgacacgctctaccaggccggtggggacgccgccggcaagatgggcaacgtcaagatctccaccctggacaccggcaagatcgccttcgcgtccgccaacccggggggaaagtacgaggccaccatggtcaaggccatcaagcagatgccgtacaagctctccatcatggagatctcggcgcccatcgagttcgacggcctgttcgacacgccgtcggcgaccaacctgacgaggctgctggagaaggccgggtgcaagcggttcgcgtcgctcatcaccagcaccggcgtgctcaagacgttcgaggatgccatggacaaggggctcaccctgttcgcgcccaacgacgacgcgttcgacgccaagggcgcccccgacgtcaagaagatgcccagcgccgacctcgtcacgctcctcaagtaccacgcgctgccgtcgtacaaccccaagccgacgctcaagacggtgtcgcgcgccatgcgcacgctggcgtccaccgcgtcggggaagtacaacatcacggtggacacgcggggcgacgccgtgacgctcaacacgggcgtcgacaagtcccgcgtggcggccaccgtcatcgacgacacgccggtgtgcgtgctcacggtggacaacctcctcatgccggtcgagctcttcggcgacgcgccggcggcggccccgagcccggacgacgcggcgcccgccccgtcgccgtcggtcgcggacgcgtctccgccggcgccgccgccggccgacgcgccgtcgaagccggcggatcacaaggaaatgaaggcgtcgtccgccgtcgcgttgcggtcagtagtgctcggcgcattagccgcggccgtgtgttccttcgtgctgctttaagcacaagtttttttttccctttcttccatgtccagtgccggtgattgtgattgcacgagctgcattgccaattattcctctgtataatgcgagcaaactgtgtacattttgttctaattctgatatccttttctccgaatcgtctgcgccatttcggtgcggtgaatttggaagaattcatgtcgcgttgagctgtacaactgtagatcatgtgagttcttgtcctttgagcgcgtcgtcatgcaggcccaccacagcaaatgcgggtgtgttgatgtgatcttgaaaaaacagattcgggcgagagagctagtgcggctgccgctgcctccttgtgctggcattggcagctcctacggatttcgatcaattcgccgtttcaggaccaccggtgccagtaatgcccgttggccgtgggttatttgataactctatctagtctttaaatatttttagacaaaaataatagaaatttaggtcatcctattttgaacgcgattctcaaatttaatagactaaaaaattaaagtcccttaccacctaggacaaccacaatgcagaaatacaaggggtattaaggggctgtttggttgagcgccaacctttgctacagttgtgacaattaaatttagtgtttggttcatgccacaggtgagttataccacttttttttttagcaagctagcccacttgtcattgagtaatttttttaccataacttgccacaattgtggcaaataaattcttagccatataatgtgccaaatattttgtggtaaactatgaaagttatgaaagtcatccaaactatggaagcctctaaagtggtccttatacattgtaggagtagttcatatatatataatgcctagccataagaataaaataacaatactttcttttctctctcacataacatacaattgagtgggaccagtaagatctatgctaatgcctcatcttatcatagcatattgtagcaactaccataattaatatcaggtcccatcttattacccaagtagacattatacattaagcatgccctaagggcatcagcatcagcaatgtttattcccaaaccaagcaataagggtgggcccgttgtcagggaaaatatctagcaatgtgtgtatgtaacagagggggggaggaataagattggtccaccttcaaccaacctatcacaaagccttgttctgacttataaaagtgaggtgggacccatcatattcccttactaccggcaataaacttgtaacctggtagtaactatttactactgtcacaatgtttattacttgataacaaacccctatttaatgcttattacctgctctagcactacattgtggatgcagttgtgagcactgtgtagttaatccacggaagagtaaattacacttctagggctcgaacttgcatggcagagaaaggagtacaataatttggaaacgctttttctgctcaacttgttcatgcgaaccaagaattcaattgaaatgcgggatgcacgggtatagccgttcagcgatattagtacagatttaactatttatctgtggagaataatacaaatttatacacatgaactccataaaagtaattaagaactaatgtcctgaaccctgatcattgctaaaggtcgtataaacaaatacggtatttacacacggaattgacatgctggcgtttcttacacactacactatccaattatacatcttatgttacaagtaagaggatatatttcactgtttgagcgaagttgtaactacaatagatacaatatgccctgtggaatatttacaacatacatacgccaaaatacttaaatcttgaagaccacaagcacaaaatgggtagagaagatcagtccttgttgcgagaggaccgctcccgctccttcttctgaccaccaagaatccgagagatttgcagtcctctactgaacgcttgattaaatagcatccgtgtctgaaactcggacacaaagggaaaccatgccaaaatagtaattggtgtaaagagaagaactcccataattatctcgtatgcccgagcaagggcacgaacagatccccatagccctgctcgccgagcaagaggcttgcaagcttgtgcaatctgaaagagattgagcaacaatgagaaatcaactaaagcataaatgaagttaatgagcagaacaagtaggagaaagacaaaccagcaatattccccatccggaaggtaagaatgccagaaagcacacaaatatatctcgtaaggtcatatgaagtattgctatcagtacaatcaagatggcgatgaacgaaacaaatatcataaacttaatcagacggaaaaatagctgaaaatccgcactaaatctccgccttccgacagatacagtctgaaaacagtataaacaatttaggtaagcaaaattatagataagatgctatggacagcaaatagtgttgttaacgtggccaccaacccgccaacagttgtatgatcctttttttttcttgagaaattaattctcaccttcataacaagcaataccaccaaaatcacgagccacgaaattaaatatacctggaaagaacaaagtagcaaaaaatgttacaaccaccccatcacttgttcaataaaaatgtagctctaacgatctttcaaaaaatgcagctttaacagaacaataaaattaacatggagggcataccaatatacttttgtcgcctgtgatatttaagtggtaaacaaggccatactggtatatgaaaaacctcagggacaaaattatctcaacaaaaagtccaattgtcccagaatatttcaaatgctctagctcgatctcccaccaggattcccaactcttgtctggtgacaccccaatgccaccacgattgctgatccacttattccaatcagaccaatcatccacaattttcgtccactcaaatcccgatggattgaacaggaagggtgcaaaaagccatgtcaacactaggaaccacatagagaatgtaacaaaaatataggcaatggttgagcggtaagattgaccaaatagttggtaaatgatgagcagaatcaacaactcaatgcctttaacaaagtgactgcgagaataaagcctgtaattctctgcaaacttagcatgaaagacaacaaagcccctaccagtagctctgtactgagcacctccatggagcaacattcgtccatagtagtgagtcttagtgccaagtgaaaacgtaaagaacacagctgccaattgcaagttcatcatgataaattcacttagtgcttgaccaaatcctttttcaaggccaatttccatcatcatgggcagggccatcagaaaacctagctgaaccagagattgtgaggcaagagcaacctgaagggggtggttatgaatgtatctcctttgtgttaaaagcccttcttcaagtccactgagagcaagataaaggcgtccatacagaaatacataaactgtgacaactgtcagctgtagaaaaagtgaaaagtattaaaaacatagttaactgtgctggcgtactcaaaacaattgcaaatacaagttattttagcttagggcattaggaattaaggcctcaatcaacaagggataataggaagatgtgagaccaatgtggctcagttgtacagtgaccaatcttcagggagtggtcgacgcaaagcagacataccagagtactgaaataaaatcccacagtagtgaagtagcatgaaagcattctgaagaaatcgaagcggtgtccaagccggtagatatcacggctaagagtctgctctccatttccattggccaccttagcctcaaacttagagatctggtttaaccctacatctcttcctttaccaacttgcacatattcatgatgtgttatatttcctccacggagagttgaattatagcctgtaacataaaagacaagaggagcattaccccagttcctgaatatccagttacatctggaaagaaattaacatacagggcattcgtattgaagcaatggagatatataattactgccaaagaccatgataattgatcttagccacttcattaatcagcaaattgaaactttcaggaaacaaacctgcaaaaatatcttcgctcaagttgatactccttgatgccttactgacaccacctcttgttagatgaaaaatcctatcaaatacgtcaggatggccatagtggaatcgaaccctagaataaagaaagtaatagctttagatgcaatccaaaaagggaaattctgtacgttttattataaaattcttatgtagaactagttatcggaaagtgcactataaaatggcttgctcaatatgtttataagctagcaaatgacatggcttagttcatcacatgcaatttcagatttagagaatataatatatgatcacttagcctttttcttgtgattgatgaaaataatgtattatgtatccattcaaatgtatagtaacacacatgtgaggaggaaataatcagataggagaagaaatctcacttcagnaagggnggnntntntgncannagcagccgttgcccaatagtcacaaaactatgctcctgattggacataaaccatgcgagagaagagacactgcataattgaagagaaaggtgcatgaatgaattactaacagaacctgaaaactcaattgagcaacagaacaaagaaatagcagaatgtgaaaactagattgagcaactcttatcaacctgccagtaaaaatatgttccctaactccaagtatagatgggcgccgaactccatgttctgtaaggaactcttgaagcaaatttctcattttaagtgcttcttccatatagttatcctacaaaattaaaggtgtgcacaagtaaatatgagtttgaatggaagcataagtgctgcacctcctttggagaaaatgacagcataaagtacgattctacaaacctggttcatgtctatggtttgcaggccttcaccacgggtgaagattattgcatgattttgattttcaggctttccttctcccaacattgcaggtcctggaagttttatccggtagataaccttgaaaacaaaaaaatgcaaatgttgcagcttcacaggatcacagaaagaactttcacacttgatccacttctataaaagaagcccataacttccagcatttatcagtaaaagaagtttcaagaacagcagttgtgcaggaggttcctaaaagtgtgtacacgtccacttgaacctttaaagttaacttcttgagcatctatcagttagagagagtggaaaggaattgtggcactgctaagcaagtcccgaaggaactcaggacacacttatcactctcattgcctgggaattatgaaaccatcggtgtgattatgttttgaagttttcaataggacagcagcattcatgtggtcctgagatccatttctcatgaacatgaaggctttcgttggtgcttggctgggcaaaaggacttgcgaatttgcaatactagctggccattccaggccattactacttggtggcttggtcgttcatgagtggtgtgtgctgcgtgtgtaaatatgtttagtgtgtgtgagttggtttttgggtcagaacgtccttcttgacctttttgtactgtgttttctccttattgaaatgacatgcagctctcctgcgtggttgaataaaagaagagagagtgaaaaaatctcactgcaaaattagattgttgaggatacctcttcaaatctaaatagtgttgtttggtctatggtttgtatcacttgttttagaattaggctgggaatcctttgatccttctattaatagtgtttttgttttgtgcctaacatgatttgccaaaatttatgccccactacctaatcaggtagaagtacggttacctgataagattttttttgacaaggaattacctgatcaagattttgaactggatctgtagattcagaatccttagttagagcaacctttaccaaagttgagtaataagctggctccattttcttttcttccactctatcttcgacctgatcgatatatgctacacgaagagaagggtacctgcaagaaatttatcgctaacaattagaacttgagacagaaggaatgacctacattatccaatcatggaaaacactgtactatcatgtctacaattgtgcaaattctgcagcaaagctttggaaaaaaatccattggttgatgtgtgtgaaagagtgtgatataactgcaaaacattaaatatcatgatcaaacatgatagcatcagggagaaatgaaatataaatttaaataccaacaattaaacagtgtattggcattcttctttcatatctctctctatttcttccaatacaatccaatcatgcaatttttgtggtcaaaataatatcttctatatgcccagtagtattgtcagctatttggaaacttgcacacgaagttcatacgagttagattgtatctctagtgtacacctaatgtggctccaaaatttaaatccagaatgatatgcagcattgaatggattacttatagtattataaatattgaaatcactacagctactacaatatgatgagtacttaactaatctctacatctacagtattcaggtaaatgcaatatccttatttacgttctcatcagctgtaatatgtcttgggcattaggaagagcagcacgcttgtcatttccatattgctggcatgataccacataggtaaacttcatatcagccactgcttcacattgcgcaaacaaggaccgctgtaacttccattgttcatcagttgactcaactgctttatacccttccatgagatctgcagagtggggaaaaatgaaagagtgctatgagaacgaaatagataagaatcatgctgcaaccataaacccatgcactagcaacggtttgctgctaattgcatcacaatggtattgtacccccactcttaacacacatatccaagatcatgatgtgagcaagagccctgcacagacatgtgtattaccttcatgtttggccatatctagaaatgcttcaagaaccaaagcttttcggtagtacatcattcccctaactgtttcagatcaatcacgcataaatttagaaactatcaagaggtacaaatttggaaacttttttttagaggaaagatcattttttgatgcagactttgtaagaaactaataaaggttaagggctgcaggaat

SEQ ID NO: 9512 - DNA, 40347 bp, Oryza sativa
  unsure (1)..(40347): unsure at all n locations
gcaggtcgactctagaggatccccaccgatgccgatgccgatgcaccaactgccaccgccgtacatgttcaacgccgggtacatgaaccagtaccggccgncgtcgccgccgccgccggcctacccgtacgcgccgccacagtactactacgcgagggacatgagcatggaggagaaccccaacccgtgtgccatttgctgatcgaatggtattcttgcattgcatctgatctgtagcaactagcaagtagccctacgtacattttctcgaacatgatgtgtatactgttttttttttttttttttttttttgagaaccgatgtgtatactgcatagtagtgtatctcgtgtttgaattggagggtagaagaatttgccggcaactttgaatttctgacgagaagggcggtatcgagtcaaaccattgcatggaagaaccatactaattcagatgcctgttgactgttgcccgtggtattaatggagaaattagccatctagagacactaatttcagccatctgctttcatttacttcgacaagaaaataagaacgaggaaatgaaagaaggtatagtaatgtgctgcaactaaagctcagctaggagcctaggacccatcagcaaaacagtcctaagcttttcgtttaggaagaaacagccactcgtaagcctgaaaattttagtgtcctttcaattttctagtgtatgtatctccacaaactttttcaactataaataaactgaagattagtcggcgagttctttattgcgcactggttttaggatcacaacaatccatagttaggaaaaggtttaagtctcaaccaaaagtttgatctgcgtatgcattttctcattaaaaataccgcacaccatgaccatagattatactagcactgaggactgaggaggcaaagaaagacggcagaatcaccggggcttcaaaaggtgggtagattttcatttccaacatgacgaaaaaactagcagaagaatattggcagcagctgtggttgtgatgtcccaattcccatttgcatttgcagatccattttgcatcctataataatcaaacaaacggggagtgaatcgcttgtcaatttttgcggtttgggtgagtcggatgatcctgactttctcgtcacccctgacgacagcattggcagctacctcttccaacgctgaaggactagagaaaggagctcaaccgttcagccaaaggcgacgcatctttttcgttttcgatgaaacagagccttcgtactccagatatatcacgaaacaattgttgttaattatagattgatgcagatgtgatcatgtgatgattaaaaatagtgattttgtgaggtcatgttcagcttccgatcatcaactcgcaaatatattagagcagaaaatacggaaatgaagctacgtgtgtgctgtggtcggtgaagatggcgatggaagaaaatcagaaataatgccattgaaaatttacctggctgcctgctgcggtttttatcatccagcctcacctgacccgcctctttcgttgtcgcagagggtgaaaatgaaatcgctccactcggcgacagaattttcttggacaaaactacatggacagttacctcatgatatcctagaaaccatcgtccgtataggagcagacattgacagataagtaaatttatcgccgtgtttagttccaaaatattttttcaaacttccaacttttccattacatcgaaattttcctacacacataaacttctaacttttccgtcacatcgtctcaatttcaaccaaacttctaatttcggcgtgaactaggcgtgaactaaacacacccatctttgttttctccagcacgagtctatgtcatatgactctgcatttttgtactccctgcaaaaggaaaaaagaagtcggatgaatgatcgcaacagcaaacaaaagcagccactgttttctggtttaaatcttgtaaccatcggcgcctgtatttgagctttgcggttgctatcatcgcactcaagcaaaagccgtatcaaatggatcagcctcgtaatacaactgaaatacaattagcagctgataaaagacaacttatcacacgatgaactactgtattaaacaaatgaactgaaaagattgcaaatagaaattaaattttgatgcttcagttcccatctgctaatgagttggagaacaaggaaacacaggtagtgcagctaactccagggcgatcgcctgtagcttccgtgcagcaacgccggtggacggctgacggagctccggcgaccggcggcgtggcagggagagccgcgagcagatcaaatcaaactctctcctccatccgggccgtattaactcatgggctggtgagaccaaacccgactagaatcgcattggtaccgatccggcccaagaggatgtgatggttcataataaatagcatgcaaaggtgattactattctttcttttatccggccaatcagattgcatcatgattgaatacatacacccatagctcaggtgtgaagccattacagtttcacaaaagaaagaactaacaaagttacactgccattctgctgctaggtttctcaagaacagagcacagcttagtgttacatagcctcccaatttcacattttgatcttattatatacttttcagcactaaaagaaaaggcacacaaccctactggtcaccaaagcatgtaggacacctatttgacatcccaactgcaaatacaaggtgcatctccgggagggccttatacatgcatgtgagcatgtctacagttgcgctaagggtaaaaagaaaaaaaaaagcgctcccttttgcaaggattggcacaacaagatgtgaccccacagaaaattcatcaatgtgcacaagaccaggaggacgatatcctttggtatcacctggagaaatggtgcaaacgctacaaagggggaactacatccaggagcattggatagttggaatactaaagatcacctcttctttgctgcttttgcgtcagattcagatttccacactatgtcttttaactctgacgagaaattgttgtagaactgcatgcaatttgatagaaatgacgttaatcgttctgaaatcatcaagaaacaactagatgctgggtactatgaaatgattttttttttcaatgacccactatgaaatgatagaatatacaaagtttgataacatacattgtgaaactccagcgtgtcccctccagttttacgaagctcaaccatgtggagtgatggagcaacctcgaaaacctgtgagatagcatgtgaataagttcttttattaaagcaaaatttactgaagcattgcacagacttaacaggatacatgtcaatttaatttccaatacctccgttgctacagataaatagccttttcttccagtcttatcaccttttaacttcatctggagcccaacaaaaaagaacaaatccaagttacttctgaatggcgaacatactgatgcaaattctcaaggaaactaacagaaacccacataaagcaaactagtcaatacatagccgtctaaaatgctacaaaccttataattttgtttccgcacattgaaaccaagaggtccacaagcttcctctattttagacatgatctcctgtggtgtacattgagatgtgaaggaagtttcccgcttcaccattccctatatatattaggtagactcagactatttagtaaacgactaaggagtacaactaataggatgataaattgatcaaaacataattgttctgtcggacttagcacataaagaaaagaggaaaacattagcaaaattatattaaccgatacaagcttccagaaagaagcactccaatctatctagcacataacatattctcaacatggaattataatattggactctatcaaaacctaccatcatttccttctcaaataaatttccaaggttgaatccctgtgaccttgaaattagagcaaatgcattcatggattcaggcttttctctcttctctgccacgagattctcctgaaaggttaaacaaacaaacgtaacaaacaaagaagtggttttaactcaggttacaaatcgtatttttgggaaaggatgcaggttacagataaatgttcagctagcattacctctgaacaatcgaatgcagcatcaacatcatcaaggctcacatcttcaccttgctcaaaaagtggtggtttgtaatcctttttgaaccaatcatcttccaaaatttgtgcaattgttattctctgcaaagaatatagctcattgttttctgacttctctcaaattgccatcataaaaggcttcaaagaggatatacaatgaaactcattggactagcagcagtcagctggtcaaactggttagctgaagatatatgtccttaattgtcacttactgtgcagggattaggatcaagtatgcgcttaatgaacttcttcgcacctgaagaaaaccaatgtggacaagaaacttttgccttgcagatctgtgaagagaacatcaaaagtctatcaagtttaccaatgaaattcacaagaaacattagaatgcgtgcatgttacacatacttaccagtttgtaaagggtcattaggttggggtcatcgaaaggtaaatatccagccatgaggacaaataagattatgccgcaggaccatacatcagcagccataccatcataacctttatcagcaagcacctgagggaacagtatgaatatatgattcttacatctttttggagaaaatacacgagtttaatcaaaggcaacatgaatcacctcaggtgcaacataatttggtgttccgcaagcagtatgcagaagtccatcctcctaaataaaacaatcaaaatagtttaccaaagttacttctttcaactttcttgtcaccaaaacaaataattatgcgtccgaagttcatttgaggtaatagtgcaagttaaggaacaagtcaattaaaccagaaaaatgctagaaaacccaaacacatcacattaggataaagaaactggttaattttttaacaactacaaaaacatacttctgggtactagctagatatcatacttttgtttgtggagcaaacgcactaaggccaaaatctgaaactttaagagctccatgtgaatcaagaagcagattctctggctgcaaatggcacataaaaaatatgaatgagaatacatccatcccagtggagattacccagaaaggaggtaagcaggataattcaacaaaccttcagatctctatggtacactcctctgctgtggcaataatctactgcatttataagttgatggaagtatcttcttgcttcatcttctcctagtctcccagaattgacctagttgataataacatgatgataaatgggtcaacttgtatggtccaagaactgcggattagtcagtcagtatcaaaacagtcaaatgtgccggttcaacaagctactcttacagcatgtaaaagcaatttgtacataaacaaaaataagaatcgtgatatctggcacagaaagttcatgggccttacaatcttatcaaaaagctcgcctccatcaacatattcaagaaccatgtatatctttgatttgctagccatgacctgtcaaacacacattgaatgtaaaattctcattgaatgagatgagataaaaaaaaaaagaagggtatgagtggtaatgacgctattgttcctgcaaagatagcaaagtacctcatgcaactggaccacatttggatgttttattagcttcattgtggaaatctcccgtttgatctgatagaagtggaatatgaggttatcattcacaatcgaaagctcaagctggaaaacagaacagctcgagcagggacatttaattgtgccaacacatcatatggaaaatcacatatttaaccaaaaaaaatactagtttttccaccaaacaatgcatcaaccaatgagtgatctagcacggaatgtacaatacccgagtttccccccagtcagactgaatttataactccccgagaaaaaaaaatgaatctagaacaactcttgccactcctacgaacaccaaagctagcacagctttttgctaggcagaaagcatttgattaagacagggttggcatcaccgcatcggagatattgttatagttacatggcccagcttgataatctgttgttacatttccgattcaaacttgatacaattccatctaatttcctttagatcagagcagatttagcccgctggacaggcggacacatgacctttcttcaatcacaaacaatccaaacagacagaatcttgacaatggtagagacgtagtaagcgcatattctcgtttaatgtttattaatccccatgaaaatccatcttttataataatctagcatctatctagaataatttaggattcttaattcgatcccctccgagaaaagatccaacttgttattacctgatgtctaaaaaaagagataaatattcaattttgaggatgattaaggcggcggacctgctcgaccatcttgtggcgaagcacatggttgcggtcgagcaccttgatggcgagggtgtcgccggtgcgcgtgtcgcgggcgaccttgaccttggcgaagctcccctccccgatcgtcttgccgagctcgtagcgccccaccctcgtcgtcctcctcgccggccccgcccccgcccccgcccccgccgcctccgcctccgcctccgccatcaatccctcccgcagatcaatcctccaccgcgcgcctcgccgccttccgatgatgggatcgaggagtgcgcgcgttggtaggtcgcacgcaggctggatggcttgggcgccccgtgcgcgcgcctcaaataaggcggagatgcgttggtggcaggtgtggtgtggggtccggtcgggaaccgcgtgggacgagacgtaggcggcgcgcggcgtgcggcacggatgcgtgcgtgcgtgcgcgcgctatcgttttggccgtgtgcaacgcgacgcgattcacagttttcacaggcagtggcccgaactctatcccaatcccaccaccaccccggcaaaaaaaacgattaatcaaactcgaaagcaacacgcgtacgtaacgagcacgcgcgaacgcggcatttaaccgtggctcctcctcggatggataaatccaaatgtggggcgagattttacgtgttgccacttggagatcgctcctttcggttttctttacgctggagtagggaaaatctcgccgtcgtccaccaccgtggccacagcgacaggcaacgagctagtagtaaccctgaacatgcgtgctttgcaccttcctcgaaggagcacccgtacggtgccgtactctcaatcattcctccgttgaaaacgacgcgctgatccatccgtgctccacacgtcctcccctgaacaaactctggctctcctctgaacaattcaccgcgaccgcgacgacgacaaaaacgaacgtgtgtgatcttgctactgtatgccgtttgctgtgttgtttttccagcaatcatgcacgcaattaaccttgcctgatgtggtcgcggtcggaagcggtgcgccacgaatcagcaagcggctagcaatagcaatagcaatagcagtaggccagtagcagcgtgaatgcatgattgatgccgcgatggggccgagagccttatcctgcggcgtcacgcgggggcaccacaccaccactagcgcctcgtgccatgtcccgttcgtcgtcgctgcctgcactgcacaccacattctctcaaatctttttcctcgccgccatcaaggcattaccacgacagggggcgtgaccgatcgacctgtgtgtgattgctgatttgaaatcgtaaccgtcacattacatttggagagaattgtgattgcaactcttgtgttagtggttgatactgcagcagctttcgtgactttggaagtagacggcgagattattgtgacggggacagcactgttgttctggagtgagagttccacgtgcgactttgtttgcgttgtcagcttgtgggatttcgattccaggaggatacgtacttcgatgagctccatggccggtgatttttgtcgagttatacttgatggttgtcgcagaaacactcctaaccgcgagttagaagaaagtagaatcgtgctagatagaaaatgcttagttttctattttaagaaggctatgctaagagatttctgaaaagaaaaattaaaaccgcgattttatacattttgacgtagttcgtagatattcagctcccaacgtggcaggttagcagcagaagaaatgtcataaacccaaaaccctctgtttgggagcccataatctggcgagaaacctggcccaattctttcaggcccagttgacaaacaggccctgaaaccggactctctctctctctctctctctctctctctctctctcgctctcgccttacaaaaacaacggtgggctggcccatgatgctctctgtcgacgagtgaaagaagcccagcccatgagaagaaaaggatcgtcgtctccagaccatacgatacatgcgcgcatgattcatcgccccgacgtggtcaactaccccgaatgtctccatcaacatgtggtacaataagggcacccgcaataattatctatagattttctataaaagatacatgtcagcatattttcctacttgaaagagattaaatggagagagagagcaaagatatctactaatctggagatagtctatagagaaaaacgagacaatggattagagagctatagatacccatatagacatacaattaaagtggtttactattaatctagtctattactgatatgtatatattttatagatagcacgttactttactattgtgggtgctctttgggaagtctcaagctagggaagtgaagccgaagggagaggccaggccaggtcggccgtgtcaccggacggccgctttccgagttgacgctccaccgaatggcaccgtcccaggacacgccatgcccccgcccgtgatataatcgagctgaattgccacagctatcgtgagtgtgagtgcaccgctgccgcagcggcgtcgtcgtcggaactcgaaacacagcaacggcttggccggtttcccgtttggtgcccagaggtaaccgtacgtcggaactcgcaactcgcaaggcggcttttgcatgcaactagcgtgcagaattcgtgtagaatctggcccgctgcgtacgctgccgccgctgtcctcgtcccaagaaagaggaggaagaaagcttaggccagaataatgtgatgcgaacacacatcatcagtatttgtactggagcagtagtagtagtagtagtaatagtacagtgaagtactggtccactatagatactcccgtccccatcaaccaggcgcaaagcttcggccgcctgaacagtgaacacgacgagctcgatcctaagatagattcttcagcgtctgttcggttgcagtcttgcagatgggagagcctcaacttttgactaggtttttattcaccgagaatgagatgcgaattctaaaacgtgtagacgccaccaaaccgcactatctagttaagtccatgccccatgcatatgtggctttgtgcccatcgatccgttcgccattatcgcagtttgcaacgtaactggaacagaccaacatatatattactagctagcttccgtccaaatctccacccataatctgccagagccccgagacaaatgttagcgtgatacacacacatgagcgacgcgcgtgctacatgcccagtctcattgccagtcagccttgcattattgaaggcgacgtcgattgccaagtcgcgacttgtgaggaataattgggactttggccgagttggcaccaccatcagattcaggccttcgtgctccaactgccaagtactagtcgctgcggtcactctgtgtttccaagctgtggcagtgaccgcgtaggaaagaaaacaacactttcttttctcgtgcctatgtgtggactatgcggcgatagtagtaaaggagccatcatttttgtgtgactatgacaaatcgctgtcgggctgagctgcatagctctctctcaaaattcgatccggagctgtcaatgttaactcgctgaataaaaaaccttgacaacgagaatttcttcccacgtacttgatcgactagaatataattaagtgccaaacttatctgcaagatcaatcgaagcatctgaaatctgcaggtttgtactagcaagaacttttctttagaatttggatcccattctgatcacattccgatcatcttaggaaaaacgacgataagaaagaacaccgaagaagaataataagactaagaaaatgtacactcgacggacggacgacagatcgaagacaacccagtcatctctcggcagcgaagggcggcgggacctggtcctggacggcgcggaggctgccgaggcggcggcacgcaccggaggcgaagagggagagccaggcgacgagcggggtgccgaggaggacgaggccgacgggcaccatccacagctgctcatgcgccgggtggaacgccaccgcccaccacaccagcacggccgcgcccgccacccccgtcgccgccacgcccgccgccacggcgaggcacgaccacgtcaacctcattctctcccccgccgccgccgcagctcgctgccgtcctcctcctcctcccgcctccacgtccaccgcctcgccgactggcttcctctcgtgctgcgccattgcgagctagctggtggtcgtctcgtggcacgctgctgctgccgctgccgtgcggcgaggtgaatatactacgttggggaggggggcctgaggcgggggcatgcgggcggggttatctggtgatggctgctgctttggcccacgccacagccacagcccccaggcttccatttctactgcagacgcgacgcgacaccaccgcttatcgctttccacgccaggatcaaaggggctttgatgggtttcttgccacaaaaaaaaattaaagatcaccaaaatttactgctgtcgcattttgtaaggtaataaatcagacatcttgtagtaagaatttcaacattttctaccccgaaaatcaagggcttcattggtttctcgttaggaaaaacaatataccatatttcggttgcgtaataaatcaaatatactatcttctaaacatatatgaaccttaccaaataggagtttagtagattctgagtatttactcttgagatttccaaaattcagagcaaataagatctctggtacactttttttttaccatgtatcaataaaccaaaatttggtattcctaaagttttttttcaacagactaatcatgtcctcactttaaccccgtccccagctcggttactccgggcgcaatctgcatccagctcagctcaccccggtcgattccgcggtgagctgtggcttggtacttactggccacgaagctggcttgttcgcttctgtgagagggattcaagaggtgttcgtttcccggccggccgttgcactgctcgcatacatccagcttcagctggaaagtttgtcgtatcgtgccggacgcacaacgtgtagtcgaagcaacacgcagtgtctcgtttggaacgtataaaaatttctgaatgaaacgtttccaatcaatcctgtgttactcctaatttccataatttcgggtttactattcccatttcagatcgttgttcttccatttccatctaggatagactgcccgtttcttcaggatcagcaaattagataagcgaatacacaatgtagaacgactctgtaattgtcactatcccccagctatgggatgcttcaagtagtgtactactccagtcttccagagagtgggacaaaaaacaaacctgaccctgcaaagggtcccttggtcgactcatcctcagaatcaagatagccaaactcttgtctctgcccagcgtactacacccataaagtccatcgattcatcgatcgatcgtctcggatggtcctactccgtttgtctgaagaatatttttcagcaggagtttgtactagtcaacagaaatggtttacttgccatgcagattgcatccattcaggaggaacccaccctaccccaataaaagatgctcaaatgggacgcatggcatgtgcatgtgctcctctttctttctttctttccggatgctgcaacaggcaactgcaatgattcttttttttatttcaagaaaagcctcagacatgtttggaatgcaaatattttttactgatgaggatgacaattcaatccctatagattcaagttttcatcacttgatcggctgatagcacgaccacgcacgatctccttcgatatactgaattactgattgcgttgctcgctagcaggacagagcaaactgtaaggtcctgacaagtgataacacaggttcagccgttcaggtatcagtatcaccaaacaaggtagtagtatcagttaacagtccagactggcgtactaagaaggttctcttagaaacgaagggacagttaaacactgatgaaactataccgcgggtatcaaaagcaaattatgctgtcccttggaggggtcagcagatgggaagctaatgttgatggagcatccgacataggattgtcatttcagaggaacattatctgctgtgcttcatgaacagtggaaagaaccttatcttttttcactcacactgcatttcagaggatcatgatctacagtgcttcaggaacagctgaaaatctcctcttgccgtaaaaaaaatcaaagtcagagctcgggcaatgaaattatgaaaatattagagggaagaatttctgctgtgactatactgctaatgagaaaagagatactcctttcagatatggcgcttccacttcctgattgttgtcatcttaaagtcaatataaaaagcaattcttagatcatgcattcacttttaaaacaatcttgtattgatgtctcaatagatgagctcaagttatttactaattacaaaaatatgaactaaagttgcaaaacataattgacacaagtttttacaaaagagtcaagttatggtcaaacataccacaagcttatagaagtacaaactgacaatgtgtgtcgtagctaataaaattttggccttaaaacttactctagtcagagttcagtttcttctcgatgcttgatttgcttaggataaaaacaccaacaatgataagactagcacctacaaaccactgtatgaacatacatcaaattcaaaagctgagtgcagttcagttacaattttgtatacatgtaaactcaaaagtggggaaagtgatgtatcagtattctacagtctgagatacacctgataatgcagtggcaaagggtgtgtggtttcaaccctgaggtcccgtgttcaatccccaacacgctcacatttcttcttgaaactgtttggagggacatctctccctccaaatgtctttttttattattattatattttacagactgtacataaattcagctgtacagatatagtaggcaagtgatatgttattattgttgtatttatgacagggtttggcttgtatttaactggtatacaagggggcaagtcattgctcatgatataaagcacaagaccatctatttctctatctgaaaaacggcatctattttagcataacaacctaaagatccagtgtgttttctttcctatcaaccaactgcatgcatctctcaagaattttttcatacaacagtaaattataagataatctttgtatgctatgtgacttttcaagcgagtaatatgaatccagataaagtggcctagcttaataactagatttaatcctatttataataaataaacctactcatactactaagaagcaatgtgacagatcaacctaggatactcttcccatgtttgaaagggaagaaaaagcccaatctaacagaggacataagctaacacaaataaatttgaaaatttttagctatttgatctgcatgaataactagcttgatgtgcacgcactacacagaagggagaattctcatattaccttagaaggcagtggctcctcgaacagaaagtaccctgcaagacctgatgaaatgaagttggcagcaaaattggtgacggttgcttggagggatgacagtgctttgaggctgttcacatagcagccccacattgtcacattgaaaagtatcaccatgctgtatttcagaagctgtagaaggcaataataaagtcaagtctcaagtaacaaaatagcaggcagcactagactacaagtacactggtaggaggaactaatccggagtacaggttaaaccggtatcatttgatttgaggtattttcacaatctgatcctaaactaattgaaccacacatgatagttaacttttgatcagcaatttccacattatcccagttatacttctagcactaagtcattagctgaagggatcacacatctaacctcgaattatctgatgaatccgcaacttcggatccaagtaagtgactgtttcatgcccatgaacttggtaaaatcatttaatcgaaccagcatgaacaaattaaacccgaacaaaggctgaagcggcctattaaggttacagcggcagccttccaagcaaggtatgaacagaaaacagaatgttcagatcggagggaggtagagagagagctagtagagtaccggaggcgcgaagaacttggcggagatggcggcgagcgcggcgttgaggcccgccgcgagcgcccacccgtagccgcctccgcgtgccatcggagctggagctcaccggaggcggagatccactccacaactctgtagcagtcctctcatggtggagaaaactgaagacggaggggagaactgggccaacgagcctgggtttcgctaaatgggccttagttgcgaggaaggactgatgaggcccacataaaaaacggactacgtgggctttgctgggcctaaatgatgtacagtacaagaccgggaggtagagggattggggaagagaagcggcggcctgatcaggcgtcgtctcgccgactcgcggtgccgccgccgccgccgcggccaatcggccatcggagcgcactccggcggtcgcaccaatcctctcgtttccatgagggccggcgccggcaccgggcgtcaccgccaccaccggccgatcgattggcgttggcgcgcaccgccgccctagttgtactggtttgggcgtgtggcgagcggcgagttacgatccgtgggtggattttcagaagctgatccgatcaaccggagcaattcagcaggtacacccttgaatccttgatttctgcagtttttttttagaataggaatttctgcattattttgatcagactagttagtgataatatatattagaccaacatgaacagagattttagactgagttcattatcccggtataataattgattaatgggtagtaagcacgcactacggtataattaattagttgttgatcccttctacctatcacgagagaataggcctcctatttggaagatcatctgttgtcgtatataataatcttacggtagggatgcaagcgggttttttttaagcccgcttatatatctctcttctagtttattttttcttctaaattttatactatcgtgtaagaaatgaactagtaaacgggtttttatacgggtaacgggactaactactggcatccctacttacggcttcgtcgtttggcaacaactgggaacaagactgaattaaggtctagggatttgtggtgattgagtgagaccgcactaataacaacataggagtatattgatttagcgaatattttgcttcagatctactacctagagcctgtcactattctatgcaaatcacatctgtattctcaggtagtcacaaatattctcttctatcaaacacgccaaatttgcataaagccataacacgtactccattcacctccccttttagtaactgtcaataggactatttatcttcaaaactttgatcactcgtcttttttaaaaaaatatatataaaaatattttagtaaattgtagtgtattgtgttagtaaatttgtatatcgaattgatacgtggatttatgatgtatgtgtggatttgtggtggatttgtgatgtatgtctggatttgtggtggatttgtgatgtatgtgtgaatttgtgatgtcaatgttcgattttgtgatgttgatctatgtgattttggtgtaaaatcaatatgcaaagaacaatgaaaaagaaaaaaaaaaagaggagaatagggattagagagcctggcgctaccctcttttgttccagttggtaaccgggaataaagatcaatctttactcttggttattttaacatctttagtcttgaattcgtggtccagttgcaaaaccaggactttagagggttaccaaccgggagtgatgcccctttctccagcagtgctataagaatctatatatataatacaactttgttttggaatctatgattatgtatatagcctgatcaatcgcacagccctcttgactagtgatcacaatctaaatttcctagagttttttcttgataatatttgtacaagttcaacgagttactagctagtgtgctgagtcagagtagcattttgttctgcacgcgcacctcttgctttagtcgtttctagcaagttatgctgacttcaaatattatgtcattaattactgtagagagtacagtgtactatatatgccacccagctgggagtcaaagacatttacaaagtgccaatgtaggatcacatcaactgggaaaaaaaaagcacattgcaatgccatgcatcttatgactctgcacaggggacagatcgattaaaggttacaatcacatttgggaacataaaaagaagcagaagaaaaaaaaagagaacaatttataaaaatttcagctataaccatatatcccatccggttgatgtgatgaacacatcgtgctgtgaatgctttgtccctcatttgtcaaacacacagattccgaggtcgccgtcgacgccgctcgcgccggcgccggagccgagcaaccccgtccacctgtcgacctcgtctctctcgtcgctgttgagaaacagcaatgctgccatgtcgtcatcgccgtggtccagcggcgagctcacaccggcgactgccgccgccgcggcttccgccgttgcctccatgctgccacactccccggggctaagctgcgacgcgacgaacttgtcgagcgctctccagtccgtggtcgtcgccaccttgtcgccggcggcgcgggctttcttggccctcctaccgccattatcgcccttgcagtcgtcgtcctcgccggcggtggccagctggctcgggttgggctggagcggcgccgcagccgcggaggggctctcgagctgcggcagctcggcgaggtggctggagtagtggaggagggctgtggcggcgccgtccagctccgcctcctgcttgaaccgcccgctcctgtgctgccgcctcatctgcgcgtacgccgcgctcggatcggcgaacgccgccgccgccgcggcgctcatgatgttgcgctcgtgcaaggagtagtcccacgtctccaccatgctcctcgccggatacgccgtcctcttcttgaatgctcggcacaccacccatccttcttcctgtagtacacacatgcaaataaagttagatacttaggtggtgtttgagtctcccgaagattaagattaaatatttcatgtaaaacgttgtggtaataacgtataattaattaagttttaattattataaacttgaaaaatagattaatccgatattttagaacaactttcatatagaaagttttcacaagaaacacaccgtttagcagtttgaaaagcgtagcacaaaaattcaaaatttaatccattgttttaagaggaaacgaacgggggggatgtgagctgcattttgcaaggttgacattgacaccaaagtatttgccaatcattcgtaaagttagctagcttcccactgtgtgatagtggaacaatacgagctgataacttttttagttttgtggtgacatgtttgccaagcagcatgcaatggttttgatgagtactagcacaagttgcatacagcttgtaaacaatatatggcgcatgttaggacgttcacaccaggggaaaccctaactaggccatgcatgcgcatgcaattgtctagggaaaaaaggttttggtgttagtggtaaggtcaggatggcatcaacactggatgcaggctacctttatttgggagagaatagaagactttggaaggctcacaaaaagggaggccaatgcaagacttatctttcaagaacaaaaagagttgtggtgctgcttagtgctactgatatattcctatctatatggtccattactagtggtacatgaattagacatgcttgcacgcatgtatatcggcggcagatctctgtgcgtgctactttagaaatctctgggcaccattagaccttaacctctaataaggcctaagctggtatactgcattttatcttcagttgcaagttgcaacacacatatataagtatataattcagatatattttctcagatatataagtatgcaatgtggtcactaacaaccttaaaaaatattttcttttttttttgataaacccagcctatacatccaaccggatatatacaactttttaaaattaggaacttagcctatcaagcatggaaccagtttgctagtttatgtagagctagctagcatgcagagaaaattaagaaaccaattagctagtgaaatcggtatatgtatatacctgtggcggcgcgttctcgtcggtctcgaggcggtactcgtgcatgatccagtcggtcttctggccattaggcgccctgcccttatagaagacgagtgtcttcctcatgccgatgagcctgctcttgtcgtgcaccgccttgtccctccccgtcgccttccagaaccccgccattgtcgccctgttcgtcctcgtccccgtcgggtacttcctgtccttgtagctgaagaagtaccactcgctttgctcatcgtacccgatcccacaatgttcttcatcaatcaacaaaccaggcaacacaattaggataaataatgccacaatgatcatctctgaaactcaaattaatcatacgatctctagttgtaccttggagatcccagggttcgatgcggtagagatcgatgtcgcggatgacgtcgaggtcgatcttctgggaggcgaccttcttgcggaggtagtagccgacgagctcctcgtcggtggggtggaacctgaacccaggagggacgcatgattccatggcgtccatatgatcaccaacctgtgcctgcactgcaattgcatgcaccgtgcatcagattcagcaacaccgtcttctaaatatccatccacacccaatgcatgcatgcatcaaatgatatagctcgcgagtggcactagtagtaaagaacacatgcaagtgctcgaatcattcggtgcaagcaggctggctatcttgcgattttttataggacacacaaatgcaaaagctatctgcacagaagggctagtagcattggtttggtctggatactgaatgactagctacagactgactgacaaggagtatactactacagtagtgtgtatgggtttcagtgctttggtaaaatttaatccagccatgttgggtttgcactatggactttctaggataaaaaggcaaagtacggcagagcctgggcaagaggccagcagggacaaatgtaggaaagctacaggcctgcgaatgatactgtcgactggtgatatctcagaggcatgtgggctatagtcagcaacgaattatagctgttgcagcagcagaaaaatggtctgctatataagagcaaggtcaatagtgtagccagctactagctccaataacatccatgtcattttatagccaataccaaaactaactagtacaataggttggctattatatcaacatgatctcattattcaaacaataaactttacatgtgcatgatcagaaacgccctcaactctgtggcttatatggccatttgtattatgtaataaatatgggttatctactactctacttgaaaaattaacgaataacaacacacttgataattcacatagtatatcacaacccactgctgcccaactgcataatctatacatgaaaaaaggagaagaacaaaagggaaaataaaaggagctataggaagagattagaacggactagatgcaacagatgagacgaagaatcggtagaacaaacatagacgacaagcattcaacagacagtgggagaagaaaagaaaagaattagaccaagccaattcaaatcaagaagttgcttattgctttgggtgccagttgcatgcccgcaccaagcgcctctcaatcctcctctcgctttctttgtcgctgagaactgggattactaactttttgggcgcactggagctttcacggcggagtttcacgtcgcgggagaaaattccggcgagacaggggtgagcggaggcggcgtgaagcggagcaaaatgcatcgggcggatcggaagaggcacaacagaaacaaaacgatacacgggatcggcggggtggttgcgggacccacaaatgcatgcgtatctgtgtatcgctcggcgctacatctagcgcccgctttgttccctctctccagttatctctcttccacgtgagaataatctgagttggaatattttggagcctgctgattagatttattgtaccttctctgattagtttgttcagagttcagtaatttgtttagagtaataaaattaggggccttaatttgtagcaacaattagtgtgacttttatactagagagtgctgcatatatgtttttgaagtgcatgtgtgcgctagatacacgctagtatagctagtacttaagaacctcaatatgcatgattttctactcattctgatcatacagctctcatgaaaatggattcatgcatggctcaatgcaaagcactgtacgcagagcttgccaggcctttattttgtacatatactgtacatagcttagatatacgtacgtactgtatatagcttagagcatcaagtatatatgcaatgcaatatatctgcaattaattctagaattgaatatatcttaatattagcagctttttatctagttcgcaaactaagggcccctttgaatcaaaggaatgaaaaaacggaggaataggaaaaacatatgattctgacaggaatgtaagtgtaaaacagaggattgcaaaccacaggaaaaacataggaatgaccgtttgattggaccacaggaaaaacacaggaatttgaggagagataaagactcgaaggatttcttccatgaggttctacctcttgttaaaattcctccaaaacttgtatgggaagaggcattccataggaatttcataggattccatagtgttcattcctttgattcaaaggtctttgtaggaaaaattcctataggaataaaatcctctaaaattcctatgaatttcctttgaatcaaacggggcctaatgccctctttgtttgggcttgggcttattggcttagacttttaagtcagcttattggcttatatgatttataagccggtggatttaatgttctaagtttaatggtggagtcatgcatctatctcacataagccaaaaaaacttctccaacctagattttggcttaatagtgttagagtggcttatggcttcaaaaaagccaaacgaaaaagctgattgtttgtttaggcttatattttttgacttataagttggcttataagcctaaataaaaagggtataaaacatatggcatttatacatggtgcgtggatgctggggctaagcttaaaacacaacaaccaaaacgagaaagctgcatcgctagcatttgccgggcggatgagcacgcgcctgcatgccgtggggcatgtaaaaaaatttgacaaattaaaggtggggctgggagcaaaagatggagagaataaaaacgtgaggagaggaagctagctagccaatgccggggatcggagggccctttcagcgatcaggcctgcaaattaaaggagaagaagaggctaaaaaagcgccactaacactcactcgatcactcactgctccgtgaaagctatagccatggcatgcacagagagaatggaaagctaacacagcagcagccagcaggggcacacgactatcggttttcttgcacggcctctgaccgttctgtctgtttgtcgaggaattccatggcacagcagggaccctagcttagctctggccttgcattgtgcattgtgggcgagctgcctactgatcctagctactagtagatgcgctcacatttgctgagatactgcttgcgaagttgcaacgctatagtgcatgccgatcgtactactggacggggagtgtcctgtgcagtggaggagtacagtacagctcgtagggcatgcatggatggtagctcttctgtagggtggacacagaaggtccaggggtagatcacaatcattttgtgtttcccctttggtttttagtattgtgatgcatggttgttgctagttatatagtacttccttcgtcacatattaagttaatttagtatgggatgtgtcacattctagtattatgaatgaacaaatttttgtctagatttatcatactataatatacaacatctcatactaggaaatactctttctatgttttatgtctcaccaaagaaaatgagctgataagcctaaatgtgagggagtggattttgaactgttgagaggacatcacctcgttgtttgcatatcatctaaataaatatgaaaattttgagaaaatagataatatatgatatatcactccacaaacatacaagttaaaatccaatttctacatgttgcaaaagaaaattaaactatagctagttaacatatattcatagccaatttttcttttgcgacatgtagaagttaaatttgacattccatgtgtcgtagagtgatatatcacattaatctatcttgttattttttttataaaaaaattataaccattagatgacatgcaaataataagggaatgtcccctcgagagcttgcaagagaaatgacaaattgagatcttgctcaatgcaacgaatttgaataacaggacataatgcatgattaattaatttataatatatatataagtatacaccattcattaatgtgctaatgaattgttaatttgtaaatccagtcctttcatgtgagatctaccctttttaattaggataaaattacagaccgcctataagtcccgatgtcgggtatatacctcatggcaatgaaaaaggaatgttgattttttattgatggatcagtcactacactaaagtattaatcctctagggttgttattatgtaaggatgtcaactaagatggtgcacgcatgctaccttgctaacattgtcacagacctcctatggtagtatatactataccaggttgggtcagaatggatagaaaggggatggtggtcctagatcgatatgtacagtgaccttcgtatccgtgtttaatgattcaagaatgagacaaatgatttaccaagattaattatcctaagtattgcacatatagcctcatgttcccaaaaatgagcattattttagttatggcgatgcatgatatatctacattccacacttgtgagcagcttattgatcaagtgtgtaatgtattagatatatcatgcatcgccataactaaaataatggtcacttgtaaaaaaaattcaaaaaaaaacattccacacttgtgtttttatatggtagtagaaattggaacaaaataagttatggaagatttccatgtagaccaaactagtacagtgctggtatagtttacatggcaaaaggctacattaatttatatttgtttttcttcaaattaatcagactttggaaatttgcttgcattccgaccatttttccaattccagcctctgcatgcaaacctcatctagcttggtgcaacaaaactactatgcgtggactgtatagcacttattagcttactcatataaggttgtttcgtgtaaaagaagtgttgtcacgccgtctattaattattgtacgacgacatatataagtggatataatttagttcaacatatatatacttcacagtgtgtaaaagtacatactatagctacagtagtatatagtgatctgaaccgaccatcttgagagtgctcgtttaatttttatagcaccatataccaccatatccaaaaatacattggccaatctaaaaggcaatttcggtctatttgagtgtatgattcagatctttctttgggggtaaaatggaacaaaaagaaagaagaaaaaatgggttatgtatatgaccactgcgctttctcgaaaaggaaaagaggtagatcaattactatgatcatatagggggtcaatcagaaggatgcaatgtctctgtgcggtgtgacagtgttgtagttacatgtgaatgaacacatttatttgtgtcacatttattttttacagtccttaaggtaccacttttctcttgtaaaatttgataccttgagaactgtaaaattgctctatatacaaaacatatactaccgacacagagaattgtttgttttatgatttttattataaaaatattatgttgaagtagcaaatgtaattcaaaatatataactttacacacatactactatgtatgtagagcatgcaataaacagcttgatttttaatcaatatacatcatatcacatcagatgcatatgataccaataccagtatgaagaatttttttaagcatctgattatgatcaataaagatcaacgaagaaaagaggggaatgtaaaagaaaaaaaactgaaaaggttgcaaataaacagggcatatatatagccacatctttttccataacagaaatgaagaagtttctgcatcgagatgtatttggccacattcatagctacatcttgttcgactattttcagttcaagctagcaaagaggagaagagaagtgctagaattttttttcgaagaacaagcagctaaggatttttgcctaatagagaggagctagattgaacaaaattaaagaacagatcaagatgatcaaaccagcacagatcacagatcgatgaacacaccaacatatatagctaataactgatcgatcaaccagtactgaaactcacctcagatcaagcgacagcttcagttatctcgatctatacagattaggcgatcgaattcaagaaactctcttctccaaggagaagcacaaactcgtctgtatgttctcttctctagctgttggcaagaagctggcctgcgtgtgtggaagaataaatagcattggagaggaggagatggagtttgcattggagaagaaaagaggggtcgagaaggtggcgggtataaaaaagggtcggggtcgctctcctttccgtcgcgcgtgggtgaggggaatgaaggcccttgggccccacatatgggcccaccagctgacgtcacgtcgtcctcttcctcctgctgctagctgctactcctctttccctttcctctcccggcactgaacagtacagaagaagctctagcattcgagcatctatgtctaacctttgcatgtagctgatgatatatgtgcctattgatcaatcttgtagcggccagaacttagccatgatccagctagggcctttgcatataccggctcttagagtaattcatacgtagaagcaggtgcaaaggtatctgcacctagctagtaactcatgcatatatcacttaatttaagagagactaaacctagatctctcaatggattcggcggcatgccattccagtgctagatggcatacataagctactagctatatttgatatatattctgatcaagaaactagaacagaagaacatatataagttagttatgcatctcgtcctctctaatttggagaaacgaggcatgattaacttttaaatgcatgctttagtttctggtgcaatcaagtgcatgttaattcttgccaatggtaccacaatgtgctttcagctgtttataggaccatgttgccccagttgacagatgaacaaattgctcagtagaatgagctgctgcttgttgcaggtcccgtacacagttgtccaggtatcatgcatgatcagtccattctatcattgcagtagatttctggggcgaacgggtttccctactttcaaattgtgattgatgcgatatgtttaattgaacaaaatgatgttaactgtacagttttgatctgatatgtaagtagcaatcactagctggctagctagtagcagttaatttgattttgatcactcaacacagaagccagtaaaaatcaccgatctctagctagctagcttatcaaatgcagatcgatatatgcaatacagacatgtcctttcttaatttgactattattattcatgtcctacctagaattttgtgttctcagatcagagagcaatatgcaccaaggctgatgagggactaattgcgtctgttagccttagccattagcattaaatcaattatattccagaagcatgatcagtgggaattatgatgtcgataacacaggggcgtaggcatgcattacacaaaacatgttgtgctaagtatgatgccacctaccactgttaggagccacagggaaacaacaaatccttgcgtgataagattggatcaaatttgggaaccctcgcatcattccggttctcattgctggctagctgctgatcaactcatgatcaaagaaaagctatttacaatgatgcaatgaaagtgaaacaattttagatttatttattaacaaattgtgatctgtatttaattaagccaaaataatttcttcaattcattacctcagaaagttaaaagttttgccaatatgaacaatggcataactttctacatgctgtgcagagctttacaacaccagaatccaactctaactaacggtatcatgagcaaagtcaaggaaatctacggagtagctagtgtgctataattgttgatgattattacaaatgtgttctaattcaactgggtgaccacagagacaaagcaagcattggtcaaattttggattaaggtagtgtatctatattcgatctttctttttcgtcaagcaaagaaagcgaaaaagttgtgcttttttccttcaataataaaacctacatactacaccccattctagtccccattctaatcttctggatgcaccatcttttgaaattttcaattgtaaattaatcaagtggtaaactcactcaatcttcttcgtcacactgagtttgtctgttttcccccataatataaatacttagtattaattagacctagtactccattttcaactgcaacaacgtactttaattagattaattaattgccttccctgaaaagtatatatacatgtttgtagtacttgatgaacaagtgatcagggaacaaaaagctagaaatatatggagtccagctacagcataacatacatgtttgttctcttttttttccaataaatatagcagacactggtgtactggaacaaaacaatgatacacttttggtttttggaccatatgaatgtcgtaacacagaactttcaaaacctaataaggataggtagtgtgagagatggaaaaagattatggacacaggggcccagcagccctgcaaattgcttgggtttgcatcatgttcttgcggccgggtgactataataatgccggccccttcatctatctatagctagctactatagacatgcattagtttctcatgaacttttgtttcctcatcacaaatgttttggtagagagagatggagaggtcaaatgggaggaattaattcaggtaggacatagcaggcgagcagctgctaatgatcatgtaacctcaaaacaatctcacgcggcgctaatcccgatgggagctgctctccacgctggagcacgacattcccctgcacttttgctccccggacgacacgtcgtctgcagatcactctgggattaaaccctaattaattcagtgggtgtgccctgggttacccatgttcttgctgcagggttagagtggcgcagcattagggaacaggggccagtaggatattatgtatagacgggttcacttttcttgtctctgcaagctgtttctgttcttggttgacatgttgataaatttaagatatttcttggtctacacgagcactttaaccttactgtctagttagtagttcattatattaagaatgtacattgccattagcctgcgctgaagagtgattagcagcttaattagcatatacctgaagggaaggcaggtttaatgtgtggaacagagttccaaattgatcatctagatagaggacatgttctggtttctggtcagcttctaattaataaccttgctaatgttctatctcccggcctctagctatggaatatacgtactaattcttcaattcatcatgtgcttgacagttgacaccgtatgcagcagcattgaagctagctagctgatcaccacatatttcttaaagcgatgcgcttttcatctggcattgcacacatatttgcacattactactatacacttcagcagctgcatgcgatcgaaacatacaggaacaacagactgatcaatcgatcggaaagctgtaacggcacgccatgtttctttcttttctttcttggttaaggctggctgatgacttgtcctttcttcccccaccaagcatgtaacagcatctccccaaaagtgcacttaacaataacaggataagcttagcagctgttacgcctcacccgtacataagcataaactacaatcgtgtggccaataactgggcgtccagggtatatactaatcatgctactcccgatgatgcatctagaactagctagctagctcccaatatattcatctacttttaggcccacacattgcagtactgaatccatgtgtctgaaactatgtactcctagcagtagcagtatatagcagtagcactagtaatgtagtataaaacagggtacatatatacgtagcaacatcaagcaaaatacagacgtgttggtaggacaagaaaaggaggtcaagttgcatattgcctggggccggacaccgatggacaatggtgaccctacctgaaacgatgcaactcgtcgagaggtccagacatatggaaaacgtctgaactcgacacgtacctagctgcagctgactgatgctgccttggctaatggtatggtcgatgatccaaaggctttacgtacaagatacactagatgcaaagtacacatacacgtcgtttttgtactcgacgtcgttttaggctacgaggatttccacttgtaagcacgaaggtacgtccatgagagtaacctctgacaggttattttacatgtggcaggcttggagcagttgctagctactccagcttgcacaaatgtgttcagacgtcgagttgcaggcagtgtgaatgtgccatttgtatgatcagcatgttgatgtgtagatgcagccatgcatgcagatattgcgaaagcagaatgaaagttagctatcttgccacaaatcgagtgaatacagtgttttgtttgcctttcgtctattcctcagaacgctaaaaagcgctgagattttttcccatggaaaggttgttcttttcacagtacagtacaccggcaggcacatattgttgcctctagaaactcgccattgtggcccaggccagccggcgatgcagaaaagtcaaaagttgttcagaactgtactttatctgtgatgtgacgggcacaatacatggatgctgtgttcaagatcatatctgctgttagcctgttactataagatcatatcagaccgagcaggaatgcaggatattaaggagtatgcataaaaagttatttttcatacttaactttcattggttggtcggcaccatgcgtatctttgaaatgctgtaactaactcttcttaccttggttaattaatcgttttacttaaccggatggcgactgaccaaaatatcctgcagccccagagtaacgggctaaacgtcgctatcaaagttaacccctctgcttcactttgcatcattagttacctaagcatatgataacatttacaaagtcccatttaaactcggatagtgtgtcggcgtccacggccgccccggcaggtaacattatattggtttctggatgggaaaaaagacagacggtccccatatacaattcaaactcgatcgaaagtcatacatataatgttacatgcgtgcatgcaccaatgcagatcactggccggacgtactgtaagtttggactgtaacagcatgcagctggtatccaaccacgcggggcaataaccaatggaacggtggtaagtggggcggtgcatgcatagtgcggatggggacggcacggctcgtcgcccatgcaccgcgtgcgctcctcgctcggtcgatcggtcggtccgaaagattagcccgggcggcgcccatccgcccgcccaatcatgagcacctcgcgggtcgcggcatcatttgctcgagatatatatcgctacgtacgtacacggccggatcggtgcgcgcgagcccgacgccgggtagccccggcccccaccccgcgcgcgtacgtacgtaggccccgcctcgcaccaccaccgctcgtacgcgcgttgcgccgtccgcgcctcggcggctctcgtatatccacaccaccccgcgcgtttcgcgtgccggccaacgccgacgcgcacgtacaccaccaccagcgtgcgcgcgtatctcgcttgttttccgcacgacgcaaccgcgcccgcgcagggggtgggctatagctgcaggttacgcgcgaggccggcgccggcgtgacctctcccttttgcggttttgccgagaattgagcaggcaggcatgccgcgcattgtactacaggttctatctgtgcgacgggatggagaccttttggatcgtttggtgaggaaagatacggcaagttggctagcgagaatacatgtgtgagatccttggcgtaagcggcaaaaaggctatagcatgcttgtttgctcccttagtgcatgcataaaaagcctagctgctgtgacagtaacacacacacacacacatacaaattgttctcttctgtgttgtactgctagctagttagctacatatgctcgcgctttcatcctctctagctgcttcaagaaaaagcctatttacctttgatgtaagagtgatgacgtgctaaaaatgctactgatccggtgacccgactgactaagaaagctaagcttgattttttttttctggactctcactttcactggcggcacaagtgtgattgatttggcggcacgcttataattttgaagcggtgtgacatggatgtatatacatgagccgacttatatgcatgcctgatgtagtatatctcagatcgatcggctagctagtgcgaggagaggtgaacggcaagggatcatcagaaggatcgatatcgtaggttgttacgagttactattgaattgctcctacgtggacagaggctgcagccatatatggaggttggtaaagggaaagtgactgcacaacacgttggctactgagaaaagggcagctgatgtaggatagatagatatatagatagagggatagatacttgttgcacactactcttaccgcttttgatacatgtgatgtgagcatcaagcttgtttctttcttttcttttcttcttcccttcatcctttctcttccctgtacatgctgtccctgcatgcatggcttgtcgatgcttccttgctatcattgctcgccggcctccattcccgttccattccagggtatggagtgccatggttgtgatctcaaaagctagttggcgtgagcatggcattgtccggacaagcatgcatgagagtagttaagtaaattgaatcaacttcgattgttaacttgatagcttccctgctgtgtggccaaaaaatctaccatgttgttcgcttctggaacggaatcattcaggaaactggcagcccctcggtgtgcgtgaggcatcgatggatttcgtggactaataaccagcggaatgatcgcgcgctacctctatcaaatcgatcgtctctcatgacgacgagcaaagaaacgacatgatacggcacagaaaagctcgcaaaccgtagcagcagctcgcaaagctcataagtacaagatcctctctgatctggcctaatggcagacagacaagtggaccattcatcacatagacgatcgagagcaacaattagctagtgacagttcagtggtaagatatgtagttactaaaacttacaaggtgcgactgcatgcaattgcatgcctctgcaagtctgcagcactgaatgcagtgggtggccggccgggcggtgcctttgatctcactgagtcactgccaaattcagctggctagctggacaccgcgcgcacacgggcggttgccgattgatgctcctcctccgcgtcggagacgtacattacatcatttcggcgcagtggaggaggtggggagcacaccgcgcacggaggccgggccgggcggccgatctacatgattcacaccttgcgagctagttctcaactcatgcgagcaatcttttcctgcaaagttaccatccattctttttatctttctagtttcgtatatctatgatctccattcacacaacaatatatggctgtggtgaaaaggctctgttaaaaagcggcatccattgcagcccactcgatcctgggtgctcttgcgatcgatccatagcagcctcctctggtagctagctagctttcgtctctctgactcttctatcctgtaattgtgcccattgtgcattattctgcattgacgtatgcttgcctttcgctatagtcttttcctgctcttctcttcaagatagctagctagtcttcagtgattgtactgttcctttcttgaaaaagaaacgcatatacagtctgaggataagatattgagatgcatgcacacaaatgcaataaagaagagatgtagaaactctgaagaaagaaaaaaaatagagagagagatgttacgggtagcagcttccgttctcccttgaaagttcaaacggaggacaaagaggccaaattgctgagttggctgtttaaattgggcttaagttccccctcggcccaaagtagggcttcagttgttttcttattgggctagtgtagactgtaggcttgacctgtttctgatttctgaagcccatgtattctttcttgtttacattttttttccggagtcgttagaaatatggcgccatatgctacagtcgattttttttcagccacttacatagtagttatatctcatttacaccccacttacatatataattagtatgtattttttgaatttacatatgtaattttagtacttacatatgtaattttgagacttacattgtaaatacactatgaacttacaatgtaaatacatgccgattattttttgatgaaaaatatggcaccataaatatagctacacccttttttttatagctcgaacaaacaaatctggagacactgccaaagtgctagaaaaatatcaatcgaacatatgttggcgctatgtatcttaggaattgtttagttaggtaaaatttttaggtttgattgtcacatcggatattcggacaatatagactaataacaaataaattatagactccccatgaaattgcgagacgaatttattaagtctaattaatccgtcattagcaaatatttactgtagcaccacagtatcaaatcatggcataattaagcttaaaagatttgtctcgcaatttacacgtaaactgtgtaattggtttttatttttatcaacatctaatactctatgtatgtgtctaaatattcgatgtgatggatgaaaaatttttattttagcaactaaacaaagcctttgtgctacatggctgaatattaagtctttcgaagtggtcatacaaaaattctcgtttgagctgtgctgcaagaaactctgcatctatcgccctgacacgcgcttcattacgatgaggttggcaagcctgcaggacatcctcgtctagtcgtttgcacatgatgtagcctgtagcctgtagccatacaagagagcacgaccaaattactggagtatggtacgttgctgcaccgcgtactgttgggaatggaaggcgactaatcaacctcagaggccacatcccatgtggtcctcttcttgaagacgtcttttaccctctactggaacggcagcagtaaatcgcattgcctcccagtagtcaatggccatcgatcacgagcaagcaaggcattgatacgcgcgtacgtacagtcagtcctacacacatccgtagtggtatatactccctccgtaccaaaaaaaaagacaaactctatttttcgtgcctaatatttgaccgtccgtcttatttaaaaaaattatgaaaaaaattaaaaagacaaatcacgcataaaatattaatcatgttttatcatctaacaataataaatatatgaattataaaaaaaattatataagacggacaattaaaattggacacggaaatctagggtttgtcttttttttgagacggagagagtatggtacagtggttcatgccatgtcaatgccggcctcacgaggacggctagctcgccgtgtcgaccgcgccaccgcgaacggggcgtcacggcctgaaactgcaagtgtgttccttattctcggttagaattcagaaattactgtatttcctctgaaacctctgcaggtgtacgtacgtcgtcgcgcttggtcggtgacatgaataactagtccagtacgtagtccgtacgtacatgtacgcggatgatccccgtgctgcgtggtccgggtgcagcacgtcatctccggcccagccagcctacgctcgtgacaagtgttgctcgatcgttcgttgcaattgaccttggagctagccggtcgggccatggcttcgcttaagaacgaccgtcaatgtctctgcaaattaagcccaaatccagtgcaggatcagtgcggagacaaaaccgatggcgatataaccgaatcggccgatcgatccattccatgtgtcgcgctcgaccatcgctacgccttcacgacagcccggcgcggcaggcacgtcgtcttgcggatcgaacaaaagtgggcgatgtgttcggcaccaccggccgccgcccgcgcgtcccgtggagaatccgaatagaataatccactactactagcagtgttacatttcgcctcacagaggctcacagcttccacgggagaaggcgtcacggggagctacgcccggacgccccccatcgtcgtggcgagcgcgagtcgcttgctcgatactcatcgctcggtgtggcagggcagcaacggcagcgcgcgcacggggggggtccacacggtttcctccgcaaaaaagccgctttctctcggtcgtcgtcgcttttccaaccgtgaaatctcccttcttccacaccggcctttggaggcttggagctactagcttttttgttcgtgcagccatgtggcggcagtgcgcttgcctgcctgcctgcgctgcggctgcgcaatgctctgcacttgaccagatcgtgatgtagtagtagtatgatgtaagggcattaccaatgtatatgttaaaagtggtttatatagatgggacccatataaataaactttaactatagcaatctcacaatgtatatggatacaatgtaacattaggagaagagagagaagtagagatatataatattatttatgtcatataggtagtgtatatgcatatggatatcttttgctattttctttatatggactagttgcccagtgttactaaatggctaaatggaatagtttattccctatggactacttttgtagcacattgtggatgccctaactgttgtagattaatcgcgactaacaaaatacctgtcttgccttgaccgtgtgcttccgataatccgatgcacgtgatgtgtcgctaaagcggctcactggctcaggatgcaccgtgcgtgttactaccaccgactgcaaatacacgcggatcgacagctcagtgtggtggtggcttcagcttggcggccaagaaacttcaaaaccatattatggcatccttccaaaattttagaagggaagaagaggagctatgatatagacagtgcgagccggctaccatgtacacttgataattggacaccttcacagttcacacaatgccaccatcatatcaccataagctttattaagggatactagtcgaccctgccttatgcgcctagaaacttaagcacgctgcatgtacgaatgactaattaagtgtgtgaatgtacattggcgaatctagagatcttttagaacatgaacaaacatatatgtccaaaggattatatggatgccattgaacatcagcgatggaagctattacattgatgtgacttgtcaatgagttcggacggttgcccgaaggtaaccactagccaggtcttggatccgctcccaaaaatatacaattaattatttctttaattaattaaatgtggaaacaaaactagctaggcattatgcagttggtcacaaaacgacatgtttttttagctggaagagtacattttactgctagcttgaagtgcacgagctcgggcggtcgtccggggtcaccaggtcttggatccgccccccaaaaaaatacaattaactatttctttaaatgtaaaaacatatgtgtgtgaaaaaggttaaaaactagctagacattatgcagctggctacaaaacgacatgttttttttcttggaagagtacattttactgccagctgagaaatagtgtgaagcttaactctaggtgcacaaattcggacagtgccactcatggtcggcaggccttggatcctcccccaggaacatacaattaacttttttttgtttaaatatgaaaaaaatatatgtgtggaaaggtttagaactagacatcatccagctggcaatagaacgacatgtttttttttacatcatcgagttggcaacagattgacatgtttttgtgactggaagagtacatttttactgtcagctttgaaatactatgaagcttaacgctaggtgcacgaattcggatggcctcccgtagtcgctaggccttggatcatctcacaggatatacaattaactattttatttaaaagagaaaacatatatgtgtgaaaatgttcagaactagacatcatgcagctaacaacagaaacgacatgtttttaatttgtcataggaagagtacattttacttccagcttagaaatagtatgaagtttaactctaagtgcatatatatgaacggtcacccgtggtcaccaggccttggatcctccccgggaatatacagttaactattttgtttaaatgtgaaaacatatgtgtgtgaaaaaggttaactagatcaccatgcagctagcaacagaacaacatgttattgtgaccggaaaagtacattttattgccagcttagaaatagtatggaccttaactctaggtgcacgagctcggacggtcgcccagggtcactaggccttggatccactcctaggaatacacaattaactatttctttcaatgtaaaaagcatgtgtgtcaaaaggtttagaactagacatcatgaagctggcaacaaaatggtatgcttttaactagaagaatacattttactagcatagaaaatggtatgaaagcttaactcaaggtacacgaatttggatggccactcggccttggatcctccccaggaataaacaattgactattttgtttaaatgtgaaaacatatatgtgtgaaaaggtttagaactaaacatcatacagcttgtaacacatcacgacatgtttttatgactggaagaatacattttattgccagcttcgaaacagtataaagctttaactctaggtgcagcaggtatgaaagcatactatttattttactagaaaaaaatgtaaacatgtaaatatccaactttgcagcggaatatgatcctccgacgtaaattaacatgtgacaattgccacatgaccccacttgtcagccacaaagttatggttatgttatgccagaggatctgattcggcatgcggatccttgggctggttggtttgcatgatattttcgtagcaaaaactagttgtagttgagtccatggctctaaaattctcctaaggtccgccattgatctccccatgcaagagggaggcatgtctcagagaggcctgtagcgactagcgaatgagcaggggtccaacaggccaacaggaagctcgtaccaagacttgcaggcagaaacctacatgaatgaatgccttgattgcgtgccgggcagtctccccacattcgcagcagcatgcagctgacaccgatcgaacagggcgcacgtacgtacgtccgaggttggccagtggaaagtgcgctgcgctgcgacgggtggcaacggaacgcaacgcgccccatatgcatcgcatccgtttcgtcgcttccgccttgccggtggctgccaaaattgccatcccctggccagtaaatcagcaaggggcagtggcgcagtgtgcaagctggcctgggtgtaagacggtacaaaagtggtgcgtagcgcatgtgaaactgatggtgaaacacatgtgacgcgagacgagacttgaggcggggagagggctatcaggcaaccccaccgcaccaccggaaccaccacctcacaaacaccgtcaccaaacgccgacttaatacccttaaaagcgacccgatccccagtccgggcaacgcaaacccccacattcctccgctgctgctgcgtcgcgcgcgcgtgtgtgcagtgcaccgcccgttcgcggagccgattgattttacaacaccgcgctcgctcgcggtcgcggggggggcggaagctggtactactcgctatcatgaacggtggcattggcgacgcgctgatgcagccgcagcacgtgcaggtcatgtcgtcgtcgttgccgatggtggcgtcgacgttcgtggcggagccggcggcggcggccaacaagccgagggccgcggggctgccgcccacgccgccgcaggtgttcgccgcccagcgcgcggcggcggcggcgggcggcgacgtgtgcatggaggagtcggcgcaggggggtggtggcgggctgccgccgcgcaaggcgcaccgccgctccagcagcgacgtgccgttcgggtacctggccgggcagcaccagctcctgccgcccaaggtggaggccgggtggggccacctcggcgccggcgccggcggcgcggcggccgccgatgacctgttcaacgcgtacctgaacctggaggggctggacgggctcaactcctccgacgaccgccacgacgaaggggacagccgcgggagcagcatcaagaccaacggcgccgacagcagcgagaacgagtcggaggagtgcgccgacgacacccgcggcgggatccgcctctggtccgccgacggcggcgagaggagggagggcgtcaagaggaacgccgcgggggagccggccaccgcgccgctggcccgtcacgccaggagcctctccatggacagcctcatcgggaagttcaacttcacggcggggacggcggcggctgcggggaacggtgtcgcgttggggccgaacaggttcagcctggaattcggcagcggcgagttcaccccctccgagatgaagaagatcatggccgacgagaagctggccgagatggcgctcgccgacccaaagcgcgtcaagaggtaaataatattcgatcactctcccatccatccatatcgtctcgcaaatgcaaatgattagaaaacgatcgatgattgcaatgtatattgagcgctacgacatgaggggatcgatcgactgatcgctgagagctttcttcctccggtgacagggtgctggcgaacaggcagtcggcggcgaggtccaaggagaggaagatgaggtacattgcggagctggagcagaaggtgcagatcctgcagtcggaggcgaccagggctgcaggaat

SEQ ID NO: 9513 - DNA, 205334 bp, Oryza sativa
ttcctgcggcccccattatagacacacttgcttctctctatgcaatactagtgatttaaaaagtttgatttttttttctttgtgctccttatacaaggcgaatcatatcttaagatctcatgtgtgcatatatggaaaacacgcagtacaagtagatatagctacaaatggagtactatagtagtagtcactaataagtaatagtactactttgatggtgatatcccattcccaccactgttttttggtttgcaaaagcaaaacctgaagaaaagatcaaagcttaaaagcaaccagtggaagctaaacgtagggaaaagggcagtgtcccggggttcgcaatgcaagttgccaccaatcaagggtctgtttagtcccgataaaatttttcgcgctatcacatcaaatctttggacacatgtatgaagtattaaatgtagacagaaagaaaaccaattacacagagtaatttcgccatgatttgacaatgtgatgctacagtaaatattcgctaatgatggataaattaggcttaataaattcgtctcgcggttttctagtggaatctataatttgttttgttattagactacgtttaatacttcaaatatgtatctatatatccgatgtgacatgcaatggcaagaattttttttccaactaaacaggccccaaatggaagcaaggaatcctcttaaaaaaagaaggaaaaaaaaagggaagcaaggccggaatggctacagctacaacccggcacaccgtatacgtacagcacgtcgtcataggctgcaggccggcatccatgacgcaccgtggtcactggtcacgtgtggtcagggccccaagcagcagccggtcggctcgcgggttttctcaccgatttggcggaggcagggaggcatgtgctttgcttgtagcggcagagggcacctgcatgcagcctgctggctggagactgcagtagagtgtttgtggtagccagtgagccggcgttgtacggatagccagccataactctaccgcggcagacactgtagtactaagttgttactaccaggccaaactactgcctgctgctccttcaactcttgaccggttgggagtatgacgattatgatgaatagcctgcgcaggtttggacaatcggacagctggaccattcggatcagggtttagcttttcgtttgaatgtaaaaaccacttctcaccggtttattggaaactgaaaaaacattaaccattttatatctatatcgtacgaaaaacacaaccaaaaccgttcagtttccacaaactgaccattgacagtttcatcaaaatcaagttgttttcacgaaaaccgttcaattttattaatccttattcggattatcaatgagagaaagcaagcaataagggtactatagtaacatgcgagagagctaagcagagtgaccaccaaacaagcacatgaggtccttgggagcataggtgcaaggcgaagacaaaatcaacaaaatgcatgtattttgtttggtttacataatcaacatattttgtacaaatatcatcttagggaatttaccatgcaaaatggtgtgacctcggggggaaaaagtgtgtcacgtgcgctaaagccattatcgaggacacacccattacataaccgcggccaacacactgctcatatatatgaagcaactttatagagcagtggatttcaattgatgggaccggatgtgacttgtattggcttgtgtcaacttgcattggtttgatatttcgatcatctcccttccttaaaggccttattaattagggtgtttatttgttccaaaagaactcaggagacaagttagggtatagttccgagtagttttggtcggtagggctaggtcttccattcttatcaagaactcatttatctactccggactacatctttatttcagagttttgttttcgtgtaggagttgatatatgatgttttacacttagatacttatttagtcctaaaaaaactcaacttaggtggggatgtgaccccttattgtattaggatgtgtcacatccaacctaaaaccttatatttaggggaatgagatcagagagctacattgccatgattttggaggtatttttaactgtccgatccacaatgtacgaacgagatcgatcggtacaataaatcggtggacagtacctcgtgcagtcaaatccactgtttttcactattgctgccgtaataaaccgcacgttcttgttttgtactgtagcataagactcaaattactgtgcttccctgactttaaatgctaaagtcagaggagtcggttccatatatatttaggggaagagggagtatgcactaggcagattttaaattgtggatttgatgttggtgtcaactgacttttagggctcgatcttgtcgaatttaattagttgacaaatgctcatacataggtaacttgaatggttgtgctatacactgaattatctgtgttacactaatctgaggtatatatgtgaattgttggacgcaagtgcacgtctttgtattctggaaagcaatagtcgtgcatataaagtgcacacgggtgctttaatttgactatatcatatggaatggaagagcatatatgctagctactcctatacgagtacaagtactagtagtaattaatcaacatgacagtatttatttatcgacccactgggtctatggacttttttgcccttcaccgacgacgacatgaaagaaaccaacataacactattagtttttggctcgttgcctctctttgttgtggacgcgatgccgccacgaggccccggggagctttctactggtacgttctgtagcttcgtacgtccatccgggaccacgatcactggccgcttgatatctgcaacctacaggctacattctgtatgctcgactaattaataatcatcattaacaaacctgtcacttagactaatataatcatcgttaacgaacctgtcgagtaagctgtgtgacgagttgacaggccggatttgttggaattatgtgtgcgctataagcccatatggatatggataataatctcatgaaaatcagagaaacccatctcatagaatacatgcatatcaacttcagtaccacttactattctaggaaagtgagaccacttaaaaagaagggttaattagacacatgccattactaatttgaaggtttggaaaaatgccattactatttgacaaattgtaaagatgccattacaaatcgcacgatactggaaacatgccacgttctacgcctgatccgcgattgtactcgtttttatgcgtaccgtatttacgtatggaccataatgcccttatgtatgagtatgtagggaccgagtggaatcagtttgaccaagtgcattcacagtgaaccgtaaacctaacactaggcttctccggcggcggcgggatttggaggcggcgttggcgatggcatcgggctttggcggcgtcggtggcggtggcggcagcgtcggcggcagcggcgggctttggcggcaatggcggggagaggcagcccgattcattcgacgggcttgagcggttgcagctttcagcgcacacgggccgcagcgtcgtcggcaccatggttgagatgtgcttgcggcaaagccgctgtagtgaacaaatccaacaccccgaggaatccaaggcggcggtggattcagtgcgggaaagaggtaaaccccattgtttttcattttcttttgttgaaattcctttcttttttgtttcgttttcttgattgatgccattgatttgagatgtgttgtgcagccaaagtgttgctcgttgtggatatgggaggatctgttgaacgaatatgtggaggaaatggttgcttattcccatgctggcgaggacgatggtctaagagacatgttgcgacagcttgcagaagagcataaggaagagaggtcgaggatgcagggtttggttgaggcaaaccataggcagatgcaatccatatatcagcagctgaatgattctaagaaaaagtgtgagcagctaaagaagatgttgaaagaagagaagtgtagtcgtagtagacaactttatgtgatgttgttcttgttggccataattatgtatttctatgtatgttctgtaaattttgtggccatatttggtgcaagtaggtaaatcagtgccattctgtgtaatgttaatcactgtctatgaattatgtggattcaatttctgagtaatgacataggtgtgttaattatgtggatttaatttcccactctgggtgctctgttaaggataagtctggcagctcaaggtacaagctgatattgtgtgtttgcagcaagagctaactgctgactcctacactaaagctatgctaatatatgttcacttggtgtaaaaaaaaggaaggtataggacatcgaaatatcttttggtgtgaagtatataaagaactgaaagttctgtgtttttatttcctctttgaaaagactgcccatcattgagacagatgaaaaagaagtacaggaaaatgagttcacaggaaatttgtgcattcagatggtattagttgagatgatcagcaacaaatatttcggcaacaaatatttcacatggtataagttgagatgatcagcaacaaatatttcacatggcatgtgttcagatgatcagcaatatttcacaatatggactgcatgttcacaagtttggactaatttcagcacactgcatgttcacatgttgcacacagtgcatatcacagtgccaggcaacataggcctcaaaatacaggttcaagacagtggcaggtaacatgaaggcctcaaaatacaatatagagtgcatatcactacagcaagtcaggaaggcatcaaaatacaatatatagtgcatatcacagtggcatgtcagcaaggcctcaaaacacacaagcttcaggattgtagatattgtgacaggcttctaacaactttagctgggccttctgaggcagctcgagcatccttcttcttctggggtgtcttctttttcttaggcgtcttctttttcttgggtgtcttcttcttcttagcaggccttgatgaactttcatcttgagttttcttcctgcaaacagtgatatggatatgttagttagcaaatgcaacatatgtaaaagaattcaaaataaatagtcaaccatgcagcatattacctcttcttgggggaagcagtaggcacttcatcagtgtcttctggtgcttcagcctctttgcaagtcttggcaaagtgcccaaaaccatggcatctcctgcatcgcactcttcttgcccctggttcaagtgcacccctgatcctagtgactctaggcctccctgcacccctcttgagtctaggtggacagactttgaagcctaaattcaccacaggccattgtgatctgtctggcatagttggcactctccctgcataagctgctctgaacatgccaacagaaaagtactctaaaacaaaatctttaatctcaactcctctgttggaacatatccatgccaaggcatggttgcaaggttttcctgaaacctgccactttctgcatgaacatgtttggttgatcaaatgcacagtgtgccttctggtattgttgtcactctcaaccaatgtgatctcagccatgtcatcatcactcctagcaacctttacaactttcaggttggttgttgctgcattgagctgtttaatcacactgggcaggattccatcagtcaacttctcaccaacttgtctcctcaaatacatcttctccatgaataactctctaagagaatcaactagctcatggagatgtagacccttcagagatttaatctgattattgaaactttcagatgcattgttggtcaagtaatcacagttgcaagtttccttgaaaccagacctataccatatccttgaatgatgtttgtctaggtaatcaatggcttcaggacagaaattataaatctgctgcatatgatctctaaaaccatcctctgtgaagcatcttgcagcaggatacaagtgtagtgtgaaaataggacccctaaacttcttcataaaattaccataaaggtgtctcatgcactccctatgttcagctttctcaaatgcagcacctacagctttctctagccctttgcatgcatctgttgatatgactaacctttcaggagcacctatagctccatgcaactgtttcataaaccacaaccagttgtcatctgtctctgagtcaaaaattgcaaatgcaacataaaacaaccaattgtgtccatcaacagatgtggctgaggctagctgaccagtgtatttaccagttagtctagttgaatctacacctatatatggcctacaaccattaacaaatccatctacacatgttttgaaagcaacaaacatccttttgaaacacatatttttccctaacttctgcaaatcaattgtaacaattgtacctagagacctcttctcaatctctgccttccagttgaacaacagctgaaaactatcttcataagtgccatgaatctggttctcagcaagcctccttcctacccaagcctttgaatacttcagcttgatctcatatcgctcttcaagtttctcttttgctgccttagctcacttgtcagggtttttctttaaccaatccttcagtctatctgcaatccagtcttgagtggccatcttcccttccatgagcttggttgtgggacactcatgtgcaaatggtagcttctttatctgcacacacattttaaatagtgctataagtcacaactttcaagcaaaatggatacaaatgtgcaaattgacatacaaacctgaatagttttgccatcagacaaccttgatgcatgaatgcgccatttacacccctcatgcttgcagtgggcaatgagtcttgttggatctgtttgcaaattagagagttcaaatcctgtaacaaccgcaaagtgcctaatagcttttctgaatgttatcatgtcaggaaaaacagcttcctccttaatcattggcatctcagggttatgaagaacattaaactctgctgggtcatcatcagtgacctcaacctcaccatgaggttgagcagtcccagaaggtccaccaggttcagcattttcagcacatggttcagcattttcagcactaggttgaccagaggtttcagcatgatctgtaggtggaatggtgtgaataggttgaatataaattccctcatcatcaacacccacatactcctcctccatgtcaaacacattaggcaatgtttcatccgcttcttgagttgcaggttcacttgaaactgccactttagatgcagatgctccctgccctgtctgagtaagtggaagaacacacaatggcattgatgttggctctatgttattagcactagcatcgcagagtacactctcaacaactaagaccattaattcagcatgcatttctgacttgtacatttcaaacatgtcaaccagttgagattcatggacaattctaacgtcctcattactgcccttgtccaaaaaccacacggttgcagtctgctgctcaccccatctaacctctgagcttaagcttagcatcaacaaatccaaagagaagctaccatactcaacatcccatttcagcacacaacccttagtatacctccgtctaccatccgaatctatggtggtaaaaccatgaacctttaactctatcgagaacaacagtgtattgacattggaatgaaatcaagtcaaccacacatggaatgcacagaaaaaaaaacctacacatccagctcacagcacatcgaatcgaaggaatcgactaccttaccttgatttgggctccatcccttgcagtacgtttcctacccctccatggaaagaaagagtcgtcgccgctgacgccgtagacgccgtcgccgccgccgccgaatacgccgctgctgccaccgtagacgccgtcgtcaccgccgccgaagatgccgccgcagccgtcgtagcccgcgccgtcgccaccaccgccgccgccgccgtagacgttgtcgttgccgcggccgccgtagatgacgtcgccgccgtcgtcgctactcctgctagggttaggtctaagagaacgagaaaggggataaaatgtgtgctactcctgctgacccgactccagtcggtatagccggtcaaacgggggcattttggtcattaagaacaaattttagtcacacgtggtcaacaatcgctgatcaggcgtagaacatggcatgtttccagtatcgtgcgatttgtaatggcatctttacaatttgtcaaatagtaatggtatttttccaaaccttcaaattagtaatggcatgtgtctaattaacccaaagaagaacgatatcttcttgggagtggattctaatccctcgaggggatatccccttatatacctttttcttctaaattcgatgcaaatagttgtgaaaaattctaaaaaaaaattgacaatgtagagtataatgattcctactagtccaccaaaattcatgttcaaattcgatctacacatcgagaaacaaaaaagacaaatttagatataaacagtacgctactattcatatgctgaatttgtcttttttatatcttgacgtgtgagttgagtttggacttaagattttgtgaagttgtatatatgtgttgtatgaatgttgtcaaatttttccagaatttttcatgaccgtttagatggtttttgagcaaacgaggaaacatcccctcgagaaattagaatagtttccctatcttccttgctatatacctactcagtacaacaaagagagtaattcatatgagccctacctgagtaaattagtttttttagtcaaaaagatgtgccatgccctatactaggtttattttttatgggacagagggagtaaagttttagcctttgacacatgtgttaagtagttgccttcttaatgtgggtaagatataggtctgaactagttagggcccctttgaatcgaagggtagaaaaaaacggaggaataggaaaaacacaggattctgacaggaattgaagtgtaaaacagaggattgcaaaacacaggaaaaacacaggaatggtcgtttgattggagcacaagaaaacgcaggaatcggatgagagagatagactcaaagaaattttccaagaggttggagctcttgctaaatttcctccaaaatccacatgcaatatgccattccataggaatttcatagtatttggaaaacttcaatcctttgaatcaaaaggctaaataggaaattttcctataggatttgaatcctatgaaatttctacataaatcctttgattcaaaggggaccttagagttgtaacaaaccaatgggtagtgcggatagtgtgggcagtaaaatgataaaagtcacatttaaaatgataattgtggatagctcttttcacttgtcttaaaataagtttacttttagaataatcgttgcgctagagtttgtgaaagtagaaaatatttatattgaaaggataaagaaattgagaaatagttgcatttgaatttgatgacgtagatgtattctagtccttttgttttgtattgggatgtgcgattagtgaaaaataaatttatttcaagagggaggaagtaagggcccctttgaatcgcaatattgagaaaacataggaataggaaaaacgcaggattttgatatgaatgtaagtgtaaaacacagtaacaacttacaaatgatcgtttgattggaccgcaggaaaaacacaggaatagaggagagataacgattcaaaggaaagtttccacgaggtagaatctcatgttagatttcctccaaaacttgcatggtattaggcattacgtaagaatttcgtaggattccataggattcattcttttaattcaaaggtctatataggaagaattcctataggaacaaaatcctctaaggtccctttgatttgtaggaaaagtgtaggaaatttgaagggtttcaatcctatggaattttttttatgaaagtctttgaaacaaaggattgaatcctatacaatcctttaaaattcctatgaaatggacaatcctatatagattttggagaaaaattagcaagaggtctaacctcttggaaaaattcctttgagtctatttctctcatttgattctcgtgtttttcctgtggtctaatcaaacggtcattcctgtgtttttttctgtattttctattactctattttacacttgcattcttgtcagaatcctgcgttttttctatttctctatttttccattcttgcgattcgaaggtgctctaaaattcttataaattttctttgaatcaactgcggtctaaaggtggagcatactcctagactcctcctagctggtctcgtaggttttgatagctgtgtggaagagccaaaggggagagcactttaagtgaatggtccaataacagtgacagtccttggagcgtgggagtactccagaaaccggggcaggtggtgcgtttaaaggatacctctccatttcctttcagggtctctccagctattcatggccagtcggtagaagtatacacatatatactccactgtagtacatcaatgccaaggagcagagatgttactggatcagaacaaaactgtgtcctgcagtttatagccagaaagagagaacatcgagcgcattcataaacagcgtcatcaatgccagcccagagaggcagaggcagaagagttctgattggtcaccaccaatcagccaataggaggagacgcaattgtactatggtgcagagctgctggtacggcagccactgtgcagcgcagcccacccaacacggcctttttctaacccaccagattttgctgggcctttggatcgctttctgggccagaccaaagttgaagttgatcgaggaggagcatcccattccattcccgggccatttgcaagcctagaaaaggacgcggaaggcgaaccggattctggcccggccccctttggcccctttcggtcgggtcatccatccagctgtaccacactactccaacgttgacccgcgcgacagcgaccgcccatcggacgacggctcacgctacgaatcagatgccccaaacgacgaaagaaaaaaaacaattccgctactactaccaccactaaaagcagctcgctgtgtcactgccgagtgggcccggcgcgcccaaccttacccgcgaaggaagggagcgacccccccgaccccgagccttttgcggtccccaccccgcagtgtgatggcacgtcgtggggcccacggtggctgacaggtgggcccgcaaggcggagttaaagtgagcgaccggccctccctcttcttgacttgcgccaccccaccccacccaaacccccaccgccggaggaaggaggagacgccgccgccgccgccgcagccatgtcggggggaatcgcgcgcggccgcctcgcggaggagcggaaggcgtggcggaagaaccacccacacgtcggtgcctctcgatctcaacgcctcccctctttttttttttaatcccttttacatgtcgcgccgcggggcttgatccccctgatctgtgttctgatttggttccgtagggtttcgtcgccaagccggagacgttggccgacgggacggtcaacctcatgatctggcactgcacaatccccggcaagcaaggggtaagcatcgccctgaatgctacactgaatttaatagtaagagtacaacttgaaattcgagaggcctctctggttctcgtccgattctgaaccaggatggtttcgatggttatcccgttagctatccactgtgttatcagatggatctcttcaggcggagattatttcagtgccatctccctcttgttttgggagatcggaattagggattgtgctgtagtacatttgttgccatggcctgggtttgaggtgtggtgcttttgtgccgcgaaaagactgtcttttttttgggctagccaaactgttttcaccatagatcgaagttgagttctggttcactgtcagtcaccaagcttttgcatgatgtgcttacatgctttaaaaccagtcttcatttcagcaactactgcaaaccgtaggtagaagggagtattgcctcaaatgatatatcaaagggtgaaaccagtcttcatttcagcaagacagcaactaccataggatgaagggagtattgccccgaatgatatataaaaagatggactgggcattaaaatcaagtgcacacataaattcggttgaattatacacgtgggcttctgcaagttcttatcatttactaggccaaataagcgagtagaatgtcatgaaaaagataatactactcagtaggtctggattaacactatttcatatttgttgcgggttctcttttatggtcagattcagctttgacaaaagacaacaaagaggaatagtgattgcgtgtgtcatgtgcgtgcatgagggaccatgtgcagtctctccttcaggagtttgaccaagttaggagtccttgagatagaatagctcgatttcttgttggctcagtttggtctagaagaagtttgaacaaactagagagcatttgagcaggaattgctgacatttatctagccttttaaaagtggcatgcgtagtactacctccgtacactaaaggatgacgctttaatgttgggcacagagaacagcacagtttaactgctgaggaaaatagaaaaaaattgccccttcattagtattactaatagctcatgctccataaataatgataataataaatgttcatgcattctaatccaatgacccacaagagtgcattggcattgattagtgcaagcaccagtttgccacgagtggatgtgagcgaacgctaggccatgcgaatctccgatcaaaatattatggcttccttagatttcaattagatacaccaaacgctctcttgaattaatccaaagtttggccttatagctcccctttttagggtagcggtgaccggtgatattggaaaaatgttgcctaaaaaatctaaaacatcatctactgaagaacaaaatcaaaatcctaaaacatcacataaaagggcaggggtaataacattttgaacttgttagcacaccctcaggccttgctctgcacattagttgtgatgtgagccaagtttcacattattcaagctaacacgatctcttacaaaacatcaccatccagagattttcatatctttacatgtattaccactgtctggtaacattatcttagtgttttagaaaatatatgaaacccagtaagttcctggcaacctaggctgtcctgccatttgtaggtgctttggtgtgatttaggatatattaatgttccttctatctgaagcaaatataaattaagactttgaaacatgtccatatttacgtgttacagctttttttaatactcagaatcctttgaaacatgtccttggtggtgtaacacagtaatatatatttttttcctgaaaagacttattttttctgttaacaaacaaaattgtttgcttttacttcatcagtcttctatatttctaacgtgttgattgatgttatgctttgaattcttgcacatggtcagcttatatgttactttctcaagcttgtcatactttacaaaactacattcttatattgcttctctgttcatgtagagaagtgtttgtaaaaaggcattgcagctagaagcctataactaatgcacatctctctctctctctctctctctctctcttttggcagactgattgggaaggtggatactttcctctcactcttcatttcagtgaggattaccctagcaaacctcccaagtgcaagttcccacagggtttcttccacccaaatgtctatccttcagggacagtctgcctttcaattcttaatgaagacagcgtaagctttacaagcatttattaggtttttagcaatcccaatttagatatcatttataactgttctgattttctgctttcagggttggagacctgctattaccgtcaagcaaattcttgttggaatccaggacttgcttgatcagcctaatcctgctgatcctgctcagaccgatggttaccatctttttatccaggttagccatcagtaaaaagtgaccaatcagggttctgctaatttttactataaatcaataatgctaagatattcaagctttgtagttttaatgtgctctttgggtttgcaggatcctacggaatacaagaggcgtgttcggctgcaggccaagcagtatcctccgattgtctgagaatattggcatagggacccatgctgcacattcgcttagttcttgctagatctaaaatgagtgcctctgcaaatatggattagaccaaaatatgacctggaaaaagggtgctttcggagtttgagaagtattatcatcgttgtggactaatgtcttgtgagatccgtcttggatgtaaacggttttcttaactgtgatttttcaaccgtttgagtgcttgctttatgggataatgtcaaacattggtttggcaggcaatctcaagagtattgctatttctgtgctagtctatatgaaaacccagattaaattcgacgaaacatattagtttgcaaaaagatgtggcaacttccatattttctgcatttttttctgttttgatccggatctgtcggctatacagaggtgaaaataatgtaaacgtcggaggcgtaagtacacagtgcacctgctttgctcagaatttctctaaccttaatattgacttgctctgctgggattttctgtaacctgaacattctctggcagttatgctatcgccggtatatctctggcagcaatagcgttaagttaccgatacgtactagcgctgggttttcagacaataacgatggacttcaactacggacgacgcataattaccttgtacaactacaaagctgggaagctaatcttttgttcctagtcaattacgatgtgaaattgtgatcagaccagtgacttgtacaattaccagatgattcagcacaatgatgatatctttagtttggtactgctagtgccttgcacaatagcaaggtttatgttttgtaaagagctgccgtttactcttactctcttcgtcccagaatatagcaatctaaaattggatgggacgtatcttaatactacgaatctggatacgtctcatccgattcttggttgctatattctaggacggatgtagtatttattatgcagcatatacacttcatcccatccgatcttggttgctatattgcgggacggatgtaatatttattatgcagcatatacactaattttgtgtatacattgactatacgtttgatttttctttgcacaaggatttaagtagaatgggacgattgtccgctcaaaaaaatagaggaaaaggctatacacaaattttcttactgaactctaaaaaatctaaattgtttacgactctcatccagttaaatcaagcggttgaaaactttatcgtaaagagttttataataagattgttcagttttatagagtaagattttcttaaatgcgtgtaggtcattagcgttcgtgtttatactatgtttctttttctttaaaaaaaaaaggcaattgcaacacatttgttatggtggccatgtcccaagtggatagacggtcctgatcttctgccgtgctgttctgctggtgttgccgcataacccacggcggcggcgcgtaggcaaagccgggaggaaggattagggtttaggcggcggccatggcagctgaggagcagactccgcgaaccaaacccagcaccgggaacagcaagaagaggaagaagcccaggaaggacaagtggggccagcctatcatcgacgccggcgatcgcccggcggttgagccggagcctgagccagagccggagcctgtcccagcgcccgcagcggcggcggcggcggaggaggaggaggaggcggggatctatgaaaccggcaaggtggtggccagcggcctgccgtacaccaccaccgaggcggagatccgggagctcttcgagcggttcggtcccctccggtcgctccagctctctcgcttcccggactccggcaacttccgcggcctcgcgttcgtctccttcgaggtaactgtcgaattaacacttctattatgctccattttatttccatcttgatgttgcaccaaataatttcagcatccgtatgattgtactactatttgtcttaagttgtcctggactttggaggtaacaaatggttggccgaatgctcatttgcagccatggccgcttcatcctctacctgaaattctgaatcaacttggtgttatgacttgctagttgctacagaggaagttgctgttatagtcttatggtctgcacctatccgattattgttacattgctctgattgtcgtttcactggtattgagaaatgtcgttctactggtgtatgtatcatattaaaagccttgtatagttgtattcctaatcttatactacaatccttggatgtctgtgcatggaacaatactgtatgtcatgactttgttggatcgatggaaagctgataaagaaataaaatttttaacagtggaattccttttcatactatatttgtaattttcatttgtcatggaacatacttgccaaagttggttacttttagtttgatttgatagactgattttgttctactgtgccatttcagtcaaacgaggtggtaatgaagtctcttgagcttgacggattcaaaatgtaaggatgaggagtggctatttctcttcaactcatggaagcacgccatggagcatttgctctatactgatatatgcattgtgtttacagtggcaacaggtttatgagagttgaaagatgcaggttggctgctggctcgaagaggaaaaggactgtggagttccaaactgatcctaagaaggctgatgggtgtctgtcagcatatgttggcaatctcaaatgggatgttacagaaacagacttaagggacttcttcaagtcactgaagatttcatcgataaggtttgctatcaacaagagaacaggtgattctcgtggtttttgtcatgttgattttgaggacgacgagtcgcttgagaaggctgtaggaatgaatcaatctgaactgcgcggccgacctatcaagatatcatatgctgtcagtaacaggggctgaaggctactagatagtaaactttgagcatgagcgagcctcagtgttatgcttttgctccctcagttttgttacggttatatatccgtattaagtttctactgaaagtgttgtttcttgcatcaatctctatgtagaatgtaattcaccgtgtgacaaatacttggtgctacttaatatcgaccttataaacacttctcagaaatctctgtcaaatataactatctggtcatagcagtggcgactgatgttggaatgttgtctcattgagtttgatgtcgagggcctaaagttagtaattgttgagctcagaactaaacctaatcttttagagtattatatcccatctgaatagacgttctttaactagagtatatgcttttcacagtacttgtttgcagggaatgccttctccaatgcattttaacgtctccctgaggcacgcacgcctgctgtcaatgcttgatgctgtctgctgtccactgcctgatgttttctggttggttttatgcatcttttgtggtgccctgggaggggtaactatgctcataatactgtccatctcatgatatagaaaaaaggcagtcgctgagctcatcactacatggacaaggattttgtttgtttcaggtcttgtttgtcgacgcattcattcacttcccgtcctggcaagaacatgtggtcagtaaataagatgcccgtgatatctcattatgacaagaacatgtctctgattttctggccgctgcggggccctgtgttcttgcaatggaggagacattgcccggttgtgaagttcagatttcagaccctgttggctttgtgccgtgcttggtgcttctaattaactggaatgattctcctgtgtttggttaacccaactactacttgctcctaccactagttgatagttgcaactgagctttggcccaatctgaacagctgaaacgcgcctgatcagattaaaatcggagatctgtgtgtgatctgttcctggatattgatcagattacgcaaaggaacgtcgttttcctgtacgtacgtagcttgcctgtcaggtgtgcaattggcatccgtggaacggcttgctggaggagcatgattgattgattgccatttgttcatttctcggagatagctggctaaccgctggatgatgattcgagttttctctctctgtcccgaatggaaacgatgaactcgacaagctgggaggacacggatcgggaacgtccttttctcgatcatttcagcacgggaaggaatcgaccagctcaaattaaaacgaggtgctccttataatagtaggattgagataagagcatcggtttgggcccaggttctcaagcagcatcgcgtccacgtccagccacactaatccaggtcggactcgtgccctccccgagcactaacattacaacgaggcgcctataaatcgggtgtccgattttttttttaatcaggctctgtttcatcaagtagatcgaatatgtttaactaaatagatcgaaaatatttcagtcttttaaaaagctgtaacacaactaaatcacctcattaaacattttgatacaacgtatgaaacaacgatttctaaaaaatcgagcgttgtttcaccctatataaaaacaatgtttcagcaaatagcgacaaaatatttcaattcactgtaacatttgatctatacatagtaaaacattatgagtacactaggtgaaacttttttgtggaaaaaaaatgaaatggatttccttagcagagagtttacatagtatactggtgatttattgcaaaagaatatttcaactcactgcaacatttgattcatacatagtgaaatattatgagtacattaggtgaaacattttagtggaacaaaaaatgaaacaaattcccttaatagggggtttccgtaatatgtaggtgatttgttgcaacggcgtgcgtggtggggacacatagcgggagcggtgcaggacacgtggcgggggcggcgcgcgcgggaggcacggcgtgggggcgcccgattttaactcccccgctagatgctcgatttgagataatttcaccattacaatcactggtacatgaatcttactcttctatatattgcctcacacgttaacacatgtatcttaaaatgatttgaacctgtcctcccctctccatcgccatccacggcaatcaatcctgagacttgcagcgtgcagcaaccatgtcgttgcttgttcgttttccagctctatcatgttaatcttcacaatttggccggcttcggacggcccgagcgagaaagaaaatcttgaaggtatcttctgctgttgctggcagcatcgtcgtagctggatgccgcgatccctgtcactgggcgactattacgatacacatcgtcgtacactttaaacaccatctggagtagtaagtttttttttcccccaaacgatgacataaaatcagccgtgctggtccaaggatctgccgtctaatttgcttttgcgaggtagtccagtacattatttccttcacttgaaatgtttgaagaaaaaaacatatcaaattcatataacatcgattttatgttgatcacacacgtcacaggtggtgtcctaaacacaacctgatcgagattcgagagagacatgtatatgcttagcgtcggattagtactaaaagacgggatcggtttcggtttacatcatcctgagcggctgagcgtgagcatttactcatttagagtgaattacgctttgggccatattttattatctatatttcactttggactatccttaaacgtatcttttcactttggattggataaatttaccattgttgcgatttggaccaccacgaatgatttttttctcatacaatcaacaaccttaaacacatcagctctagtatacagtcgatctcctctatatatggttcatatgtttgctgaaagagaagttaaatatgacgagaaaagttgtcacggtagtctaaaccgcaacaatggtaaatttacccggtccaaattgaaaagatagatttaaaggtggtccaaaataaaatttagataataaaaggtggaccaaatgacaatttactcatttatttatttatttatttatgtatgtatatggcccaaaccggaagaagcgaacaaaaaaagagcggcaacaccaacaagacgaagcaaaaagtcgagtaaaaaaaggcagtaaaataggcaaaagagagagagagaaaaaaaaagcccgcgaagggatagagagagagaaagcgcgggggcgcgaacgacagcaactgcatcacccaccttcctctcctctcctcccctccaactcccgatccccaaatctctcgcccccacccatggatcaccaccaccaccacctgccgccgccgccgccgcggtcgccgatggagaactccgcgtcctccaagccgcccaccccggcgtccaccccgtcgtcgcgcctcgccgccgcgccgtcctcccgcgtctcctccgcggcgccgcacccctccccgtcctcctccgcgcccacgccggcctcgcggacggtctacagcgaccgcttcatccccagccgcgccggatccaacctcgcgctcttcgacctcgccccgtcgccgtcccaccacgacgccgccgccgccgccgcctcccccggcgcgccgcccccctccggatctaccccggcctcgtcgccctactgcgcgctcctccgcgccgcgctcttcggccccaccacgcccgaccgggtggcgtcgtcggcgtccgcgtgctcctcctcctcctccgccggggcgtcgcccgtgggctcacccgccaccggcaacatattcaggttcaaggcggaggtgccccggaatgctaagcgcgcccttttctccgacggggacgacgagggcgtgctcttccccggggtgttcacgacgaggggcactggccccaggaagatccctaggtcaccttataaggtgagaagtgttcgccttcgatttcatagtttctttcaattgatatggtctgtttcttgattgatgtttctttgaattgagaaaaacatggtctttattattcatctgctctgtaccaagaatcctgtgttatttgtcatgcataaagagactgatatgaaagcttattactcaaaatctcacatgaattttccttctgttgctcttaggtgctggatgctcccgcattgcaggatgacttctacctgaaccttgtggattggtcttcgcataatatccttgcagttggattggggaattgtgtctacttatggaatgcatgcagcagcaaggtgagccaactgcggccatccatgcgcattcttgtttgggtacttgaagagggtttgtaaagaagtttattgctgtgcaggtcaccaagctatgtgatttgggggtggatgacaatgtctgttcagtgggttgggcacagcgtggcactcaccttgctgtagggacaaaccaaggcaaagttcaggttagacgtatgcccctttctgaaatgatcagataacatagtcatgatccaccaaaatttggaacgatgccttagcttaatctttatctagagtgtcaatggaaacattgagaagtatacaactcacttatggaaagatcagaaaaattgcaatactattaacagtggacctaatttttcgcacaaataatatatgatagacgcagtagagttttatgactaaactgaatgactttcatttttactccaaagaatgaatttggtccattgtaatctctgtttacaaatgtgctgtagtatttgatgattatcgattaatcctgttgagctctgaaattggtatgcaatgctacaatttcaatttggtgtctgactgtcaccttggattttatcttatttaggtatgggatgccactcgttgtaagagaataagaaccatggaaagccatcggatgcgagtaggtgctcttgcatggaattcatcattgctttcgtcaggcagtcgtgacaagagcatccttcaccatgatatccgtgcccaggatgattatattagtagacttgctgggcataaatcggaggtgatctattttatacatcattatgaattttccgacatgtcagattcttggattatcctattgtgctcccttttgatatattcttataatatgcatattctgtttccaaacacctttcaggtctgtgggctcaagtggtcttatgataaccgtcagcttgcatctggtggtaatgacaacagagtaagaatgcatccatgaattgtttcttgattggatcattggtattacatggaattcaaggttgcaatttcttatgtccatatcaatgtctcttttccagctttatgtatggaatcaacactcggcgcacccggtactgaagtatactgagcatacagcagctgtcaaagctattgcgtggtcacctcatcttcatgggctgcttgcatctggtggaggaactgcagatagatgcatacgattttggaataccaccacgaatatgcacttaaattgcgtcgacacaggcagtcaggtattttgctacacatctaatttctttagtgattgtgcagcccatgtttatagttctgaactttaatgaactcttgtttattctatttatagtaccatattaaataccgtggtatatggtatgtgaaataagcatgataactctcaatctttggacgcacttaaaaaattgaacatttctttagtcatgtcagttccgaaaagtaagaaatgtaggctgagctctattttcaatagtgaagttctatttcttgttttcatatctgaaaccttcacagaaatgccatgtcattaagactgtagagttaagcatattgttttttggtatgtactgaggacgctgagtgaatcttgaataggtctgtaatcttgtatggtcaaagaatgttaatgagcttgttagcactcatggatattctcaaaatcagataattgtttggcgatacccaacaatgtcaaaggtatgcttgcaagcttattcttaactcagtacgctttacctttttcttgtattaattgtgctcgatttctcctttgtagctcgccacattgacaggccatacatatagggtattatatttagccatctccccagatggacaggtgaagttatctcttgagtctttgaatctactgaattctgtttattgtatctagaatattttggcatagctgtgtttttgacattttatgtcaacagactatagtaactggcgctggtgatgaaacgcttcggttttggaacgtgtttccatctcccaagtcccaggtaccttttttaaaaatagtataattggtccttatttcaatttgaatgaaatttcactttcatatatagcttctaaataataattggtccttcaattacagagttctgacagcctaagtagcatcggggccacatcatttgttaggagctacatccggtgacactgagatgtggtaatctaataacacttggctcataagtcataacactactgcagcagagtgttgatgatcatcaatatcattccatttgtaccacttgcatcaccagttcatgaaccatcaaacctagccaaattttagagatagtaggatgcagaatggtgaaactggctcgcagacctcggagtggctcatttgctgaatgctgtatatatttattcattggctttgtaggagcgaagatggcaaacactgaccatccgcaatgtaccattgataagttcacggcctcctgtttttgtttttgctgagtcaacttggagctggagctcttatgtataccatgctagggcttaacaacattggccaactcatgatgctcattgcatccaagttggaatatgctaaggaagctggagaatttctggtgcaatgtcctattccagctggtgttgtttcttgcactgttgcacttctctgatagttctggtagactaggctcagaatcgagccagtcttgctactatgcgtctatgccaacgcggcaactttgtactgatctatgtcaactgttcatgcaagatttatgacgccaatgtattgagttgagttatcgtcatggagcttcattgctatactgtttattccactggtgccatgcttcaggttgacgtaattcattcgtatgtatgggctccacttctcttttgtggactatgtcaactcgcttatgatgatcctatcgcaattagtttccaactctccatcattcattacagacataatgttgaggcttgctgaaaacgtatcctgaagttaagttcagacttcagtcatacttatatttaaaaaacacacagacaagataaaacttgtctcctttatattgacagaggctattcaatcctggagttcagacttcagtcataccatatctagggtatgtttagttcatgtcaaaattggaagtttgattgaaattggaatgatgtgacggaaaagttgaaagtttgtgtgtgtagaaaagttttgatgtgatgaaaaagttgtaagtttgaataaaaattttggatctaaactcggccctaaagaaacgacacaaaacttgtctcccttgcattgacatagccacataggctattcatgcctgaaaagcagatgcgtgcaaattcactaggactagttactagaactatagaagctaatcagttagttgtaaatcaaccgaattacagaacagggcacctgaagtagctcgatgcaatcattatcctctccatattgtgattcgttggagtctaattggttctggttcaatgtcgtaatcagggcagtacagcctcttggaaaggcataacgaagatgggattatctgattagctgctagtaggtcctgatgaacacccatatctgaggttagcaaaatgtacttgcaagttggaacacagtatacaactaactatattccgccaccttttgaaggtgcgttggattgggccaacagagaaccactccagcaagtttcaatcaccaactactctttgatttctctcccttttctccttgtattctattgtattgtaggcctactctctcagtctctcttgctccatgaaacgtccaagagcttcttatgtacttacttttttttttttggataattgaaaatgtatcacatcttcggtatctccggtttctgccgttggacacagccaataatcttagaactagaaaaataaataaggttatgggatccttatgtacttgcagtgcattaacatgaatatatttttttttccttttcggatggtctcactcagagaagtggttaatgtgaacaatcatgcatgttcaagatgtgcgcgattgttcagaaaccgtgtaatttgcccttggcgacagggaccttgttcctttccttttcattttaactgcaaccctctcttgtcgaagtggtcctccatcgaacgtgtgacctcttatcttagaaagataagcagcctatcgtgattccttctccatgaaacatgtttttcagcaaacagtggcaagcccatcatatctgcatatgtgaccgaaagaaagaaagctagaaaaacacgtttttcagcaaacagtgcgcgaagcgatcatatcatcgaaattagcatgtgtgatatcgcaacttcttcttcttttagagacgaagacgcaagcaacaaccagggcacgaatcgtcttgtcgtacgtcgaactaacacaggaggctgcaactgcaatgatgctgcaggcaatcgccatgaacgggcagacagtttcaggcgaagagcaagaagacgcagaaacgaatgcagtttttttttttcttctctgggccgatgggacaatgcatggtcgagttgaggcccagaagaagtagcgtgaaagcccggcaagaagatgatcaaagagacaagagaagaagattagagaaagaaagaaagaaaaatgggatagataatgcctgtaggtggaccaaccaaccgattgggacccttctacgccctctccaaccgacgcctctctcaccaaccgaaattattatttctccaccatttttggtgctcgatcctctcctcccaatcaaaataccctcctctactctaacaagcatacgcttccatacagatggtgccaatttttatacagatgaaacaaagtcagattaactgttgcaaaacatggtacagtgctggatacccttttgtctagcaaatgatcgttttcagtgaagttttcatcaggtgtgtggaagtccattggatggtgtaattgtcaaagcaagtaaagcgatcgatctctgaatgtcatggctcgttttttatatccaaaaactacgattgatgaacttggaagtaaccttgttgtactacatcaaaacagttgttctaccaaatggaggtgaaatttcagcacaccaagaaatacttcgtgtcacatccctctccggccgtctcttccctgctaggagtttttatttttttcctttgagctttcgctttaaaaactttgctttccgtaaagcttcaggtcctactatccaaatctggaagactgtattaaaagaagcctgtaatgctcctttcgtcttgcacacaaattttcccatgcaaccaaagtctactgctttattcttgtttttttttctcttcttctttccctcgtgtcttgtcctctcttttggtgcctttctgactcctttggagtgtgtagaagcgtacacactaactaatctgttgcggccaccgttttgtgccatttgtctgcctcaaatgttagcaccagcactaactaatcagttcagcattttattaactaaaagcacatactccatactgttgaaatctgccgaaatggcttatcacaatgcagagctactagtgaaattggaaacaaacgatgagcttatgagccagaaagaagcaaaactgtccggcctgaagcagaagctaggagtaactcttatcaagaagcatcaccgttggggccaatcagagtggatatgtattttgcaacgagggaggggaggcccccgcacgggaggattgcatttcgtacgacggagcgacgtggacgcgaacgtttccccgcaagattcgattgctcgtcgacagtgactcggcctggaaaatacagggaaaagcttggtgtagctatcagcatgtacgtcccagaagtatacaggactcatcgtagaataaataatagtcagccggggtcgagaatgtcttgtacgtgctcccctctgttactcgtggcagtctctctacagccaaagcaagatgcactactctattccctacagtatagcacctccccgattgagcgcaacgacggtttcgatcaaatttactgttttaaatttgaattctcgaaaaacattcaaaatttcgctcggaatctactttcagcccctgtttgagagagcttctagcttcagcagcttttcctaaaatcagaagctcctccaaacagtccattttgatttttgagaagttgcagttgtataataaaaaaaatgaaaagctagaaactaataaacctagcatttttaaattttcaaaagctatctccaacccgttgcttcttataatcttaagcttctcaaacaggccattcatcccgcatgagaacctaaaaaatttcacagttattgatcggtttttagtcgaaaatacgagcactatttatggttcccatgacggaacaatggaaggagtagtacataatcagtgtgttgaaaaactggtccgcgtgcaacggcaagatttgcattgcgggcaggcggcagcgggcgtggagagaggcgcgtgtgggagagcagcgcaccgacaggtttaagcccgcgcgacagctaggccgtaggccgtgggcgccgcgtcgctgtcgcggatccaactccccaagcagccaagccccgcgcggcgttccgcgtaatcccattcccgcctcgtctcgtggtctcgcgccgtatcgttcgtatcgtgcgttgccgtgccgcgcggccgaccgcaacggcggaagcaatgccttctctccgtatcgcgcggtcgtgccgtgcgtgcgtggaccagcagcagcaggctcgcgctgggtcgcgcacgcgggcagctcgcccaaccaccggcgcggcggctgcgcggcccttctcccaccgcccccactcccccaccgtgtcgcgcgcgtcccccccagccgacggaatattttgtactttcccgatccgcttccgcgacttgggccctgtacgatatcccaccacttctctctcccccaatctaataatcctgcatctcaataacatatcatatccatgattatcattactccgtctctgcatcttgtggatacgagtactacgtagtacgcagtagtatgtagttttgtacagtcgtgccagcgatacgctcctttcctgtagcactttccaaagacgtacggtgccttttcctgtatgctactactggtagagtacgtcggctgggaccggactgcatctgcgtgcttttgtttcccggacttagtccaagattctgctacctattccatttgatttttggcaaaacttggctaaagaagatggacactacaaactgttgttaggatcgggataatagttagtattgttttgcttaaagtaatatcgtatcatagaatcatatcgtagtattgggataccatgagatttttttaagtttaattaatatttatattaattctatatagccattctatataaaaaaatatagtaatgatgtatgtcatgcaaatatagacacttatcaagagaaaccacgttggttttgatatatttaactgattaaatttgaacatatttatttgcattatttttaaaccatgttattttaaatattattttatattatcgtagggattgtaaaattggaaaaccacgtaagatttcgtatgatcgtatagtaatgaatagtaagatcgagatactatcaaaattaaaatactatatgggatcgatatcgtttcgatttggtaggatcacaccactataagatattaggatacgaatcgggatactggtagttaagtaacaaactcaagtcgctaatccaggccggtcgagctaatctcctgctccctgagcccacagtttttaatgggaaataacgaaagaggatgaattaattttatggctctatatatcttgttacaccaatcttaaataaagaaatgtattatatagctaaaagctgcttagaaaggcacatgtgttttgttcatttgtcatgtctgtccactaaagaaaacttaaaagtggacaaggtggttgtgttgctgctagctattaagtactacttcttcctctgcttctcattaaaaagatcgattttgtgcacgaattggtaaggaaaaagagttaataataaccgatgcaagcaaaagaaatggagtcatatatgcatggatttagtcagagaggtagagaccggcaagggagaggttcgttaattggacgggcggggcaaggaggccatcagggctaagagcaggtacaatagcaaactataagctagctataaacacatatcgaaaaaataaataatgaaagagaaaagcagcgaactacagcacaaagacacaggtaggaccaaatattactagtggagtagagtatatatttataggtaagtataatataaatatattaattaactatgaaattgactatatatagtttagaactagtagttggtactgctcttaagcattaatataccaacatgcccaacaaccagcgatctatagtaatcttgtgcaaaacgtgtgggcataatcatcgtcaagggtgaccaaaagtacacgtacaaacccgatcaaatccgagtctttgactgacctgcatgcatgatcaggctgcaaagctacccctgccggctccgccgtccggccgccgctgccgtgattaattaaccgcgcctagcccatggtaacttattaacatctctagtcaactactaactccaaatcatctagagccaatataataataaattcatacaataattgcttactatactattaatatttagtcccacctattatacacacgctacgttttgaagttcgtgctacagctgactacagattctatagcccgctgctattctctcttttttttatctctttaaactatgtttatagctggcttaatattctgttatcgtacttgctctcagctgcgaactactaatgttaatgtacttaccttacatcatttagctggctcgggggctcggttcaaacttgctctgaatggtctatttttttcttttaaaattaaaaatatttaattttgtatggaaggtgttttcaccctgcctcagctcgttatgaaacaaaatagtaaaaaaaaagtaaatcatgattttgttttcgaagaaagcttgataaaaatctgattagcttccacccacccctcgatttagaattaaattgggtttgatccctcatggggatgttctctcattatttgcatataatatatcactccacaaacatgcaagttcatattcaacttctatatcttgtaaaaaaaccaaatttgattatgaatatacgttaactacttatagtttaatttgttttttcgttgcgagatgtataagatgaatttgaacttgcacgtttatggcctgtgatatatcacatgctattaatatatcttcttatttttaaaaaaaaatttaataactatttaagtgatatcaaacaacgagagaacatcctctcgatggattaaaatagtttctcttaaattggcaggttgtatacaatgctattttttttcattgttaaactcgaggaaatcaccactgatagggagtacaaagaccaaacgtggaattaatttggaaaattttcttcaggattaattaatggaagacggcagttggcaaatcaagaggcacaagagactaccagagcgaacaactataacaactactaccagctgctactgctgacaatgcaagcatctcttgatctgatacgcctgcaggccggctgcagctgatacgcgatgggagtacgtacgactgaatgaagctagctagctagttaatggctggagagaggcaatctaacttgaaacataatggacaagctaggtagcatgatctacgttaatgctgttctgagaggtgtatgtacggtacggattaattaattaactgatgatctcttgagcatgatcatgtagtgcagtgcagcctaagctagagttgatcgatctctgaccaataagagtcgttgctggacgcttaattcccaaacaaaccagcaatcgtatgatatattcgtagtactattcatgtttatttttgcccaaacaaactaagttaattagtatatatatatatgattcagtatgactacgcgtcctcataagagaaaataaaacatagcgaatatattaaagttgcagtaaccctaaacagcaggcagcatgcatgtcattatccttttgttaagatatgataaagacaaggctacagaagacgggcccgtcataccatgggcgattatatatacaacagctgtcaaaagtatgcctaaccaataccattattatactgctgagcagtacgtacgatcgattaaaggcgttgatctccctactaatacgctgattgattacgtactactaatactaacaaagcatgcactcaccctgcagctatagcaggggaaagccaataatggagacgacgaccaacagcagcagaagcaggagcagctaagctagctagccagcagaagcccattcccgacgccaaccgcaaagttggtagaggcaaccgaaactcccaaacaccaccaaaggtatttcctttcttgaaaccaactcctaattattcacgcaccaaattacaaggagaacaacaagctaagccaggattaggttagctatctaggttagtttacaggaagaacaaactccccggcctattcctgtacatgatcattgacacttcatcggttgtattcaacaattaattgaactccagatactatatatatggtatgtaatatgtataatcctgaaccatcgctgaccgaaacatgaggaattgttaacgacagcaacatacacatatatataattcgtgcatgcgattctcgtttctcaatcagcttcaaaccgactgttgttaagtttgatctaaaatattgaaaaaagaaagaaagaaaggaaagaatgatccatgcaaaagctaagatgaaagctcctatgtacgatcgattctaccgcctttggagcacagcatgcatatagtgcaattcggtaggcaccttttcttaggtttggacatgcttaattagattccaaaaccacctcaccctcctcgtccaccttcttcttccacctatcctagctagcttattacaacctactgtttcggttccaatgacatgatctccaaaatacatctttgattaatttcttttatctatattgtatataataaataaatatattttttgcttttattattaatattttgttagacaaaattatatatgttctcttagtgtctttatttttaatatttttaaagttactgataatcgcacttctaaatatttaatcctaatcttgttcaaaacattaagaattatgaaatcggaagagttaagttagagcgagcgagctagctttttcccagctctatcctctcgtggacacaccttctctctcatcgtgctggattaatatattcttctccatgctttagcatccaagctccagtttcaccgagctaaggtagggggaagggaattgaattgaaggttcttgggtgctttcttttccagttacctcccaccttaggaaccctcgaaaagacccctcaccatctcctttgtgtccttgctaaccaactccccattaaatccctctccgcgcgccttctcgctggccattagagctagctagcgagagctctagctacagctatacatacgtgtacccaacggccacggtcacccgcgcgagcgagcacgcgcaccaaccgatcgagcccaacaagctcgctcgctcttggtgcgcgcgcgcgcggcgagttcgatcgatcggtgtatacgcgtatcgtgttgtgtatgcaaggcggtgatcacggaggcatggagatgggcgtggggtcgttcaccggcggcggaggaggcggggagtgctcgtcgtcgtcggcgacggcggcggctgctgcggcggctgcggcggcggcggcggcggcggaggcggaggagcggcagctgctcaagggggagatcgcggtgcacccgctgtgcgagcagctggtggcggcgcacgtgggctgcctgcgcgtggcgacgcccatcgaccacctcccgctgatcgacgcgcagctcgcgcagtccagcggcctcctccactcctacgccgcgcaccaccgccccttcctctccccccacgacaagcaggagctcgactccttcctcgtacgcatctatttaatttcttcctgagttcgatgcgccatgcttgattaatttcactaggttgaatttaatctttgcatttgtgcatgcatgcatacattacatgcaagtatcataccgtacgcactagctacatgattaactagaagctatccagccaagctaactgtatatatgcatactgaaatgatcgatgcaggcgcagtacatgatgctgctgtgctcgttcagggagcagctgcagcagcacgtccgggtgcacgccgtggaggccgtcatggcgtgccgcgagatcgagcaatccttgcaggacctaaccggtaattaactactacagtatcatacatgcattacatattttccactatatattacatatttcattactttccctctccttctcgccgccttcttttctgtatttttttttcgatttccatggtgtcgtctttatgatttttgttcacctttttgctcttctcgttagttagattagatggtgaaattgtttttttttagttcgttgccgctagctcttgcagtgatatattagttgcagcgtcttgttcaaacatatatatggtctcttgattccctctcaacagatttgcatgccttgacttctaaggttccggtttctacaggtgtattcagaggagattagttaaatatgaaaactctaacacacgtacctaacagcgactttattgctgatgtttatactcgaatcaatggaatgataaataacacggaattaccaaggcccacatagatggcagcccgtatactagggaaagcccagaagcccaacggtagatgtcacgaaaacaatttcagatattcctttttagcataaaatccttccagttcaaaaacaagggcaccaatttttttttataatcattttgtgttattaacagagaatagcatagtcaaggtttctaaggcctatatatatatatatgtgtacgtagttagacgtgatacccttggtaaaattaacttaatcagttcatatatatactgatatgaggtgactagctagctatttttcttcttttctcacaaagtctcaattggaggtttatgatcagttgaaataaaaaaaattccaacaacaaaatttgaaccaactatttggcataaatctaatgaaactatcctttgctaagagaaccatgggttggatatatacatccttattagtgtagaggctggatattaatctgttatctaagaaaacaatccatgaacttataaaatgcatttagccatctccggcgcagatcaagcgctgccattcggtcatggccgattggttggttggttgctagctagcgagaaatcgctgagaggatattgaaaagctagtaggtagtgtaacagctacctaagccttatttggagagctttgagattttaggaagcatagctagttagtagtcaatcactcaattggtgagaatatggaaaaaaataggttttctaactttaaacttctagttcattttttaaattcaataactataatttcttagaatctagatgaaaatttaaactgtttgaaaaaaaaggttatataaaagaagctacgactatcaaaagctccctcaaacagaatctaggttacatgaaagtcatctaggttccatgctaatcctggctcggagttgaaagtccatgcctctcgtctaatcgactagctaattaaatgattcaggtgcttcgcttctgtcgaataatatatatcacacacgaccatggaaagtggaaggtgtgtcacatgacatgatatgaccggccgatcgagctcttggcgatcgtcctcttatcatgaggggcatcgtcataatcatgatgcatcgattgggattcaactatagtagtcattgcatattcaaaaagcatcagggttgatgtaatgtaactgaagaaaaacacccatgatgattggcgaaatagatgttgaaaacttagcatgcgcatacatacgtaaacttcaattgtaggtagagaaaaattacatttcacctgtaaattaggacactgggaagttgttaaattactagtccactcttttgacctggattctaaggttctttataggttgaatttttatttttattttttattttggtgtgtgtgcgcgcgcgcgcttcagttggttttggttgctttagagcataacatcaaagccatgctactttaaaaaaactataataataataataataataataataataataataataataataataataataataataataataataataataataataataataataataataataataataataataataataataataataataataataataataataataataataataagaagaagaagaagaagaagaagaagaagaaataaagacgaagatcgaattggagctataatatgctaacttatctagctaggcagttcaaagtacactggtagctagctagtagttcctgcgagctgtttcatgcaggcaatgcagctggcgagagctgcatatgcaaaactccaaatcagagacatcttttcgattgggtagctttcaagctgtttcaagtggccatgcgcatagctcgtacaactgtctatctctgctcgatctcacacgttccagttcatgcagctcgatcgatcgccgacgtcgacaaagccctcatgcatgcctccgtactgcatgcatgccctagctaattagctctaactcactgtgtagcacaatctagattgaatataaccgacaaactttgctagctactagctcttctttttcatgttattatacttgcttcaagctaatctttaatttttcatgttattagatataggaataactaatcaaataaattaaagaaataggacagttacaagagatgtgatcatcaattaattaactacagtagttgatttacacttacctggatgcatatgcaattgatcatcaggtgcaactttggaggaagggacaggggcgaccatgtcggaggacgaggatgagacggcgccgatgctggagggcccgatggatatgggctcggacgggcacgacctcatgggcttcggcccgctcatgcccaccgactccgagcgatccctcatggagcgggtcaggcaagagctcaagattgagctcaagcaggtacatgcatgcattgttattaatttcttcttacgtcttgcatgcacctacattcgtctcttcaactcatgcatgcatatatcttatcaatgtttaagcgtgttcatttaacatgcttaaacattgataagagactgttcatgcaaggatcatgccgagctagctaaaatagtactactgctgctagctagctgctttttagggcaaaaacagtgcatgatcagcttaaatgagctagttactagcatgaaaatctccttcttaagttccttgtactgtgtcatagaatactttgactgaagactgagcctagatcattgcatatcatattaattggtgtcatgtttgatgcggcgcctcagctatatatgtgactgacaataactgactaagactagctacttctggatgcatgcatgctattgctagttcttcaatcagttcctaaattaattatattggattatgtaattaactagagggtgatacgtacttttgcaatcttatctctgattaaattattaaattcgttacagggcttcaagtcaaggattgaggatgtgagagaagaaatattgaggaagaggagggcaggaaagttgcctggggacaccaccaccatactcaagcaatggtggcagcaacactccaagtggccataccccacggtgagtacattgtacctatcaagcatgcttgcaagagtgcaactaactagctactagtcgagatagcccttcttagctgttctccaacttgttgatcaatatatcttgatgtgctaactttacaattaatatttatatataatatagcaagaagcaataatatttattaattagctaatcagatatgcacgaagaattgcatggatataatacagttggttgagtggcatatatattttcttggtacaggaggatgataaggcaaagcttgttgaagagactggcctgcagctcaagcaaatcaacaactggttcatcaatcagagaaagcgtaactggcacaacaactcacagacatcaacccttaaatcaaagcgtaaaaggtaaacaaaccgttatccaagtattttatccacagtaatacaatgttgatgtttcagtaattaacaactgaattataacacaaacttcttttttctatatgtaatacaggtaaagggcagaaaaaaatgtatacctgacgtactcgctaatcaaatcaaaagaagacatggtgactcataagtaataagatcatcttaaattgtatatctagttattaattagtcagaggtgacaaattcatgacatacatactagtctgaccactggcatatgcgttgtaatttttgagcagatatgctcaagcaaattcttcttgttggtatagtttttaattttgttgtcgtgggtgtacctgcatgcatacataaccccaagactaattcatttgctgtgcatatacattgaccattctataaccttctgctagtcaaataatcaaaaagcgcacgccattgcaatccagcattaattcaactgcgtttatggatggaacggaatctctatctatatttgtgggccttgtatcaagtagtagcaggtatgccaaactggagttggactattggtgattaattggacaattaggcctaaccaacaccacaagacaaattaaggctggcactagcctctcatgataatcccgaaaatttccggcgtatatgcgagagcccttccagcaagccagcagggacacaagaccaaccatatatatattcacgtttctgttttttagtgtgtggttagtgatagttttgcatcgtcttcctcattagtatgtggcttaacatcttccagataatcgctgtgctgattgtcaaatattccaatcaattaaggctggagctagtgcacggctagctacgtctcaaccagaacggacaactccgttgagacctcactgtctcggaagacgctgcacgttggttccctgaagattggcagcgaaaaacagcacccataatccatatagaggttgctatccagctactcatgtccaaaatctataaagcaaccaaacatatactgatcgtaaattcaaagttctggtgaaaaaaaaaaagtatctgatgcgtcaatctgtgttgctctcagacgtaatattcagagattcagacataacacgggtcacatacaagctccagttgttgattgttcgttgtagacaagcaacaatctacacaggcaatgttatcaccaaattctgataaaaagttccaaatctaagttgacatttcatggcgatcctttattcagagaagaacgtattcaagaatgatcaacacggggagctgataatttctacgaaacgggttcacagtataccacacccggaggaatccaaattatgtttgcagtttaccacccagaccagtcacagatcgattaatatatcgacatcacctataataacactacaaccaccctaatgtttacattgttcacaatataccgatttcgtcacaaagacatatctccaatttctgcatttcctttacttgccgtagtaaccttgtggaggagggtaggagccctgaggcgggtaggaaccaggtgggggataagagccagggggagggtatgcaccaccctgggggtaacctgccggagggtaagcagctggtggataaccttgagcaggcggagcaggaggatagccaccataaggctgaccgtatgctggctgttgtggtgtgtacccaacaggaggtggaataggctgatcgatgcgcgacatttgctgcattggaggcactgccatgggctgtgggccgaacttcccatctctcttgtccatttcaattttgtgttgggtctgcacatgcatttcagtggataagatggatacgcaaaggttaagaagagtgagtaaataatcaccaaagatattatgtatgtttacctgcatacaggcgcaaaccctgcaaaaaaaaaatggtgcacaggtcacaagattatcaacattgggggacttaactatggagaagagaaaataacagagttatgagagcttacgagcagtagaccatatcagacaagcaggaaaggatttgggaagcctctgaaagctcttcactaccaacaatagcggcaactatagagaagatacaagcaatttgttggaggcagaacatgaagccctacaggaaaagagtgatcttctgcagtgttatagtctcatagaaagggaacataggaattatacctaaaagttagtaaaacaaacaacaagaggacagtgacagtacaatgatgcagttatcgcatttagttgtctgtatgttgaattcatcttggagcaagaagcgggttgaagcaactgaattaccaaagcacagaaacacctgaaaaataaagtactagttagttctaaggtaagcacaaaaatagcataattaaaggaatagtgacagtattggagattactccattcaagacaagcattacatgttcccgttctaatctgagatatatacgattgatcaaacaagataacaacaaaatacagccaaattatccttaccccagaatcattgaccctggtgctctttcattgaaaaaagaagaacagaaaaaatattgtcatactgaactgtatttcagactatcagaaataccatgaaaagcatgctttttgagcacaacaaatatgtgaaatccagaaatcagtagaaaatataggtaatcaaatattacagaaggaaccatcaatactccttttctttagcaaggggtggccaccactttccccccccccccaaaaaaaaaaataaataaataaataaataatcatattaccggaaatggaacagtctttacaggctgattacaaagccagatagcaaagaaaagaaatataaaaaccatcaatactcatagccacatgagaactgttacatgtgacatgctgcctataaattcagcctaatcagtcatcaaaaggttatcagcaaaaaagggaatggatcttgtacctcagtagcaagacagaactctgggcatcggctttcaccacacttcccactgcatggcatgtacccagcacagcagacatatctacaagacagaggtgcaggggaatggattcagggaggtctaacacaatgttcgtatctaaccatagcaagtagaagaaaatagaagaaaccccaccttgacatgtcattatacagagcccttttgcgaagcatgtatgacacacatggtccactgaacagaaaggggggaatgtaaaagatcaaatactgggtaaaaaattaacatttctaaatgctaattctgcctactcaaagacaccacagaatatcattgtacagattaatgaaacacgactccgtttaaatgcaatgcctgtggaaaagcagagtacccagaagactaaaatcttttttgtggatagctattgatgataaggtgacatggtccagaatgagcttgagggcgggaacttaaacaagaaatagaactagacaaatgaaaggactaccatatatgctctcaacgcattttattgcaattcttatggaatgtacaaacactggcaccaatgtggattcaaaagatatctttcttttagggcctgcaggtactgaatgggctttgtggatccatcacgctgatagtatcttatcgaatatcccgtattaccccatatgggtcattgcgatagagacaaaatgcctttgccttgcggctgcagaggaaagtaatgctggtcgaggaggtgactagggaaatcaggaaagcattgcatgaaaatcaaagaacctatgcggtgactgctcattgacgctgctgatgcttgaagctaatggagctgtctttaaaacgacaaacttcagtttagttcctatccaggaaccgttttacttttgccattatgagaactttgaagcgtaatgttgaacaaaatatattacatgaaacagtaatgtgtcatcctggatctgattcctgaggccaatctaaattccgcggtcctttcagtaataaagaataaaaggaactgacaaaggtgcaacgcgtcccttaatgtcgcaatgtattcctcgcacctaaaatccgatcaaatttaagaatgcaaacaagcgcataataaacaggcattaagaatctaggcaatctccacggctgcgagtgattgaacaactcaatgcggaatcacacattgtccttatgctcatcagacttagaattccttaaaccctagtttaattcagaaataaaaagacagattcgcccagatctagaagaaaaggggggcgtcgaatatatcaggtcggggtaaaaaaaaatggagccggggagatcgacgaggatcgcttaccaccagagcgcgaggcagcaatctgcatcagcagcagcaacaacgacagggagaacccatcagaacgaaatctcgccatgggaaggcgcagtattagcattcgcagagaggggggaaaaagaaaagttgacatacatgggaagtcggcctggatggtgctggtgagatcggagtgccagaggttgcggtagctctggcggagctgcatcttgtcgaggttggcctgcgacgacgccatcgcctcctcctcctcctccccgccgccggcggcctgcacgaggggatggatcggccgtggactctgcgggagatgtggggggggggggtgtgggatcccccttgcaccaagccactatccttctctctctctctttttggggcgcgggggaggaggggaaaagaggggaggaaaacgacggtgtttcggtggggtttcggccgttggatcgggtccgatttgtgcggcctcgttaactgatggccatggcccgccggtcaacgaggcggagtcgtccaaagtttttccccaattttcttttcttttttttcccttggttgtagagtgttttggacgtgatcgaccgaggtaatggacggcacgaacgacgacggcttgcacagacggcgggtgaccggccccggcgacaacgatgcgagtccatttggttcgtcgccactcgccaagccagcaaggtgcaggcgtgcagctagagcggatctgcggagacggggtggggtttacggaacacgacgagcgacccaacgatccaaaagtgacaaaacgtggaatgtaagactgggcctcatagtctatcagctgggctagatggtagtgggccttgatgggttccatgctgttggtatgtcgtaaggcggaataagtccacatggcaaccctcacctttacgctgagtttaatttacaaaccctatccgtaatgccagaaatattaaactttcagcttgcaaacccgattaaattagatccttcactcgcgctgttgatgggtggtttcgctgacgtggcaagttgacccggtttactcgtgctgactagctgtttacgtgacaaaacaaaagtgggtctcacatgtctccattcttatctctccctcctcatcctccccacccctactctcctacggcattggcagtgacggtggctggtccctcggacgcatttctccatcctctgcaacgacaccacccccgctcactaagaaccctatcctcgtcaaggtctaccaatggtagcgacaagcaacatatataccacggaataagtccactttaacttccttaactagcaatcgaatctgttttgtatccctaaaccataataccgaatatctcgaccaccccccaactattaaaaccagtgtaatttgattccctcggcggagtccatgccttctactttaccctacgatggagtccatgggtggcgatgacacgacaaggttggcgcagcctggttgcgaagtcatcggggagctggagatctcccctccgaccctctccctcatcttgttgttgcccaccacggcgccacccctgtcactcgtccatcgagaggcccttcatgtgacggagcatagggggataagagcggggagagatggcgtcggcatcgacctcgtcgaccatgtctctaccgcttccttcgtgatcaccgttgtgggctccccttcaccgcttcgaccctcacttgcctgtcaccgccgctgctccagccaaaaggaaagagaaagggaagagaaaagagaaagagagaagggagagagggatgaggaagaaaggatgtgggcccacatatcagtgggtcccacaaatgttttttttgtgtgaatgataaatgggtcccacgtatatgtttttaattctagtgccacataaacgctacgtgggactaagacagatcgacactgtcacgtaggagccacgtcagtgaaaccgccgagagtgtatcaggaattgtggtttaagaatgcgaatcagatttagccattagttaagggagtcagagtgaacttcttcctatactccacaaatgtgcctccgctttcccttcgtctcctgacatcggactgaacatttgatggtcctgttaaactgagcacaaggcacgatccagtccagtgaggatttaaattgattatcctttatttcctgggccaggcttatcttacaggatggaaagacgaggaacttttttattttatttttattaaaatatttataaaaatgttttattttacatatttaaattgatcatggtgtgcttcctccattaggtcctgtttagctctcaccccaaatttttttcaccatgtcacatcgaacgtttaacactttaagaagtattaaatatatgcttaaaaaataactaattgcacatattacgactgatttgcaagacgaatcttttaagcctaattgctccatgatttaataatatggtgctacagtaaacatgtgttaatgatggattaattaggcttaataaattcgtctcgcggtttaccgacggattctgtaattagtttttttacagtgtccgaacaccttatgcaacaccatatataatacctgatgtgacacgccaaaactttacaccctggatctaaacaccccctaaataggaaaccctagccaccagagtgctagcaatgtagagtttaatccagcccaggatatacttgatggtgcaataaaaaaggggggcctccgatgcaaaggtggattctcgatctcgaccgtacataagagatcgaacggatagtcaagcacgttgtatggacgattcgcaggggaataggggatacggcagatcaattcgtaaggagatcgactctgatcgaaggcggtacataacagtactgtagtcatacgaacggaatgtgcgaactatggaagaaacgatggggaaatacacggccatatggcggccatggtcgctgtcgtatgatcgagctgagctcacgcgagggaggaaatcgtacgggcggccatggcggcatcggcatgtgacctcatcacctgaaacggccgagctccgcctctactcactgcatgccgcgaaatatcaaagcagtgacgtcgctgctcgcaccgcaataatttggaattgttgccaacttttttcccatggctgatcccgtcattcaaatctgtacaatatgatattatgatttgcttgcaggatacagtacgtctttctggtgtcatatctaattaatcacacgtgatcggagagatgtgtactcgacaattcaaatgcataacacaaattgatatgttgctgccatctttggcttgacaggatcatgtgctcaatagcttgcagtggtgatgaacaaaccagctgctggccgttaattcggtttggggcacacgtgagaattggttgggggtaggcaagcaacagaggtgctgtcaggagaaaggggattaacgataagaagctagattcggattaatcctaatcacaatctttcaagggctacaattaaaggccctgctttacacggaaaaggagtcttctggttaactcatgccggagatttgagtggtaagtggattagcccgtgacgatgaggagatcaggagaagtcaaaaggcaaagagataaagatgtgacacaaggcgcactggttttagaatttaagttggggtgacgtgggattgtcttatcctctaatcaccctccaattggactcatacaaagcaaatatctggcctaccctgtaaaaataaaaaccctctcttcttttttttttgagcatttagctagcctatcctgtattttcaacttgcttatataaaaacaaacttgagtgcatcattggcacgtggaacggccggtttgtatgtagtggtactctacgaatttacaacagctgggttcagagtttgcagcatttattatagacagcgtggcatccatacaatccacaattgacacctatttgcagttgtcccgtgctcaaagatatgatgaactcacaaacaacagcaggttgtacaattaacagcgagtgttgcaattagctcaacctagaagctccagctcttgcacgtgaatatatttgcatagagtccaaattttgaccggaggaaaagtaatgcgtgaaggaaagaccagcaatactagtagtggggtaggttctgattactgaaaggccctaaacgagtaaacgacagctcccggtcaaactcaaaccaacaacgaaggagagagaacgaaaaaaactcccgttgtgatcatcagcggaaacttctccatggtttgtcaaacaagaaacatgatcagatcaccatcagaagcttcttggcgttttgtcaaacaagcaacagttgctcgtgattccgtcaccaagattctcttaaatattcagtcgtcaactgatcgaaatccatcgttctgatttctgaaaccagaatgccagaaacacgcagagggcacacgcaacaaacaaacccacggttaattcgagaagaataccctgatattgcaattaaccgagatgctcccgggccaaacaattcagagtttcagacgcaggcagcagtgctgctacctggcagaaagctcgccttggaagtgttgatctggtcagcagctatactcaactcagccagacaagccgtccaagactctccaaggggtcaggtcccagcactcaaaacccgtgagaatcctcgtaaaaaatgtgggggaacgggacggccggtcgcttaataatccacgacgatctgcagggcggctagccatggaggaccgagttttttttttaggcctttggactcgtggctatcacgagggcggccgttaacggttaccgcatgcgcgcgccgccccgcggcttcccaactccaccacaagggatcgggacgttggcgccgctgcgaaattgtagcggaaatcacggcatgtggagagggggagtaccggtggtggtgtgcgtcgaaatcgatcgcggccatgtggttttcaacctgggatgttttgaactgccccgatcgcgttttgagtcacatggctgccatgtgttgtgtccaaaagcacgggtttttttagtcgtgtgtactgctatcagcctgtcgtttttttccgtttggtcattacacgatcggttttctgataaacgttgcaaacgagagacaggtggataacagggatcgcgctgacaaattgcacttccttctagaagtagtacgtcgctccatttggctcatgaataagcaatgaacaactcatggcagccggtcctatgattctgagggccctaagcgaactcatcgcgatgggccctctaaactatatatataaaattttatgatatagagataataattttacttgcaaaacgataacaaatacaccatatattaaatttaacatgtctggtaattatgaagaaataaaaataacaatatatttgtaacttggaactaatatcattattcattaacttaatgaagaacaaaaccccatcatatccgttgctcccatgaaaagatacttcttcgggcatttcttgatgcaaaatcatcaataacggtattaaaatcaatagtgttcaagatatccttctcaattgagcacatagccaagccatttaacctttttttgacatagttaatctcaaatagttcttcaaaacttcaagtttgagaaacttctttcagctgaagctaccgtcataggtacagttaatagatttcgataggcaactaaaacatttggatagcaatctgcatccataacgaacttaagaatctcaggcgcaaacatcgaagaatcacacatttaattctgaataaaaaaacattgatctcaacatcggatgaggtactagactactagtattaggtgttggcccctccaccatcatgggctccggcggtcgcctcggctgcatagggccagggccggccctgcatggcagttgttagtaataaaagattttgttaactagtcctgaaaggcatagccgccgtaattcgtactacacggcagcacaaagtgttcccaggaatttccatccaccggtttctttttctcccctgaatttatctacgtgttcatgtactgctacaatcgccataattctctagtttcgtacacctgaaaccgcgatgaaaactcgttgagaaatacgcaagccgcaagcgcgggggaaggttctcaacgaagcccacgcagatgctgacgcagcgcaggcgtggcgactaagggcagccacggggcccaccaggtgagcccgtggccgtggggtcgggtactcgcgtgggcccacctggccggtcaaatcttgttccttcctccctttactacccgtcgtcgtcgtcatcttcttcttcctggtattcgctattcatctctgaccctgcggcgcaccaaaacccccgtttccgtctcgcgttcttcgatcgcctccgcttaaaaagctcgccgcctccgaccgaatccactccccccccatcaatcccgcaaccctaccgaaaccggtaaaccactggaagaaagcgggttcgatcgatcgatcttgctagtgcggctatatctgctagtaggtgaattggtcgctcgacgttggtgatcatggtggagaagacgaagctgcagctgccgctggtgcacaacgagcggctgtgggcgcggccgtggcggtgggccaagacggtgttcttcctcgtctccatgctcgcctcgctgctgctcgtctgcgcgccgccgctgctcatcgtcgtcctcgacctgctactcccgcccgcgctcctctccaacttccaccgcgccgcgaaccaccccacctcgctcatcgaccaggccaggggcttccacttccggtcatcgctcgtcgacctccccgccgtctccgccgcgcgctccctcctcatcctctgtgagtaaccccaccacgcaatcggtatcaagcgtatgtgcgattcgatgcgatccccttaatctttttttctgcgtgttcatcgatctcatgtcgtcatggtggtttggctgacgagcacttggtgggcgttgttgtgcaggcgcgtacacggcgtgcgggggaggcgcggcctacctgtgggtggccgtggcgtgcagcgtcggctcggtgtgctacgtcgtcgccaaggcggccgtggtgttcggcgcggcgcccgacagggccgtgctggggctgcagggcaagggccagctcgtcgccgtggaggccatgttcctcatgtcgctcgcgctcgccgccgcgcacatcgccatggcctaccgcgccagctgccgcgagcgacgccgcctgctcgtctacagaatcgacgtcgaagctgtaagtgatcgattccctttctttgctcgtatcgtatcaattgtttcttttaccgagtccatgtcacgcccgcacaaaacagagaaacaaacgattccgcctagctgtagcttgtagtgtggattggaaacatattaaacccaaaatatgcaagctttccagattccaatccgtgttttagagagattctgtagaacaatacgcttgccgggtgtatcctgtattgcccatttgcgcaaacgctttcggccaaatgtgatataggtaacgcgtcgacatagtcaaatagcgccatggaatctgctttagcccttgccgaccaagccgtgtactcccttcgtccaaaagaaaaaaaaaaagacaaaccttgggtttccgtgccaacgtttgactgtccgtcttatataaattttttttataattagtatttttattattgttagatgataaaacataattaatactttatgcgtgacttatttttttaatttttttcataattttttcaaataagactgactatcaattattggatacggaaaccagcgtttatctttttttttttggacggagtacctgtgagcaactgtgcgaaggaggtcctcgcgatttctgcattggagattcctgattcctcacgcacaaactagccccaccaaacttcttacctccacctgaaatttcagatagctacgagtaattactgcagtaatggtttactagctgaattgttcccacggtttaactggtaactgttgctctggaatgctgttaattagcgatttagtactggttcagtttttttcacatttatcattaaaaaatagactgtcaaatcactccaaaccgattagaatttgaaggaaaacccgcatgaagaagattagtctaacataatggcctgagcatattttccatgcgttggatgtcacagcctagtggaccgatcaggacagttctctagaaatatctggaaaatgcagccatccgtgtacaatgagctcaattgacatcacaactgcaattgtttaccctgtcactatccctcacatccgtgacagtttctagcgtgatattcatggccagggaatctacacgaccctgtcaaattttaactgtcacagtattgaacagggagaaaccccaactattatcttgaagtttctaacgattatttacccacaaaagaactgcattgaattgtattagttgccggaaataaaacagtttccaatagcatcttgctaatgaactctttgctggatcatgcaggtaaggctaaagggaggccaaacgcccaagtccctgaagcagcagttcgccgtatgacactcgctgcctggccgttgcagtcggacacaaactgaatgccacggcatggcagggccctgcagggttcgttcctccggtctcaatttttggttcaagtagatgtgtacaacacgaccgttcactgtacctcaagtgaaaaatagtgtaaagaagatgtaaatacgaaacatttgtgcttcggcctcctgcagtcaatgcaaaaataggatgagccgttcggcagatgcatgcttgtcatttttggtgggtttcccatttgtgagctgtgagacggagggggtggtttcgtcgtgtgaatttccacaggtgcgcatcggtgacgatgcacatgattggatcaattcgaatcatctggctatcaggtcgatatctctcccctgtgagagtggcacgtttgagttgagtccgtttcagaagaacgcgtctcaatcttaactgttttctgtttaaaataagtactaattatcttaattttttaaaaaagtactcctatctgaagcatttttgagccatctccaaactctattgcttaaacagagtaacagcgtatcttcgtttggaagatgaagatatcctaatacaatcagtcctacctcagtcctcagaccagcgttttgctattcataaatctataaaaattgaccagcaccggatctcatcaaaattataaaactatacaatactaatatacggtgacaaaaaaaaaagttactacaaggaactgctttgtataattctctgaattcgcaaggtcctcacatgatcatgtgaatggtcattaaccgtggtcaaatcaaacacaaatatatcgaaatttatcaggtagctccatatgaaagacgctgaagatttcttccatgtttcacctaactgatggaaaaaaaattctgctaaccgtagaaaattcagaccaatgatcaatgacgcacctgatgataatttaaaagtagcactgcccaattgaatcgatgctagcaagtcttctaaacggccaataagcttggcaatctagacccttgaccaaaggggtaaagaagactttgatttgcatacagcttctagaagtcccagtcagccttttccactagaggggccggttgaacggaaaccacaagtttgtgtctgggctactactaataattgtcaaatgtattaggaaaaatggaagatgcacaatgtgaaaaggatctgctggatttctggactcttgggtagcgtacacaccttgtgaataaatggacttggtttaccggcccaataccatagtactaggcccaacaagatgtcaaggttggatagagaaacaggtacagggcaagcaaactcaaaaatgaaattccactcgtactaacaaagatcgtctaaatttaaaagagctaaattgaagtaggcagtccatcattggatggagaaaaaggattaaccaatttaacgtaagagtgtaagacgctctttcatggaacgtcaaatactaacatgttatcagatttcagaaccaaaggtgtctttcgggggaaaaaaggggaattcggaatcaaaggtaacatagttaaatacaagaggggactaccctgtagttaagttaaccctcgcagaaaggggaaaaaaacagcactagcagctagtatcagccgtattaccagtgaggatatacagaggcagcttgaaaaaagcataggcatctgaagttctttccggcgcgaacgatgataatgatgggctgatggcttggaattacaatgctccgcatccacaaagtgatcgagtctaacaaaagcacgcatgctgtatatagccgtcggcagaaagcaagctatacacgcatagattgtgtgagatcgacgacctgcagaaacgcgacgaaatccagctgacaattaccgacatggatacactacttgtggccgaagcagacggttaattgtgaggctgcaggaagacgggtgcatgcatggacagcgtgtgtgcatcgtccacaagatgaaaagactgaagaagtggtcgaaggagatggtgagattgtagcacgaaaaggagcgtgttccccggcgcggcacatacgtcgtgcgagacagatccatcccccgttccaatccaattggcccacccctgtatacatctcctcgccgcggcctctccgacgagggcgacgtcttatctcgatcggtacatgcaccaagctagcttgccaagacttcgtgcaattgtgcatcgatttttagggtttgggtcaagacgttcgtgtttgtggagattatggataccctatatctacatgacagttataatttagtcggatatatggtaccaaatataaatagaatatctctatgaggacttggtagaatatctctatgaggacttgggttagattctaaacttgtatgtcaaggaaatatccgggatcttagtcggttacgattgtattttatctataatcccatattccgttaggatatggactgtactttgtaaagcggattccttcccctatataaggagggtccgtgtgcctctcggggcacgattcttttttccagtttatacaatcaataacacactcggcggaataatccccggacaggagtagggtattacttcttgaataagaaggcctgaacctgtataaaattcttcgtctccaaacccatccgctttcctaacttgatagccacccccttttactattgctgaaatcttgtttcgacagtgttagagatcgatggttgcatatgcgtgcgtttgcggagcaatatgtcaagaatgcgcgtaagccctcggacggagatcaaggcacatcaaagaagaaagatgatgaagacgatgccccgactggttttcaagatcatcgcaaagaactcaatcacatcttcagcggacccctggcttatgaatctaagagaaagcagaagtgtcacgccccgaattagtcccgaccggaactaacccgtgacgctccaaattaacctgttaatcgataccagtcccaggaaacagtgctggtatcacagggagacagaatatcacagcaacagaagtctcttcattatagagtagaagtacagtcatgttgggctgcggacagatcccgagctcacaactgcattacaaaaggaaagcggaagccaggacttggaccaaacaatcacaggcgcgacttgggaactaggctgaaaccctaaaactcatcgtagccggcttgctcctggaagaactccttatcagcaggatccgcttcatcttcttcagcaactggggggggggggaaatatttatatagagcaagggtgagtacgggagtactcagcaagccaggggaaataagtgtttaatgcaggcttcaaggaaaggctgttgttttttttttttgcaattgattttatttggaactcttttctaaaagcaactaagtgagtgcttctcaaacgacacggatgagacagtgcgtctcgtccggtcggagtatgtgcaatgtgtcagtctttagatcttgaaacaaggttggcacccggccaaaagctttttgaacggccacccgggccaactcttttcaaacggccacccgggccaacaacttttaaactgccacccgggcctagctgatcccatcagctgtaggttttccaaacatcgaacccagtttcacaacagcaatttcacaagcagtagtcaaacaaaactacgctaggaatcacctcacatccgcccatgaccgtgggcacggctgttcgaacagtttaatgacctctgcagagggggtacattttacccacacgacattactaacccgggtcacccagcccgtggggatcagccacgtcgggagacctccaagctttcatgacaaggcatttcgaaagccgatgcaggtttaccatatgccgacgagaggggtcccagaccaacaacaggttaggtcccagaccatactgtgccaggaagcccaggggtcctccccgacaccaccccggcgaatccacatgtctctcggcatcaaggctcccctgataagctagttactcagccaggggtgttccattccacccatgtggtcgtacttgtcttatgtttggatgaaattccaaggaatcggtccttaagtgcgagagcgggaaaccgtacacccggtacgttccccggtccgcggttttggaaattcatttagttcgcaagcaccgacccaagtgtcgggttttccgagtcttttgtaaaactccagttttacccaagttgttactcagattttaagtttgaaggcgaccgtcgatactcgcacagagtgcacgagtatcaaggcgcaactgggtggttacaaggggacatggcatagcaattaacaatggaaggatcaaatgtgacaatttaggtaagtccgccaatctgcttcgcagacgggacaacagattaagtgtgatcctatcaatgcataatattttgcaagcaacatacttaaatttcaaatataggctcaagatgttcaaaggtggcttgccttgctcgagatctggagcttgatcctcgaaatcctcgcactgcgggtcttcgggctccgaaactacatgcgaaacggggcaactcaacaaacagcgaaaataaagccctattaatgacctctaagcgtgccactagatagatctcgagatttgatgaattttggaatttgaacggaatcaaacggagttacggttgggaagatattgaatttctaagattattggattttggtctaaaggaaaaaggattaaattaaatcctttttttttggaaaaagaaaaagaaagaagggagggagggaatatagacttttctcgggcggctagggcgcggcccaaaagatttggggcggctcggccgagcttaacaggccggccggcccaagacggcccaagcgcgcgcgcgcgtgggggggggggagaggagagagagaccggtggaccgggctcaccacgcgcggtcccgggtgggacccgcttgttagcggctcggctcaccgtgcggagggagcacgcggcgcacgcgcgcgggcggggaggaacgcggtgtacgcgcgcggtttgcggtggacgcggatgcgacgggcccacgcgcagcctcacggctcgcggtggaacgcgcgcacggggagggaccgaccggggtcggctcgacccggtctaggctgagctggcgccgacgtggcgcctacgtggctgccacgcaggccggcggaaggtagacgacgacccggccacgaatggacggcgggcggcggcggcgagcggcggagcgaaccacggtgatacgggcaaaagcgagcacaccgggcggttgttcgcgacagggggaggcgagccaacggctcggattcgccggaggttgctcgacggcggcggattacggcggcggcaaccggcggcgggagaagagggaaacggcgacgaggctacgaggggtcgattcccgtcggtgagagcatctacgcggcttcgggaactcgacgctagcgtcggattgggcggaactacgccgagcgaggccggcgacgagcgggtgctacggagctcgggcggcgacggcggcgagcacacggcgagcgaaggcgacggttggggcggcgccggctagctacggggggtctactcgagctactaccgaaagctagggagaggagacggagcgaggagggagaacagagagagacatcaccgggaagaggaggggcgctgtgacgagaggccgacggcgcgggagtaatctctccggcctcgggccggggaaggggaaggagagggcgcggccgaagtccccttccgcgtcctcgaatgcaccggctctcccggcgctcggcggaggacggcggaggcgagacagagcacggggcggcggcaacggcgcggagacgaatggaagaggaggggtaaggggaggccgggggggtttaaaggggacggcaatgtcggtttgagaaccgacttgcgcggtcaaggcgcgagctggcgctccggctagcggccaaattggtgacaggggggatgacgccggcgggaggaaaagggaaaaaggagggggagaaagggggcttgcccctttgccggatcgggaaaaggaggagggagcgggggcgacgcgccagggggaaaggagggctcggcctccgtcccttggcggcttgcgcgcggagtggcgggggccgggcgatgacgacggcgatgacggcggggcggtttggagcggagcggcgacactggcgacaggcgcgggcaggcgctgacgacggcggcgaccgggcggtcggccactcggcacgcgcgcgcgggaaaacaacgggaggcgcggtggtttgaacggcgcggctcgggcgacaggcgcgggctggcgggaccgggcggcatccacgcgggcgcgcgcgagcaactgcacgcggggagcggtagcgagggatggggagacggagagcgagggggcgctcggcgcggcggcacacgcgcacacgcgcgcgcggcgcgcgtgcgggatggagcggagcggagggagagaggcgctcggggcgactctcgcacgcgcgagcagcgtgcgggcgaggctgagcggggggggggggagcgcgccggggggagagagagagagggagagagagagagagggagagagagatgggccgagcggaattcggcccatcgaaccccgggggaggcaaactaaactttgcggagggattcgatttggaaggatttggattcggatttgaactcgacgatagatcggggattgagatcatgagatggcacgggcactagacaacaagcaaggaaacaaatttcgcaattagggtttttaagagttaattttcccgctaggcgccacgacggaacgggcgctacaagaagctaacagaacgggagatcaatgcggttcagcctaacacgccccaataccttcggtggtcagagatagcaattaagttcgaccgctcggatcatcccgaccgagtggtccacccggggcggtaccctctggtactagacccagtggttcgcaatgtcaagctccgacggactctcatcgatggtggcagtgcactcaacatccttttcgctaagaccctggacgatatgcagattcctcgcacggaattaaagccgagtaatgcactcttccatggtgttatcccaggattgtcagctacgccactcggctagatcactcttccagttaccttcggcactcaggagaattttcgcacagaaaacgtttgtttcgaagttgctgatttcgagacagcataccatgctatactcggacgaccggttctggccaaattcatggccgtcccacactacacctacatgatgatgaagatgcctggtcctcgaagggtcatatcactacggagcgacatcaagcaagccgtcacatgtgacaaagaaagttgcgagatgacccaaacccacgagatcactctcgctcgcgaagagatccgactggctgccaccacggcaagcgaaggagaggtgcctccgaccaagctgtcaaagaccgaagaaggcgacgacaagactaagaagatttcactagatccctccaatcctaccaaaactgctgtaataggcgccgagttagattgtaaataggaaagcgcgctcatcacctttcttcaaaataataaagatatttttgcatggaaaccatccgataagccgggtattcctagagaggtgattgagcactctttacatgttaaggaagacgccaaacccatcaagcaacgactccgccgttttgcacaggacaggaaggatgcgatcaaggaggaattaaccaagctgttggcagcgggcttcatcaaggaggtccttcatcccgactggctggctaacccagtcctggttcggaaaaagacggggcaatggcgcatgtgtgtcgattacaccgacctcaacaagtcttgccctaaagacccttttgggttacctcgcattgaccaggtggttgactcaacaaccggctacgagttactcagtttcttggactgctactcgggatatcatcagatccgactaagagaatccgactgcttgaagacctcctttattacgccctttgggacctactgctacatcaccatgctctttggattgaagaacgcaggagcaacttatcaacgcatgattcaaagatgtttttcaactcagataggtcgcaatgttgaagcttatgttgatgatgtagtcgtcaagaccaagcagaaggataacctgatcacggatttagaagaaacttttgcaagcatttgtgctttcaggatgaaactaaaccctgaaaagtgcatcttcggagtaccgtcagggaagttgctcggatttatgatatctcaaagaggcatacaagccaacccggagaaaatcaacgctatcctcaacatgaaaccgccaagctcccaaaaagatgttcaaaagctgactggttgcatggcggcgctcagccggttcgtctcacgactcggcgagcgggggatgccctttttcaagctgctgaagaagactgacaatttccagtggggacccgaagcacaaaaagcctttgaagacttcaagaaacttatcaccactccacctgttttggcctcgccacatccgcaagagccgctactgttatatgtgtcggcgacctcccaggttgtgagcacggtcctggttgtcgagcgtgaagaggaaggccatgttcaaaaagtccaacgaccaatttatttcgttagcgaggttttagccgactccaaaacaagatatcctcaagttcaaaagttattatatggtgtcttaattaccgtcaggaaattatctcactactttcaaagtcactcggccacggtggtcacatcgtttccactcggggatatacttcataaccgcgaagcaaatggacggattgcgaagtgggccttagaattgatgtctttggatatatcgttcaagccacaaacttcgatcaagtcataagctttagctgatttccttgccgagtggaccgagtgccaagaagatatgccagaggaaaatatggaatattggactatgcattttgatgggtcgaagaggcttacaggcactggagctggggtagttttaatctccccgactggagaaagattgagctacgtattgtggatacatttttctgcgtcccataacgtggcggaatacgaggcgctactccacggattaaggattgccatctctctaggcattcgccgattaatcgtccgtggagactctcagttggttgttaatcaagtcatgaaagagtggtcctgtttagatgataatatgactgcttatcgacaagaggtacgcaaattggaagataaattcgatggacttgagctcacccatgtcctctgacataacaatgaggcagccgacagactggccaattttggttcaaagcgggaggcagccccttctgatgtttacgaaccaaccatacccagaaaagaaataattgaagccatggatactcaaggcgtaagcatgatcgaaaccgactggagagaacctctcataaaatttttgaccaagcaagaactccctcaagacaaaaatgaagccgagcggatttccattcgtagcagactttacattattcataagactgagttgtacaagaaaagtccatcaggaatactgcagcgttgcgtgtctttggaagaagggagacaattgttgaaggatatacattctggtatttgtggtaatcatgctgctgcacggactattgtcggcaaagcttaccggtagggtttttttggcctacagctgtgtctgatggtgacaagattgtgcggacatgcgaaggttgtcaattttttgccagacaaattcatctgccagcccaagagttgcaaaccatcccgttgtcctagcagtttgcggtctgggggcttgacatggtcggcccatttaaaagggcagtcggcggttacacgcatctctttgtggctatcgacaaattctccaagtggattgaggctaaaccggtcatcacgatcacagcagataaagctagaaattttttcatcgacattgtgcatcggtttggggtacctaatcggatcatcactgataatggcactcaattcactggcggagcatttaaagacttttgtgaagactttggcattaaaatttgttatgcctccgtggcacaccccatgagtaatggacaagttgagcgcaccaatggcatggtacttcaagggataaaagcacaagttttcgaccgactacgtccctatgctggcaagtgggtcgatcagctgccatccgtactttggtctttacgcactactctcagtcgggctaccggacagtcgccgttctttttggtttatggtgcagaagctatgtttccatgtgaagtggaatttgaatcactacgatttcagaacttcaacgaggagcgctatgaagagggccgagttgacgacatcaatagactagaagaagcccgtgaagcagctttaatccagccgactcggtatttgcaagggttgcgccgttatcataatcggaatgttcgatcacgagtctttttagtcggcgacctggttctgaggaaaattcaaaccacacaggatcggcataaattatctcccttatgggaaggaccgttcataattgctgaagtcactcggccaggttcttatcgactcaagcgcgaagatgatactctcatcaacaattcttggaatattgaacaccttcgtcgattttatgcttaggcatttcgtttgtatctttcctctccgactgctaacttcaagtttttccttgaagttttcagtcggggggctactatgataataatggagtatgatttttatcaattcaatttgcttacttgatttatcattgccctgtttggtctttcggcttagtcaatgaggactgaaggtttttaatagcttttgcgggttttaggctcaataaggcttgacaaaggcttttaagaaatcagaagctaagtatggaactccaagcatagcataaattcatcagtattgtacaaattgagcctccatcatcattaatcatcaaaatcattgttatatcaatcaatatcagttttttcatcatcagaattatcagacccagtcggccgaaggtcgacatcttgaaatctctcaaccacgtcggcagcaatcttgtcagctgctttttgcgcatcattgatgaggtcaagagcaacttcttcgctcgtcccgtctgcaaagccatcaatggcatcaatgtccactcttggataaagggatttggtcatcgccaacgccagacttgctcccatacttccagcttctttgatattcttgaagtaagtatccggagtgactctcagcttgtcaaatatttcggcagcatcaagtgtactcggaccggcgttattgaagaacatggcttggatgagtggagtagcggcattagcgactttatccctggccccttcaagcctattgatcttgtcaactaagacatcaaactgtgcctgggacttgatcttgcggtctgcatcaacagattcacattaacgaatcagcatatagaagataatggcttttaaggtattgattattggtaccttcaacctcctttaaagctgagtccctctgtcttgccagttctgccttaccattttccagagtttgaatctgcttctccagttgagatatcttggcagtttgcactacattgactctagttaatcaagattacaaagataataacataagttagttgggcagagtttgtgtgtaccttttgatgagccgctcagttcaaaattggatttctggagctcagcaatccgatccctcagatcatgttcattcttcttggcaagctcttttgtttcgtgcagatgattcctggtggcttcgagggtcccgagatgagggactaacctctctaaggttgccgttttagcttcgttcctaagatgaatcctctgcaagacagtttaattagcacctggactaaatggcaaacgagacggttgagatcaggcgtcaaagagcctacatttacaatgcgggtggcttggctgagtgcctttttcagcaagcatacctcttcatcttctttttgcttatttattacgattccttgaggctgcatgttgtcatcccaccacttgaccagaatgggagggcgcgaatcctcagctgcttgtatccggaggatctcttcttcatcaccaatcattggtcctaatgtatccatggataacgatcaaacaatcaaataaagtcagttagatcaacgtggtttcagacaaagtgcttacccgtgataatttctggatgaggacgagtggactcagatgcctttgaaggagatccagaccttcggtcgtggctggcatcttgaccgcgaggactatctgcttgagctccaacttctggaatctcttggcttggcttggtgtccgactggttttcagtcgggggctcctgattaattccggctccagcttcggccgactcatttccggtcgggggttgatcaccagactctacattatcggttgctggctggttgtcactcagctgatcctcggcagttggctcggttccttttaagttcgtttccctgctggtcggctcagaatcttttccagaaggatctatatcagatggtttcctgcaagtttgattatcagtattatttcctcactgggtgtgcatcaatgcaagggagatcgttatatgagttgtacctagaagacttcctgatctttggcacaggacgactggatgttttttttccttggagtaacctgcttcagcagtttcttggttgcctctcggtctctgagctttctagcagtgtcgccttcgtcgtcacttagaaccagcttcctcttgcgagaatctggctggccgattggatcagaagcacttagttgagtttcagaccgaattcttggtcctccgcttccctgaccagattggcggcgaggtgattggtgctgggaaattggaggatttgacttcatcaatgcgaatttctgagcataaatgtcaagcaatttaacgagagatgaaatcatgtttttgaggaaggttggacgtttgaatacataccggtggaggaggattgaatgcattgaacggtaagactggcaacaagtgtgaatagctggcaacaatagcatttgagaagatcttatatatcctttctttcataaccttaaagttaagagagtctggatcttcacgatttggatcatgtttgccgtcaaactcaaaagctgtgcgggacctctctttgattggggctaaccgacacttgataaagtgccgggtgatctgttctccttgaaggccttgttcttttagctttatcatcctctccatcagttccactgcttgcgcagcttcatctcccgttggcaatgagttccaagtatcctgataaactggaggaagacaggagtattcggggagagcaggctcagggttttgacaataaaaccaattcacatgccagcctttgtttgaggttttgaagggcatagagaagtatttttggcttaaggttcccctgagttggaaaccagcccctccgacaacacatggtttgctcttgtttggctgaggcttaaggaagaagatacggcggaacaaggcaaaatgaggcctaatgcccagaaaagcttcgcagacgtgaataaaattggcaatatgcactatggagtttggattcagatgatgcaggctgattccgtagaaattcaaaattccccgaaaaaatcttgaggttggaagggagaaaccgccatagaagaaatgagcaaataccacgatttcatgcgtatcaggggtcgggaatgcttcgccgaatgccggtcgccacccgatgatctcctttgctagaagaacgccgtgcgccaacatctccttcagattatcttccgtcacatcagagggcgcccactgactctcgaagctttctcttttttccgccatgaatgtggactggatggtttgatttggtccgagatacggctggaaagggatggggaatcggagcggtggacgcggggagaaattccgtgaactttttgaggatggattggagcggattgataaaccctagtttggccggcgcagtttgtactgtagcaggaaatggggaaaatggcgagagtttcggtggggaagacgaagagacgtttttcacttcggtgatattagggtatcgggagtgctaacaggcctgggcctgcacagtacttcagcctaattttatttccgacgtggcccgttgtgatccttagagacttaggcactttttgctttggcaatttgtgctcacaatgatgtggcccaatgttgttgaagaattggatggctacctcaactcccccggcgtcagttctcgaccaaccgagatcctcgactacgacgacttcggctaccactacgaccacggcgaccccgacaacttcgatgacggctatgaggacaactacacgcccctcttcttcggcgtattcatggctgacaacgaaacggaggaatagcgtcgagcccgagaagcgaaccaagatcgcgaacggcaagaagctgaacgtcgccgactggaggaagagcgacagcaataggagcgagaacgactacagcgtgagcaacaagatcgcgaacggattgcaaaggaggctgaagatcgacggcaacgcgccttggaatctgggcggcgagcgagagagctcattgggcaacaagacgtcgatggaacaacggtctttcgcacccccccagcagaacgcggttgcagcaatcactctcctcgacaccctccccaaggaagacgcactcaaccaagctgatcatgttgtcaacatcttgaaccagacgaagaccatgatcgctgcctcggttccagccaactctgcaagcacccgcaccccgactggtagccgagtccctaatcttcgatctcaagactatcaccagccaagcctcagcattgccggcgccggatctagtcacaggagcaagggacatgatgaacggtctgtttgttcgcctcccgaacgatatagggagcgtcgagttgaacgaccacactccccacatcgaaggcgccccatcgatcttcgcgacaccatcaaccagcgccgtgcagcaagaggccatcattcaccggatcgctacgacgacgatgtggacggagttgctgccttcacaagcgatctgcgtcgagtggattggccagccggctttaagccaactggaatcgagaaatatgacggcaccaccaaccccgagtcttggctcaccgtctatggtctcgcaatccgcgcagcaggaggagacaacaaagccatggcgaattatctacctatggccctaacggattccgcccggtcatggctccacgggctaccacgcggcacgatcggatcatgggcagagctacgcgaccacttcatcgccaacttccaaggcacttttgaacggcctggtacacacttcgatctctacaacatcattcagaagtctagagagtctcatcaagattacattcgacgcttctctgagcaatgcaacaagatctccgacatcacggacgacgtcatcattgccgcctttactaaaggcattcgccacgaggacctagtcggcaagtttggatgcaaacctcccaagacggtcaagcagatgtttgaaaaagccaatgagtatgccaaagccgaagatgctatcacggcgtccaagcagtcgggcaccacttggaagccaaagaaggatacgccgaccacaggagggagtggaagtaacaaccacaaggatcgcaagcgtaagcccgaagaacttgtggcgacaacctctccgtcttcccgacaacgttcccgcgtcaacaccttcgacaagataatgaactcccaatgtccgcatcatcccaactccaaccacgtggccaaagattgcttcgtctacaaacagtttgcggagcaatatgtcaagaacgcgcgtaagccctcagacggagatcaaggcacatcaaagaagaaagatgatgaagacgatgccccgactggtttttaagatcatcgcaaagaactcaatcacatcttcgacggacccctggcttatgaatctaagagaaagcagaagctaacagaacgggagatcaatgcggttcagcccaacacgccccaataccttcggtggtcagagatagcaattaagttcgaccgctcggatcatcccaaccgagtggtccacccagggcggtatcctctggtactagacccagtggtttgatgaaccctagtttggccggcgcagtttgtactgtagcaggaaatggggaaaatggcgagagtctcggcggggaagacgaagagacgtttttcacttcggtgatattagggtatcgggagtgctaacaggcctgggcctgcacagtacttcagcccaattttatttccaacgtgtcccgttgtgatccttagggacttagggactttttgctttggcaatttgtgctcacaatgatgtggcccaatgttgttaaaatcttttttaatgtggtttgataattctttagaattaacacgatgcaaacaaaaggtgcccgacagaaaggtgttataccgtttttgtaagcttcattaggctgcaaaagctgtttgggttgatttgagatgactggtttattaatagtcattcttttagcatgttatatgcttattttggttatggtaagggtcacagcctaggctattagactcattaattaccatgatttttttatcatgtttggtggatcattttaagagtttcttactcggattcctatcaaatatgtctatttttggaccttttgagtgtttatcactcggtccttcttgtattttttgtccttgatatattcaagttgagaagcagtcggctgggtatcttactaagtaccatgcgtgcttcgctataaaaccactcggttctttattatatgtttagtttttcaactaaacacatagtcgggggctacacctaattaggtgcatctactcgatgcaccatgttttattttcgcccttcgcagtctttgattttagcactcggcaagctggagcaagttgaattgaagcactcggattactgttttttgtttcgagaaggctattattgtcaactgcgaaggtctcgggggctactgtggagattatggataccccatatctacatgacagttataatttagtcgaatatatagtaccaaatatagatagaatatctctatgaggacttgggttagattctaaacttatatgtcaaggaaatatccgggatcctagtcggttacgattgtattttatctataatcccatattccgttaggatatggactgtactttgtaaagcggattccttcccctatataaggagggtccgtgtgcctctcggggcacgattcttttttccagtttatacaatcaataacacactcggcagaataatccccggataggagtagggtattacttcttgaataagaaggcctgaacctgtataaaattcttcgtctccaaacccatccgctttcctagcttgatagccaccccttttactattgccgaaatcttgtttcgacagtgttagagatcgatggttgcatatgcgtgcgcaccggcagagatcgagacaatgttaataagtttgtgcgtgcgtgcgtgccccacggtcgttgaactatgtggctcctcttaattctgcacgggagaacagcaattgcgttgcgatcttgcctggaataacgctgtacggtgatggatcgattcactgttagcgctgtgtgttcttcatatcgatgtcggtgccgacacggacatctcacatcgctcttgtacgtactactcctatgtacgtaccctgtgagagcttttgtaacgtgaggctggttccgatcgaacgcatggtcacgtactagtgtacatgacctgatggacatggatatattgtcccctgtctcattctcgtatagtatcaccaactctgttttgttaaggatatactatatccgttttaaaaaaatcaacatagaaagagatgtgtcttctcctataacaatgcatctagacacggttataggttgattgatgtgacttctcctataacgatatatctggacatggttttaggttgattttttttacggagagagtatagtactccctccgtcccaaaaaagacaaaccctggtttccatgtccaacatttgaccgtccgttttatttgaaaaaattataaaaataagtgacgcataaagtattaaacatgttttatcatctaacaacaatgaaaacactaattataaaaatatttcatataagacggacagtcaaacgttggcacggaaacctaagatttgacttttttttttggacggagggagtactatgcaagtgcagataaaatcgattaatcaatctatatatatactcggcgtgcgtgttagcttggcatagaaatacatcgtggcaggacaggtgtcgcaccagctggtgcaggccggcatctaggaggccaggatgggatcatgggagtagcacttttaaccgcgcaatcgtgcataaatttgaggcgagactgccgcgagaggtcaggccaatacgcgctaggtaataaaagtcgcggattcctcacccagttgcattagcgcctgcgtcgtctcttcacgtttggcgtcacggccgggtcccgccctgattgacgaagaatactccttggaattgtggtctcctgctattcgctctacgtacgttcccatcttgttggagcgcggccgactcgtcatgcgtagcccggtcgctgattactgcagccacgacgacgattcatgtatacgctgcttgaaaaattctgcttgtgctacctacctgctcgaccgctgaactttcgtccaataccctgatagtactagcaccttgctttgcaagttcagtaatcactagcttcctccgttatatttttttctacatagtgcaacgaatctagccacgcttaattagtcgtgttggtgtttttttttctgccaatacataattcacctaaatatttgcggtgttaacagagtcaccaaccatcttctacatcaagatgggttttgaagattaaaccgataagcggagcttgtttagagatcaaaccagcatctaggctgatttatatcgatttgaagataaccgccggtctcgtgggcgaatcggaaagtttacgggacaaaccaataaagatgtatcacactctcacagcgaaaacgaatgatttacgaagtaattgataaagatggactaaactagggaaaaatagaaggcatagctaaaaagtaaaggtaaaaaaaattcaattgattatgtagggattgaggtcgggggttaaaattgaactggtcatagctcttagaaaggggttggttatgcctccacagtttttcttcacgtcctattaggcttatagatcagtgttgggggaatggctccggatgaaatggctagccttcgaagggcttgcagggcttcgaggagccattctccccagggagatgacctagggtgaatactaccttggagctccgaacggagcccccgctccggagacaaccaaggatcccggagagctgtcacggcttcgaaagccacctcgagctccagagcccaacgaggcttcggaggctgcccatggggctccggagatggtcaagaactccggagcatctgtggcttccggagcctcgcgagggcttcgcatgccggcaaggtttctggagctagcagcgtggcccggagggaatcaaggctagtttgaggaccaggcgctagtgggttagaatgaatgcgcactacgcgccctaactacccctgacaccattgacgatgacgagacggcgcacgctattacccggagcaggcctttatccggttaatagtgcgcaccctcgggaataggtgccgctcccttatggggcgcctcactcctatcaccgggaattttactaatagcccaagggctggccggggccagccactctagattcactataggaccaagggcaataaagaaatttcttcttgtatacccttgtataaatatgtaaacattgctcacagttaagcacattaaatacagaggaatacacatgcacttgttgagttttgtcccaacaatcagttaggactcaagaatccttaagcccaaataagaaaacccaagaaccaacaaatcaaacttagagtaatcagactgggcccacaccatcggtccgaccggctatatgagagcgatcagactggccacatatggtaaattagggttttttttttcaaatctgatcatgtttctctatttttttttgaatgactatgtttttctatttttcatctgaagtgttaaatttaggtgtattaacacgtcatattaagatatgtctaatattctatagtaggtagtaacattttgaaagagatgcagtatatatagatgatgatgaaagcaagctagcgacactggacagtgatactgatacgtacatcggctatggaacaaatcttgtccctcttgtcctctgcgaagatgacacttgtatgtgtagtctcgactactgcacactgtaggctgcgcaaaacagcagaattcagagataaccggtcgtgttcggttacaacgtgcccgtacccggccgacgacgactacagtattgcttttcctaatgtcaaaatacatgtacagtatttgagatcgcttacctagctacttgcacgagaggcctaggaagtgagtattgtaggtctactagtttgcgcatgcatgcatgcactgttttgacagttaggcataggactagtatgtactgcacacggctcatctgaagagaatggatacaattaagtagtggctttatgcttcaaagtaacacgggatatgaagcaaacacagcaccattcaaagcccagatatcagaactgtatggctttactatttggcacagaaaatttcctgattggctatagtgcattagtgcatgctccctccgtcccacatgaaacaaacataggacttaatgtgaaacaacgaatttgaatagtcgtacgcatattcagattcgtagtattatgatgtgtcaaatctagtgctagattgttttttatagacatagggagtactccctttgtccaaaaagaatcaaacatcccctcttaggacaatgtatgtggacatactcatatccacatatatcaacctaagagaggatgtccggagtcacattctcttctaggttttcttttcgggacggagggaatatggagtaccagtacagtagcctatatggctatatattgtgcagcacactgcagcatgacgtgaatccttaacctatactgcaggtagctcacgtgagtgcagagttttctgcgtgacatacagtatgagagaggaatgatacaatcatatactaatagagaaaccggccgaacgtacggtttcgtccatttcttttctaatgagtacaacatccaagattgagaccatgcaattttctcaatatcatcgaaaaatatacggctagatcaggctgagcattgtagatttgtagtaagttaaatataaccaatctccagttctcaaaaaaagagagaaaattctcctaattaacattgtctcttgcgctattgtaaccatgtttacttgcaatggaatgtggaaccaaggagtagctagtatccggcagggccgttggtagtatagaagagagacaaataagaaagcaaagctagcaaaggtggacgagatgttgatggacccacaaataggcatggtcccaccgttctttttttttgcttgttttaattgtaattagttggaaatgtggaccacccttttcccagttggcgccaggtcctacatctggaatattttgtggggtgtggacaattggagcacatacgctttttagtgttttttctttaccaaaggataactctaaacgacatatttctcgttctttgcaagtacatttcaccaagtgttaaacattatatcgtgtaaaaattttctatacaaaaattcctttttgacgtgtcaccaaaaatcctagccagacagccacatcaaactcaccttaaaagtttcttagtagttttagaatggttatattctacaaagtttaagaaagatttatgtacagttcataaacattgtcatcaacttaatttccttactcctttactccaaataggacgagagaagatgcatgtacgggcgaaaacttaaaatggataaggcttggtcttctaaaaagttttatgcgcaaattatactcttacgtactttacatccatacatagcttgatcaaaatttccatacacaagcaagtgttgcaaacaacttctaattaagcaaacaaaagacacatagccccaaaaaagggatagtgatgccatgtattggattttgtcagctattaagacgaatgatcaaacgtatatgtaaaagttaaatgttgtgattttttttatagcaaatcaacaggagaggctaacactacactaatatactccatcagtttcgaaatgtttgacaccgttgactttttagcacatgtttgaccgttcgtcttattcaaaaactttttgtgagatatgtaaaattatatgcctacataaaaatatatttaacaatgaatcaaatgataggaaaagaattaataattacttaaattttttgaataagacgaacggtcaaacatgtgataaaaagtcaacggcgtcaaacatttcgaaatggatggagtattaaaatacaatatgtacaaaatatttacaggttatattacaacaaagagtatttccacctcttttgctctgtgcgtatggaaaggaaagttttccttgaaatcctttttccaaagaaagaaagagatctgaacatcatggaaaattagagcatatcttctaaaccaaatattccagcaatatattcataaaacttcttgtcgaaactagatttcggcaataataaaagagggtggctatcaagctggaaaagtgtatgggtttggaaacaaaggatttatacaggttcaggccttcttattcaagaagtaataccctactcctgtccggggatgaatccgccgagtgtattattgattgtatgatttggagaaaatcaacatctctgcccctagaggcacccggaccccccttatatatgggaaggagtccgtgttacaaaagataatctatatccctaacggaatatgcagatacaggtaaaatacagtcgtaaccgactaagtctcaaggtgtttccttgatgtacaagttaagaaacgaacccgagatacaaataagatattctatatatattcggtatcctatatccagtccaaatatcatcgccgtgtagatatgggatatccataatctccacagtagcccccgagacctttgcagtcaaccatcatagccttctcaaagataataatccgagtgcttcaaacttttcatgccaaggcctgccgagtagcgaagacgaagactgtaaagggcgaaaaaataaggaatatggtgcatcgaatagatgcacctaattaggtgtagcccccaactatgtgattagttaacaaactaaacatatagttgagaacaaaataatagcacaatcatgcatcatatgacaaaagcatatgcggcgcataaagaggcattctagccgactgctttttagccataataaaaagaatccgaatggttaacactctaaaaggttcacgaatgaacacacttgacaggcatccgaataaaaaactctaaagattacccaccaaatattataaaaattatggtaatgaataagtctaatagcctaagctatgactatccaccataatgaaaacaggcatatgtggtgtaaaatccgagtaaataaactcataaaggatttaccaaccgcctaaaaaaaatgactacaatatataatcagcctaagccataatattggtcaataaaaacgcacacttacgtggcaaagagcaacgatattgtatccaatcaattgcttaaaaacccaaacagcaccatgactatattaaaaagtcagcggggcagctatataaagctttactgtttgacaccttttaagatgcattgtaccaactcctaaaaagttgagtaactgcggtataaaaggattttaaggtattgggcacttgatcacgcgcactttggcctaagcgaaaagtgcctgagtccctaaaagaacgtgacaggccacacctgaaaattcgcattgcaataattccgaagaattatatgaccgcgtaaaaaaggattttatcagcattggacaacactattgtgcgcataagttgccaaagcaaaaaatgcctaagtccctaaggagcacaatgggccacgctgttaaaagtattgggctgaggtactgttcaggcctaagcccattcgcacctccgatacccttaacaaaaaatcccgtgatccaagcgccacttcgtcttccccgccggaactctcgccattttccccactccctgctacagtacggagctgcgcaggcaaactagggttcaccaatccactcaaatccaccttcgaaaagttcatcaaaatccttcccgtaattcaccgcctcaatccctcacctctccctagccatcccccgaatcaaatcagcgcattcgggtaaaatcaatggcggaagagaaagaaagctttgagggccaatgggcgccatccgacgtgacggaggagaacctgaaggagatagtggcgcacggcgttctccctgccaaggagatcatcgggtggcggccagcgtgcggtgaggcttttccgtcccccgatacacacgaggttgtggtcttctctcatttcttttatggcggcttcgctcttccgacctcgaaatttttccacgggatattaagcttctatggaatcagcttgcatcacctaaacccaaattccatagtccacatcgccaatttcatccatgtttgtgaagccttcttgggaattaaaccccacttcgctctgtttcgccgaatcttctttctcaaaccccaaccaaacaagagcaagccatgtgtagtcggaggagccggatttcagctgaggggaactttgagccagaagtacttctcaatgcccttcaagacttcaaacaaagggtggcatgcgaactggttttatgttcagaatcctgagcctgctcttcccgagtactcttgtcttcctccagtgtaccaagatacttggaactctcttccgattggggacgaagcagcccaagccttagagttgatggaccgcatgctaaaactcaaagaacaaggcttacaaggagagcagatcactcggcacttcatcaaatgccgactggcgccagttaaagaaagatcccgtacagcttttgagtttgacggcaagcatgatcctaatcgcgaagaaccagactctctggattttaaaatcatgaaggagagaatgtataaaatcttctcaaatgctattgtcgtcagctactcacatcagctgccagttgtgccatataatgcattcaatccacctccgcaggtatgtatctgaaatcttcaacctatgaccaaaatagtatcttgtcttcatgttgagttaactaaccatggaggcatcttattcaggaatatgtattgataaaatctgatcccccaatcactcagcgccggtctcctcgccagcacaccgttcagggaggtggagggccaataatcagaccagattcgcaacctcaaacctccaatccaactggacagacaggttctcgcaagagaaaactggtgcttgacaacgatgaaggcgacgacgacaacaaatctggggacaagggctcgcctaataaactctcgaagcgtaccatgcccaggaaaaaactggctggccgtcaaatgccaaagattagaacatcttccaggtataaacctctcggtaccatttccctttgacatgcttctctcatagaaattatactaaatattgaaagaacactttgcaggaaaccatccgacatagatccaactggaaaagatcctgatcaagccgtgacagagccaaatttatccaaggatcctgagccaactgccgaaagccagccgactggtgcccatgcttcgggtgataaggccgatccgagtgaccagccgccgactggaaaccagtcgacagcagctgaaactgcaacaacccaagagcccccgactggaaaccagtcggatgcaggtcccgatcaagaaatccctgaagttggagcgcagacgacaacttcccaaggaccagagactagtaaagactcaatgattgggtctccaaataaagaacaagggtcacctcacgctcagctaggaacatcctcaggtaactcatcttctcaagtgataccgatttaaataactccagtttgtttgcctaatgtcttggaaatacatcaggaccaccgggcgatggcgaagaagaaattccccgcataaaggcggctgatgattctcgtcctcctatcttgctcaaatggtgggacgagaactcacaggttgccggcatcgtcataaaccgtcaaaaagaagatgaggaagtgtgccagctgaagaaggcgcttggggaagccactcgtattgtgaatgtaaatctttcaggcgactgcctttgatgactttgttttctttttagcagaactaaaccatgaaccatcatgcagagaatccatcttcgcaatgaggccaagactgcaactttagaaaagctggttcctcatttgggaactctggaagcagttagggaccagctacacgaggccaaggagcacgccaaaaagacagagaaggaattaagggaccgaattgcccagctccaggattcaaacttcgagctgagtggttcatcaaaaggtaatcttctagatctgtcccattaatttgtactgtcataactgtatcctcaaacatttggatttcaaacagcgcaagccaccaggatggctcaaatggagaaacaaattgaagccttgaaaaaagacaaagtagaactggctgcgcaaagggactcagccttgaaggaggttgaaggtactaccagctaacaatctggacttctctcttttaaatacagcagattcttatcataaatgtgttttgcagactgcaaaatcaaatctcaagctcaatttgatgtcctggttggtaagatcaagaggcttgaaggagcaagagatgaagtcgccaatgtcgctacaccactcgtccaagctatgttcctcaataacagtggtccgagtgcactcgacgcaaccgaaattttcgacaagctgagagttgctccggatgtatatttcaagaacatcaagaaagctggaagtatgggagctagcatggcattggcgatgaccaaatcattgtacccgagaattgaaattgacgccattgatggctttgcagacgggacaagcgaagaagctgctcttgatctcatcaccaatgctcaaaatgcggctgacaagattgcaagtgacgttgtagagcaattccgcaacaacgaccttcagccgagcaacaataactctgatgatgaaagaactgattctgactgagtatgaatgtaacaaatggaggctcaacttgtacaatactggtgtatttatgctgtgtttgataattctagccaagtctttgatttcttaaaagcttttatcaagctttgttgagcctaaaacccaaagaagctattaaaaactttcagtcctcgcagactaagtagaaaaaacaaacaaggcaatgatagaccaagtaagcaaattgaattgataagtaatcaaactccattattataatgatagcccccgactgacaacttcaagaagaaaacttaatgttgacagtcaagatagggaagtacaatgataagcctaagcatagaaacgacgaagatgttcaatgttccaagagttatcgacgagagtaccgtcttcgcgcttgagtcgataggaacctggtcgggtgacttcagagatgataaatggcccttcccatagaggagataacttgtgccgatctcgtgtagtttgaattttcctcaaaaccaggtcgccgactaggaaggcacgggatcgaacattgcggttatgataacgccgcaacccttgtaagtatcgagccgactgaatcaaagccgcttcgcggacttcttccaatcggtgcaagtcatccactcggtcctcttcgtagcgttcttcacggaaatttcgaaagcgcaaagactcaaattcaacttcactcggcaacattgcttctgccccatagacaaggaaaaaaggtgactggcctgtggcccgactgggtgtagttcgcaaagaccaaagtactgatggcagctgtttcacccatttgccggcatagggttttagccggtcaaaaacacgcgccttaatcccttgaagtatcatgccattggctcgctccacctgtccattgctcatgggatgcgctactgaggcatagcaaatcttaattccaaagtcttcacaaaagtctttaaaaactctgccagtgaattgtctgccattatcagtgatgatccgattgggcactccaaatctatgcacaatgttgatgaagaagtctcgagcgttatctgctgtgattgtgataaccggtttagcttcaatccacttggagaatttgtcaatggccacaaagagatgcgtgtaaccgccgactgcctttttaaacgggccaaccatgtcaagcccccaaaccgcaaacggccaagacagtgggatggtctgcaactcttgagctggtagatgaatttgtctggcgaaaaactggcaaccttcgcacgtgcgtataattttgtcggcatcggatactgcagtaggccaaaagaaaccctgccggtaagccttgccgacaatggtgcgtgcagcagcatggtttccgcatatcccagaatgtatgtctttcagcaattgtctcccttcctctaaagatacgcagcgttgcagaatccctgaagggcttttcttgtacaactcagcttcatgcataacataaagtttgctccgccttgaaatccgctcggcctcatctttgtcttgggggagttcttgagaagtcaaaaatcgtatgaggggctctcgccagtcggcttcaaccatagctacgtcatgagtgcccgcaacttgagtagcatctttgtgaggtactgtcggcgtataaaggtgttcgacgaaaacatcggagggtgccgcctcacgcttggatccaaagttggcgagtctatcggcagcttcattgttgtgtcgaagaacgtgactgagctcgagtccatcgaacttatcttccaatttgcgtacttcttgtcgatatgccatcatgttgtcgtcaaggcaggaccactctttcataacctggttgacgaccagctgtgaatcgcctcgaactattagacgctttatccctagggagattgcaatccgtagtccatgaaggagcgcctcatactcggcgacgttgtgggacgtcgaaaaatgtatccaaagcacatagcttaatctttctccagttggggaaattagaactactcctgctccagtgcccgaaagtcgttttgacccgtcaaaatgcatggtccagtgctccatcttctccgcgggggtatcctcctggcactcggtccattcggcgacaaaatcagctaacgcttgggacttgatcgaaattcggggcttgaatgatatgtccaaagacatcaactccaaagcccacttagcaatccgtccgtttgcttcacggttgtgcagtatatcaccgagtggaaatgatgtgaccaccgttaccgagtgaccttgaaagtagtgagatagcgtcctggtagtaattagaataccatataacagcttctgaacctgagggtacctcgttttggagtcggctaggacctcgctgacaaagtaaatcggtcgctggactttctggagatggccttcttcctcgcgctcgacgaccaagactgtgctcacaacctgggaggtggctgatacatacagcaacaacggctcctgcgggtgtggtgaggctaagactggtggctcggtgaggagcttcttgaaatcttcgaaggccttctgtgcttcgggtccccactggaagtcgtctgttttctttagtagcttaaagaagggcatcccccgctcgccgagccttgaaataaatcggctgagcgccgccatgcatccagtcagcttctgaacatctttctgggtacttggcggtttcatgttgaggatagcaataactttctccgggttggcttggatgcccctatgagacaccataaaaccaagcagcttccctgacggtactccgaaggtgcacttttcagggtttaatttcatcctgaaagcgcggatgctcgcgaaggtttcttctagatccaaaatcaaatcatccttttgcttggtcttaacgactacatcatccacataggcctcaacgttgcgaccgatctgtgttgagaagcatctctgaatcatacgttgataagttgctcctgcgttttttagtccaaacggcatggtgacatagcagtatgctccaaagggcgtgataaatgaagtcttcaagcagtcggattcctttagtcggatctgatgataccccgagtagcaatccaaaaaactgagaagctcacagccggcggtcgagtcgactacctggtcaatgcgaggcaacccaaaaggatctttagggcaggatttgttgaggtcagtataatcaacacacatgcgccattgccctgttttcttccgaactagaaccgggtttgccagccagtcgggatgaaggacttctttgatgaagcctgctgctaacagcttggttaattcctccttgatcgcgtctttcctgtcttgtgcgaatcggcggagtcgttgtttgataggcttggcatcttctttgacatgtaaggagtgctcaatcacctctctaggaataccgggcatatcagatggtttccatgcaaagatatctttattgttctgaagaaaggtgatgagcgcgctttcctatttacaatctaactcggcgcctattacagcagttttagtagaatcagaaggatctaggggaatcttcttagtcttggcttcgctttctccactttttgaagtcttggtggcgggcacttctccttcgctcgccgtggctgcagccagtcggatatcctctcggacagacgtcatctcgcgggtttgggccatgtcgcaactctccttgtcgcatgtgacggcttgcttgatgtcgctccgtagggataggactcctcggggaccgggcatcttcatcatcatgtaagtgtagtgcgggacggccatgaacttggctaacgccgggcgtccgagtatggcatgatatgctgtctcaaaatcggcgacttcaaagctgatattctctgtgcggaagttttcccgagtgccaaaggtgaccgggagggtgatctggccgagtggagttgcggataatcctagaattactccgtgaaaaggcgcattgcttggttttagctcggagcgagggatctgcatgtcatccaaggtcttggcgaagaggatattgagcgcactgccaccgtcgatgagggttctgcgaagcttgacattacggaccactgggtctagtaccagggggtaccgccccgggtggaccactcggtcaggatgatccgagcggtcaaacttgattgcgatttctgaccatcgaagatactggggcgtgtcgggttgaacagcattgatctcccgttcagtcaacttttgcttccgtttagactcataagccaaggggccgccgaagatatggttgagctccttgcggtggtcttgaaatcctgccggggcgtcgccgtcgtccttcttcctcgacgtgctttgttcttcgtcggagttcttccgtgtagtcttggtgtattgatccgcgaattgcttgtagacgaaacaatctttggccacgtggttggagttaggatggtgcgggcattgggagttcatgatcttgtcgaacgtgttgacgcgcgaacgctgtcgagaagagtgactggcggttgcaacaagttccgcaggcttacgcttgcggtccttatgattgttacttccacctcctcccgtagctggcgtacccttatttggcttccaactaggacccgactgctttgatgcggtgacggcgtcttcagctttggcgtactcgttggctttttcaaacataagcttgactgtcctgggaggtttacgcccgaacttgccgaccaattcttcgtggcgaatccctttggtgaaagcggcgatgataacgtcgtcggtgatgtcggagatcttattacgttgttcagaaaatcgccggatgtaatctctaagggattctccggacttctgaataacgttgtagaggtcgtattgtgtgccgggacgctcgaaggtgccttggaagttggcgatgaagtggtcgcgtaattcggcccaagatccgattgtaccacggggcaatccatggagccaagatcgggcggaatccgctaaagccactggtagatagttcgccatggccttgctgtctcctcctgctgcgcggattgcgagaccgtagacggtaagccacgattctgggttagtggtaccgtcgtacttctctattccagtcggcttgaagccggctggccaatccactcgacgcagatcgtcggtgaaggctgctactccgtcaaggtcatcgtcatggcggtccggcgaatgatgatggcctcgagctgctcggcgctgtatgatcgtgtcgcgaagatcgacggggcggcgacgaggtggtgagcgaggccgttccactcggcgctccccatgatggtcgggaggtgagtgaaccgcccgtcgtgacccctgctcctgcgattggatcctgcgccggtgatgctgaggcttggatgacggtagtcatgagatcggaagtggggaactcggctgccagtcggcgtgtggacgctttcggagttaactgggaccgaagccgcaatcatggtcttcgtctggttcaagatgttgacgacgtgatcagattgattgagctcgttttccttgaggagggtgtcgaggagggtgatcgcggcaaccgcattctgctgaggggtgcggaaaaccggtgtcccttcaacatcttgttggccgatgagatcacgcgctcggcgccctgcttccaaagctcgctgtcgtcgatcttcagcctccttcgcggtccgctcacgctcctgctgctcacgccgtaaccgttcttgttcttgtgcttgacgctcctcctccagtcggagacgctcagcctcgcgacgtgcttcggtctcccgggcttggcgttgctcctccgtctcgttatcggccatgaagacgccgaagtagagaggggtgtagttgtcatctaggctttcgtcgaagtcgtcgagatccggttcgttgtagcgagagctaaactcgtcgtactccacgatgtcggtggggcgcgagtcgacggtgggagagctgtagtagccgtccaactgatccgtcgaaaccgtgccgagtggttggaggatgacgccgacttccctgaagctaggcgaaatcggtgttgaagccgacttccgcctaggcctacgggatgaagacgctgtcgtgatggaggcggccgccgaatcgtcggggagcttcattaggatcggtgggtaagccccatcatcttgatctggtgtcgttggagaagatgcgatctcgcccgagtggtttgaagccaactcgattgagatggtcttgaagtaactttcagccgcgtttgggagtccaaacgggactgaaagccggttctctcccgactgggccgacaccgagtcaaggagagagatcttgccgaagttgttggtgacgaagtcgaggctgccgaaccgaaacgtctgcccgggtgggaagacgaggtcgtcgatgccggagacggaacccattgcactgatcggcgaaaagcttgacgctccccctacctggcgcgccaactgtcgaaactagatttcggcaataataaaagtgggtggctatcaagctggaaaagtgtatgggtttggaaacaaaggatttatacaggttcaggccttcttattcaagaagtaataccctactcctgtccggggatgaatccgccgagtgtattattgattgtatgatttggagaaaatcaacatctctgcccctagaggcacccggaccccccttatatatgggaaggagtccgtgttacaaaagataatctatatcctaacggaatatgcagatacaggtaaaatacagtcgtaaccgactaagtctcaaggtgtttccttgatgtacaagttaagaaacgaacccgagatacaaataagatattctatatatattcggtatcctatatccagtccaaatatcatcgccgtgtagatatgggatatccataatctccacacttctgcaaagaagggatgtccgaaccgaagcttagctgatcgaatcatatttttcaaaaaacacatggagtaatattatggctaactgcgtacattggaggaatggagtagatgctagctagtggaactcgttgtgtgctaacaaagccatatgaaaggtagctaaaattttgcaacaacagccttttgtaaaagaaataaagaacaattgcacaactatttaattaactttctagtcaagtggcgtgcatgctttttgtcatctctatatacgtaccataagccaccttcacgtacatgatgaacagtaaaattgcactggaattcaatcacataagaaagaaaaaacgagtgattacaaactcaaaggacatagccatgcaatccaggcaatggtgaccggcacattaaattgcattcaagcactatttttttaatacaatgaggtgcaaaatttttacatattcgtgaaaataaaatatatgtgatgttgcgaaataaactatgatgaaaatacctccaataactctagtttttcaaaattcaatttctagctgtgactgataagcagacgatgacaggcacacttgtcactattgcacccccaactgtgctacatatattgacctctacaaacctacgcgaaatgatcatggtgcttcttccattagtcagtccatcaggtaaaacaggctagctctagctgctctcgctgcagtgacacgaagaaaagctacagctatagagagaaggcaatgattagttagacttaaggtgtgatgttttcttctctttcctagaccttgtttggatccggaggactaataattagcccttcaaaattttactatttagaaatattaaacgtagattactgacaaaactcatttcataacttatgggctaattcgcaagacgaatctaacgaggtatattaattcatgattagcgaatgattactgtagcatcactgtagtgaatcatagattaattaggctcgttagattcatctcgcaaatcagcctaggggttatgaaatgtgttttgtcagtaatttacgtttaatattcctaaataacaagatttcggagggattagccctccggatccaaacaaggccctatcttctactctcacattttctgcgtacaattttttttgaacgaaaaatagcactagagtgccttttcattgaatagagcaggagaaaatacaacccctaggggcaacaagaaaaaatcgaggaactgtagttatacactatacatagtgtgggattaactcgcgcaaccgcttagcctctgctaaagcccaaaggctagcctcttctttgatttttgataggaggaaactcgttgccacctctttatggtcaaagattcaccgatttctattttctgcatacatatttcttaaactgttagtgtgtgttttttaaaaaaaaacataaaagaaaacattttataaaaccatattaacctattttaagctaatacttaattaatcacattaattgttaattgattgtttctttttttgtgcgggaaggaatgggttttaaccctcaccttagaagataggagtagcacagagtgtgagtagacgcaataagccctgcagacgccgcatgtacagactacagctcgagaagacgcactggaactagtctcctgcagatatttggatgggatgtagcagttgcagcggcagcggcagaaggagaagttgctggtaagaagtagcgcgcagctgctcctgcgcgcgcatgtacagggcgcgaggcgaaagcttgacgcggcaaccaccacccaccccccaccccgcccggctcagacctcgccatcgatcgacctgctcgcgctctctccctccctccctccccattgatcccatgtatgtgtatgctttttgcgccatatcccaccttttttccgtttcctgcttgcttgctttcctgacgagatctttggtttggttggtttctttaagacccgtgcgtccaaatcgccatggcttttcatcttgttttccttcttttccctgccctcccaggacaaagcaagattcctgtgtttctgaggcttagctgaggaaggattcggcctacctgctctcttctcctgcccggccgattgctacgacttgcaacacgcatcaccatagtaatagtatcgtcgtgttcactctccgacgacttaattgtgtgcgtgttgtatttcccaccgtcttgtcacttcatcacacatctggctacatcgatggatcactggtgctactagctagctagctcgctagttactcgattactggctgaattttcgcttctgtctccatctattttacacaaattaaagtgagctctcctgcgctctcaatttcattgctgcttataacttattgtgtttagcttggtaattagtgattgtttgtgtttgtgtttgcttttgctaggcttttggcgatcggaggaattgaaacaccgatatggcgcatgatccgaacctggggttcgcggattacttctcggcggcagatgcatcggcgtcgtcggtcacgacgctgatgccggcgatggacgaagcggcgccggagctgttcgggttgcaggccgggatggagcttctcggcgtgcgcggtctgggtatgagtatgatgcccggcgcggcaggcaaggtcgccgcgctggtggccgacgctggggacgacggcggcggcggctccaccatgcgcttcctcagcgagcagcaccaacagccgagccaggcgccgctgtcgctgtcgctgtgccgcccggacggcgtgctgcacctcggcggcgcggcgcggccgcagcaccaactggcgcccgcggcgccatggatgacgcaccacgacgcgtcgtcgtcggcgccgcaagtgcacggcgcgtggcacctgcgcagctcgaggttcctcctcccgacgcagcagctcctccaagaattctgcagcctccccgtggacagcaccaagcgcggcaacggcgccaaggcagcgacgcagcaagaagacggccgcggcgacgggtcgtcgtcgtcgtcggcctcgtggaccccgtcgccgcagatccaggccatggaagccctggagctgcagaggctcaaggacaagctctacatcatgctcgaagaggtatgagcgatcgatcgatcgatggagctaatataatccactctcttaatctaacaaatggaatctgcagctttggaaaggagctagtagtaaaaatggcacaggaaagtactaggagttccatcaatcatggttgcccgaagggtgcacctgagactagggcagggaagcgaccccattcttgggcctcaccattagcttttggaaacctctattcccccttgcctctctttagccttaggtatatggtcccctacgtacctagccggccggtcagccatggcttctgcttgctagcagcgacaccggcctctacccctttgcccatactttcccccttgccatgcacattcaatgcctcggctagctagctcatgccggtttttgctactgtgcgtgctgcgacgtttgcagagttgtggccttgtagccatagcttgatacggtactgggcactggcagttgttaccgtttcactgtttcattggctatctccatctttaccacgtccatacacgtacgcttggtgcagtgccctgtacgtgtactcctagctagacgtgcagatagatggctacagtgaaaaatcaagtaaagggtttcttaatttgagctaattaaattgatcgatgaacgtgtgtatttgtgcaggtggacaggaggtacaggaggtactgcgagcagatgagggcggtggccggggggttcgaggcggtggccggggagagggcggcgggggcgtacacggcggtggcggcgaggacgatatcgaggcacttccggagcctgagggatgggatcgtggcgcagctgcaggcggcgaggaaggcgctcggggagaaggacgtgagcgcggccgggacgacgcgggggcagacgccgcggctcagggtgatcgaccagtgcatcaggcaccacaagtcgctgcagggcgtcgccgccatggacagccacccgtggcgcccccagcgcggccttcccgaccgcgccgtcaccatcctccgtgcctggctcttcgagcacttcctgcacccgtaagtactccactttacattgttgtttatacgtacatacacgtattacgtatacatatatacacgcatgcatcaatcatctagctactttgcatatccatccatgcttgatcgatctccacacaatgcatttcttgcttgatcgattacacttaaagtaatgcagctgactgatacttaattagatcccgttcttttctccgacaaaacttggatgaagattaatattttcgtggcatgcttttcaaactgctaaatgctgtgttttatatgaaaaatttttatataaaagttgctctaaaatatcatattaatctatttttcaagtttataataattaaaacttaatcaatcatacgttaataccacctcgctttacgtaaaaaacttaatcttctttttcaagagaaaagaacactacacagtgtgctacaatgtatagcaatctaagttcaactgttcacgtggcagtcactagttagtagaattaaggtgacttttggttagtgcaatcacgtacagaacgtaagaatgtcagtgactaggtgtaatagcctagtagggccggtgcagtaatattatcgcgcgtgacacacaatttgctatggacggttgttcgtaattagctttttcgcggtatatatatatatatatatatatatatatatatatatatatatatatatatatataaatttattctgcagcgagcattgttctcccggaccacatttgtcttggcatcaaatgctcaagtggccgttttgccatattgcgcccctgcttaattaagcgtacacgtaatgtcatgtgtgtgcctcactattcttttgccatgcatatggtctaatataatgctctccttttttttttcgacaaaaataacggttaagtactctcgtgactgtggtttgtgcacaacgtaggtacgtacttactcccaaaacattataagtagctagctatgattaaagttgcgtctgtgtcagtggtaatatgtttgattttttttaagtttgtttttccaaatttattatttagctagattatactccctccgtttcacaatgtaagttattgacatcaatataaatatgaaaaatgttagaatgaattatattatgaaacggagaaagtagtatattttgtgcaatcgaatttcctatgaactctcaggttttgtattaacaactatttatcacgtgcattagttgttgcaatgtgctaatatatatacatccaaacaatatatctacgttattataagcttgaaccatatcgatcaatgattcaagcacgtctatttttctcaggttagcatgattattttctgattaacatttttttaataatggacacgattcacatcttggccctctaccaattaataaacacacggtcaataagttctaaaatatgaataaacagactcatcaaggttatgtgaatttatctgattagcatgatagtaattagtaggcctggagaattcattttcaccttgttttaataatagatgcatggatggattgtttgtcggaatattatactactgatgaccagtaatcgatttagatctcattatatttgcgtgagttgttgaatttttttgattcaattcgatcagattcatatatgcatcggtgttcatatgttcaatcccattcaggtatccaagcgacgtggataagcacatcctggctcgacagacgggcctctcacgtagccaggtaacatgttcttcgtgtattgatgcatatatactatttcccccgtttctaaatatttgacgccgttgatttttttaatcatgtttgaccgttcgtcttattccaaaacttttataaaatatataaaattatatgtatacataaaagtatatttaacaatgaattaaatgattaaaaaagaattaataattacttaaattttttgaataagatgaacggttaaacatgttcaaaaacgtcaacggcgtcaaatatttagggactgagggagtagtatagcctgaaccaaatcatccactaataccctaccatgaaataattaagagtgtttttatatatggtcctcaccgggagtttctagtataaaatttgttacttggatcaaatattaataccttagatatgaggaggtacgtagtcgttacctcctcaaatatcataaaatttctaaataatcatacaagtttaatttgagtagctagtttgttcatttttgggaatagtactaaatattgcgcccactgattcgatcgccgtctcgtagatgatacatcaattcatcgatcggttgccatgtcaaggtcctaccatgtcctcttgtgcttgcaaatgttttttggaaacgaatcttgtttagccatcgacctcccgttacaacgacatgtgttgttgttgcccgcgcgcgtttcttctgacaattcgatccatggcaggtgtccaactggttcatcaatgcgagggttcggctgtggaagccaatggtggaggagatgtacgtcgaggagatgaagggccaggacggcggcgacggcagcggtggacaggggagcctaaaccctaagcctacctgcagccacgcctccgaggcgcgcggcggccagcagctggtcgtcggcgatggcgacggcggcgaacagaagccgacgagggcgcagcttcgccacgacgccgggtcgctggcctccgtcgtcaacgtcgacgtcgcggccggcgcgggcggcgtggcccggctgcaccaggcggagaacttcggcatcatggaccacctcgacttcgacgcgtacgacgacagccaccaccagcagcagcacggcgggttcggcggcgtgtcgctgacgctcgggctgcagcagcacggctcccacggcggtggcggcgtgaacatcgcgttcggggcgccggggtccgcgcacggcggcgccgggttcttgtacccgggcgagcagatggcgcctgacgccatgcatccggggcacggccaccacgtcgtcggcggacagttcggcgtggccatggacggcgacgccgcctcgcacgcgcaagagcggtaccggagcctaagcgccggcttccacctgctccgcgacttggccggatgatccatgcggcgaactactcagttcatcgcacgtacgcatatatatgcattccgtgtactgtactagcagacgatttggatgtcgcagcggcagcggccgcggcggtggcgactaggtagggatcctcgcgcgcggccggcgctgcggcgtgcattggttgggcaaccgaattaagcgtttttgttggtggtggtccttgattttaccgacctataggtacagttcgtatatatctctcgcgatcgatcgtacaccagcaggggagtagcccagtagatcgtcgtcgatggcgctttcgtgtggttcggaagcgggcagtttattttagcctaccggcccggcatcggttgccgggggttgtgtggtcgtgtgttgtgtagtggagacagcttttatttgtactggaaatctggaatttgattgatggttcaacttaggccgccgtgactgcgctggaactgggactgcacgctatttgtatgcggcaacagcaacagtgctgcgacaggtccgcttcaaataagccacaaactactccaacctaactaatgatttaacggtgtaagaatgacttgtgtttaaaaaaacaaaaaaaaggggctatctgtttatttaggtttacaattttcgattcacaagtaagctagaccataaactgagagacagatatgtcccgtaagcatgctagccacatgacccaaattatctaatttggattcagcaaaacaaattacaccccctctgattcgtaagaaaaatataaaaaattatggattttatttctatagaaaaatcctaatgagttttttttaaaacaaaaatgttagacactatactttcacttgaaattcgaacgaaatagacaatccaaaaattttaaggaaagttagcaagagttttaacctcttgaaaaattttccctaagtttatttctctaattcaattcacgtgttctcccatgtaatattcgaacgatcaatcattcatgtattttccttgtcttatatatgttctctttgtttccaattgattatcatattacatgaatatgctaagactaagaaaagtcaataactctcgcacactacatttactccggtaacaaactcgatacatgcaccatctctgctcttaaccaataataaaatcacaagacattgcatgttagtcatacatagttatgtgtatggatgcatgcactaatatctatttactctcatacgcatatgacgaatagacttaggaaatagatttaacatggtcataacaatctataaaacgttatatgatgattaattggaaatagacaattttctatttctcaattgcgttcatattaaaatcaggtattttatatactttttcaagagtttcaaatgagtccttaaaaaataaagatattcgaacatatttctttaaatagtgggaaaaatccagtccatgcatcaattgtggatatataatgcagaaaagcatattagttgtcgatatccttgtaaacggtactagcatacgtgatttttcttttaataaaaagaactgcacgggaaattagttaagcagcaatccgacggcgtaaaaatttagagcgccatcagttggtctaataagtaaaagcaaaaggtaaaatttaattaaattttcgaacttgtatttgaagttgatttcaagattttttttaacgtaattcccttttagcattagtttttaaattgctataaacaaatatataaaagttttacatataaattaatttttattttctaataaaccgttttggcttatcggtgaatatgggcttaaatcgcttgcaccgccatcgccgtgcaactcaataatattcgagtgttgcttgctataacacggcaaaaggcaatcattaagcatactaattacaagacttgaaacgttagttgagatcataattaacgatttgtgtaaaacttcgaagatttggtcaggtgggaggtcactttcatatcatcagcaaatttctgtcatcactaagaagaagaggtgtccatcaccaaatgtgcgagattctcagctaggagagttggatactacctccgttttttaatagatgacaccgttgactttttctcacatgtttaactattcgtcttatttaaaaaatttacataattataatttattttgttatgagttgttttatcactcatagtactttaagtgtgatttatatcttatacatttgcataaaatttttgaataaaacgaatggtcaaacatgtgagaaaaagtcaacggcgtcatctattaaaaaacggagggagtatatggtttggccgcgtactatagtgattttgctcttgctaacagctagctgcgtgtctgtgtgcgcgatttttttttcggaaaaaaaataaaaaacaggatgcggagaacgcatgaacttttttcatttttaaattttttgttttaatatttatagaaatattatactggcaaaaatgtttacaaaaatatatcctgccgcacaagtggagagcggcaaggtgatgtggcacacggcgtcgtgtgcgcattttgcgttgaggtcccttgccgggtgaaatgcaattttcgccgcacgcaaaattcacatacccgctcagcggtctccggcgtctgctcacacacgtcaccctaccgttctcaaggagggttgcgtggtctatttatgtaaatattttcgtctgtataatatttctgtaaatattaaaaaaataaaaatgaaaaacattcgagaacgcatgggctattgggctgggtgctggagcccatggccgtcaggcccagaggagaaaccagtgatcctacaaacgcgacttgatcattgaccactgaccatgctatttatggggtaatcagtccaggttgcaactggggcctacaatttctgttccctatatgctccacagagcgactcgccctcaaacacgtagactggaacgaacgaacagacgaacacggtgcactccactactacgctatttttgaccatgtggccattagtgatctgtgctcttttggccgctcatcgatcttggccaccactgtcgtcgtcatctccttttccaggccttatttggcatgaaaggaggaggcggcgatcggcatcatcacaaggacgccattgtcatgcacgccgccggcaaggcgcccaagtgcaaggcttccttcttcctctgcagcctcctcctctactttctcctcccggtgctcgccctgtacgtcgttgccctcgccgtgtcgccgttctactcgggtagctcgtgcccggaggagagccttgccagtggcgacgttgcacatctcgcggccgccggcgatgctggcaacaggcgtaacgactcgtcgccgccgtctgatgacgccgcgccgaccgggctgggtcacattgtgttcggcattgccgcctcttcggagctctggaagagccggagggagtacatcagaacatggtggcggccggagcagatgagcgggttcgtgtggctggacaagccggtgtacgagttctactcgaggaacgcttccacggggcttcccggaatcaagatcagcgggaacacgaccaagttcccgtacacgcacggccgcggcagccggtcggcgctgcggatcacccgcatcgtgtcggagagcttccggctgggcctccccggcgcgcggtggttcgtgatgggcgacgacgacacggtgttcttcccggacaacctcgtggacgttctgtcccggtacgaccacacgcagccgtactacatcgggaatccgtcggagagccacatccagaacctcatcttctcgtacggcatggcgttcggcggcggcgggttcgccatcagccgcgccctggccgcgcagctggcgcacatgcaggacgggtgcatcgaccggtacccggcgctctacggcagcgacgaccgcatccacgcgtgcgtggcggagctgggcgtgccgctgacgcgccacctgggtttccaccagtgcgacctgtggggcgacgtgctgggcctcctgggcgcgcacccggtggtgcccctggtgacgctgcaccacctggacttcctgcagccggtgttcccgacgacgaggtcgcggacggcggcgctgaggcggctgttcgaggggcccgcgcggctggactcggctggcgtggcgcagcagtcggtgtgctacgacggcgacaagcagtggacggtgtcggtgtcgtgggggttcgcggtggtggtgacgcgcggggtgctgtcgccgcgggagatggagatgcccatgcgcacgttcctcaactggtaccgccgcgccgactacacggcgtacgccttcaacacgcggcccgtggcgcgccagccgtgccagacgccgcaggtgtactacatgcggcagtcccgcctcgaccgccgccgcaacaccaccgtcaccgagtacgagcgccgccgcgtcgcgcccgtcaagtgcggctggcgcatccctgaccctgccgcgctgctcgaccgcgtcatcgtcctcaagaagcccgaccccaacctctggaaaagggtaatcaaacacacaccgtagttaaaacctgaattgatttgtacaacaaagaagcttgatttttgtaatggtgctctcaaaccggcgtgcgtgcagtctccgaggaggaattgctgcagggtgttgtcgtcacccaggcaagggaaggaccggaagatgaccatcgatgttggcgtctgcaggggcggcgagttcgccagaattgaggtagccaggtaggccacctccattaacaattttccgatatggcattattgatctgatcaccagctcgcgcgcgttgcgtttggttcgcgcagggaagctagctaggatcagttgctaggacagcaaaacgagagcagaaggcgaaaaccatcaagcatcaaggacggtatcggagcaggacgcgcccacctcgcggcggtgcacggcggatcgctcggttactgcttgcttcggctaatgatagctgtaaccttagataataggtgtatgtaagtaaccgaactcaccttgatacaacactgtgccggcgagaatgtggcgcacttgtgggcgttgtacaagtacgggcagtgctgctgcgaacggcgacaggcttgtttgtttgtgagcccgtcgactgtcgaggtgttcaaataatctggcaaacaggtgaagaccagaggctacgagtgttcaaatagcccatgggcaattttcaaaaaaaaaaagaaagctcatgggccatgtatcaactaactgatgaataagttcactttgtcgcagagtatgaaattcatcgagttacaatgggatataatgggaaccgaaataccagatatattacagatctctttcggtttagggaggaatttcacactcgatgacaaattgaggaacctaaagtgaacttattacactaaccgaaaggggtgcaacctctgttgggttctttttccgagtcggcccgagatgtcctgacaaaatcctacttgggccgaagtgatagaagcgcaagcccaatagttcctttcagcctgctagagaagcggcatatacgactcacagcgttaaatgagcggggcagaagagctcacggctcccatcggatgcactaatcagttaaagaaaaaactaaatttcatatttttaaatttaattttaagatatttataacatagtttctttttcagcattgacttttaattcaccaataacgcatatataaaaattttatctacaattttatttttattccttagtaaaccgtttcggtttattagggaaaaagctaaacgatagcgacacaaacatcggtctactactcgcgtggtccgacggtggcgatctggtcgtcggctgcaccggcggcagagtgcggtttatgagcacacggagtgaacacaaatcatgttgcgaagataataatgtatgcaaattggaaaattatagagctacagcaaagggatagcaaagctatcaatcaggttctgggaagtggcaacctatgaaaaaagagagacacaaacaaaatcgagaagatggcatacctaccatacaagtagaagaacagagcagaaatttgcaatctgcagcatgctttgttttgagccgaacaaatcggtagtcagtgggcgggggggcataggaaaatgtgatgacccaatcagcgtccactccattgtccattccactattccagtattccaccacgcgctgccctccggtcgttgtcccatcttcctccgagtccacttccccgtgcccgactccacacaccactccaccgcatcgcactcgtccttccctctcccttccaacaccaccacccgcaccgtccgcacactcgtccgcttccgtctcattctctcgtggacgcggcagtggcgccacgaccacgcctccactaccgcctcaatggccaccgtcatcgtcatcctcctcctcctcccgttactcccgtccaccgccctcgccgccttcccctacttcctcgcctgcggcgccgcctccaacgtctccttcccaggcgactccccagcgcgcaccttcgtcccggacgctcccttcctctcgtccgccggccgtgtcccggcagtgacgagcaccggctccaacacgatcccccctctctacgctgccgcgcgcgcggccggctcggggttctcgtacagcttcgccgacccggacaccgccacggtcaacgtgtcccgcgtcctccgcctccatttcttccctttcaccagttcctcctctgtgaacctctcgtccgcgagcttctccgtctctgttcgcgatgcctacaccctactctcctccttctcgccgccgcgcgacggcgtcgtcaaggagtacttcgtcccgggggacggctccggcgagttccgcgtcaagttcacgccggacgccggctccaccgcattcgtcagcgccatcgagctgttcccggctccgccggagctgctgtggagacgcccggtgaagccggtgggcgccctggtcgacagcgtcgacgtgaacgcgtggccgcagcaggcgctggagacggtgtaccgcctcaacgtcgggggatccaaggtgaccgcggcgaacgacacgctgtggcggacgtggctccccgacgacccctacttctccagccccagggggctctcgcaggtgaactcgacctcgaccccgatcatctacggcacgtcgatcgggtacacgagggaggtggcgccggacagcgtgtacaagacgcagcgcgccatgaacatggcgagccagcagttgttcctcactccggggcctttcaacttaacgtggaccttcgcgcttccgccgccggcaccggggtccgactccgactacctcgtccgcctccactggtgcgactactcgctggtgagctccgttgtagcaacgggcatcgtcttcgacgtctacgtcgcgcagaggcttgcttccaaagacctcgaccgaaacgcggcggacgcggcggagcagcccaacgaggctttttacctggactacgcggccacggccccgaccaccgggaacctcaccatcagcatcggcaagtcggacaaaagcgatgcaggcggcatgctcaatgggctggagatcatgaagctgcggcgcgccgataatttgaactccgccggatcgcacggcaggaggaagaagattctcatcggcacgctctcggcggcgctcggcgtcgctgttcttgcgtgcgcgctgctctgcttgctcgccgtgctgcgcaggcgtagacaggcgccgactccggcgccggaggagaaggagagcacgcagctgccgtggtcgcagcacacgcaggatggctccagctgggttgacatgtcgaacgcgtcgggcgcgggcatgaccggcgggctgcacaggatgagcatgcagctcaacatctcgctggcggacatcacggcggccacggagaacttcaacgagcgcaacctcatcggcgtcggcgggttcgggaacgtgtatagcggcgtgctccgcgacggcacccgcgtggcggtgaagcgcgccatgcgcgcctccaagcaggggctgccggagttccagacggagatcgaggtgctgtcccgcatccggcaccgccacctggtctccctcatcggctactgcaacgagcagtcggagatgatactggtgtacgagtacatggagaagggcacgctgaggagccacctctacgggtcggaggagccgccgctgtcgtggaagcagcggctggagatctgcatcggcgcggcgaggggcctgcactacctgcacaccggctactccgagaacatcatccaccgcgacgtcaagtcgaccaacatcctcctcggcgacgcgttcatcgccaaggtggccgacttcgggctgtcgcggatcgggccgtcgttcggggagacgcacgtgagcacggcggtgaagggcagcttcggctacctcgacccggagtacttcaagacgcagcagctgacggaccggtccgacgtctactccttcggcgtcgtgctgttcgaggtgctctgcgcgcggacggtgatcgaccagagccttgagcgcgacgagatcaacctcgccgagtgggcggttagcctgcagcagaaaggggagctcgccaagatcaccgacccgaggatcgccgggcaggtgaacggcaactcgctgcgcaagttcgccgagaccgcagagaagtgcctggcggactacggcctggaccggccgtccatgggcgacgtgctgtggaacctcgagtactgccttcagctgcaggagacgcacgtcaacagggacgcgttcgaggacagcggcgccgtcgccacgcagttccccgccgacgtggtcgtgccgcgctgggtgccgtcgtccacgagcttcctcatggatgacagcgtgaccgactcggggatcgccaacagcaaggccttctcgcagctcagcagcggcgatggccgttgatcaatcagctggtcagtgaaccgacagtcggtcagactcagatagagaagtttgtaaccataatttttcctctctttttttttatgctgatctattctctgaatccaaaacccatgcacgtcgcagcaacgatacgtcttcagaaattttgctgaacacgaacggaataccgtaatctgcagcaaaattggtgttgcaattttttctgtccttgctgtctgcatcgtggattcatttcatatgttagcgcgtgacgaaatgacttgacccaggatgaacagatcattttatatgttcagatgagaacaaaatcctttgcctgttctttcttcccaattggccacgggcggccgttttatagtacaaacaacaattctctgcaggaccttgacagagacttgtgtacagttgagttgtattgtactcctacgcatgtctggcgtcaccctgatgaggccaaattctcgttaccgtgttccgcctaactctttgattataatgatgattataatgattatcttgttagtggaagattcattaatgggatcattcctaaactactggctttagagcataataatatatggttcacacgattgctgacctagaaaagccgccgtcccgccaaggccattagagaaaccaaaaataaaaggaacttttttttttccaaattcgatctcgccgaagcttttgcatactacgatgatcatgacatacacgaattgtgtggttagaactcagccaaactgggacgtgcatagctgcaatgcacgcattcttcagaatccccctgattgtctcccttctgctttgactggaaggacggcacgcatgcatgcgcccaggaagagtaataaccaggtaaagccaaattctttgggctatttccttttcgtttaattatcaggtgctgaccgctgaccgtgccgtcgtaatcacactgccctgctgactaatctaaaccattttttttatctattatcctttgactgtttaattttgactacaattccaagttgcaaccagaaatcactactgccctattcaggtggcaaccgatatgtccacggcgaaagagacagcccaaactgcaaggcaaaaggctatggtacttgggccaaaacgtgtacagatgctctcccctccgcaagcccaaccaaatccacggcccaaacgaaaaagataaaagcccacgctgatcagagcattaaaatacctaaaccaaccggcacggccacgacgcgtgggccccaccatccagcgagtcctcggctcgtcgcacgcgacgcggtgaattgattgatcgaccgattcctccccaactccgctcgccaatccacagctggcctccatttcttcctcctccccttcgccgaatcccccacaccaatccgccatggctagtgttctcgccgtccccctcctgctgtgcctgctcgcctccgcctccgccgcccgcttcgccccggcggacaaccacctcctcgcctgcggcgcgacggcaccggccgtgctccccgacggccgacgcttcgtccccgactccggctgcgcctccacgcgcctccgctccccggcacctaccctcccgtccgcggcctccagcgcggccccgcagccgacccctctccacgccgccgcgcgggtcttctcctgccgcgcgtcctacgacctcgccgtccgccgccgcgggtaccacgtcctgcgcctccacttctaccccttcgagcccgcgctcgcgtccgcgcgcttccacgtcggcgccgccggattcctcctcctccacaacttctccgcgtcggcccccgtcgtgaaggagttcatcctacccgtccactccgacgtcctcgtcctcaccttcgtccccgagtcgggctctaacgccttcgtcaacgccatcgagctcgtctcggcccccgatgagctcgtcggcgacatcggcaccctcgtcacgagcagcggcactgaccagaccaatggattgtcgtctcaggtctatgagatgctctatcggatcaacgtcgccggccgcaaggtcacaccgttcaacgacacgctgtggcgaacatgggtcaacgacgagcgcttcctcgtcagcacggaatcatccaacagcggggtctggtcgttcggtggccggattgcttatcccaagggtagcagattgatgacacgggaggttgctcctgacaacgtgtacaactcggcgaggtcagtgagctcacagggcaaagtgacatggggatttcccgtgcctgcttccagcaggtacctagtgcgtatgcacttctgtgacatcgtgagcaaggctctaaatgagctttactttgatatctatgtcaatggtcagctagcagtaaaggatttcgatatctctggtgccactggattcttagcctatccatattacatcgactttgttgtggatgttgaggatgaaggggccctgaaattggccattggtggctcgaagaatagccgatcagacgaagtgagcggtattcttaatgctgtagagataatgaggatgaacaaaacaaatggtggtattgatggggattttgcagtttctctgggcatggagtatgtggctagcaaggggatcggagaatttactcgctcactgctgtgtggtttcatttttgcgggattgttgttggttttgttaatgcttgtggtgaggttgaggactgagctgaggaataatggtacaacttggtcttggcagccaaatgattctggtgacgggaagctggctagagcatatcaacttgtgtccgctaagacagactattgaacatcatgagatgataatctttgaggagctttaaactgtggctgttgacctattgtatgtaatgacatattgcattacttcagttgtaagtattgtagttttacacttttactcccttaatggtaagttttcggttatttgagcttggctaatggagaaaacggtcgtggtgttgtatctggctcaagatatttgtttgtattagtactgcttttaatagctctatccagtttgtgatgcttgaatgaatatgcctgcaatttatctagtttatttatgcttttgtagtactggttattgttatatgccattactataattcatattcttgatatgaagatagcggctaaatcatggcaaatagaatctaccttccaatgttagtgttatttactattctttattctacttggtaaggcaagggggaagctcttgtagaaagccaattaagaagtagtagtatttcccttggttctactttttttttctttttgaaaaaagaaacttcagttacagttttggctgccctggcatcctactttggccctcatggcctcatcgctaagagcttttggtaatctgggctagctgtaacaattaagtgtctgcagatcatctttgtttgactgctgagaacttgtaaataacatgctaaaatttgacataatcacacaaatttcttaaacttggttgattcaatccagattattttctggagttcagacataccgagggataatactgctttggtcctttcagatcccaacttctacagaatctttgctttgcttatctatttgtatacgtgacatgtcttcaatcttacatgtgcaattgtttggattttggaattagactccaccgaagtttagggatatatgtttacctttctgttataagttctaacatatcttcttttcttaggaacctgccatgattcaacaattatcatcctttgatacttaatagcttttatttccgcctctacatctatatttcttttgaaaaaaaatgcaaagaagatgccttcctgagaactttgccatcctactctgcctgttgatgtcttttctggtgtgtttgtgtagtacaggagtaagtactatcattcatctatccaaacactagcatcttcctctgttagagcgccaaatgaaatattagtatcagcagaggaaaatctaccatatgcccctatccaaatatccaatgatgttattgtgatcttttttctgatgattgtttgtgccctcatttttttgggggctactgttgttattgtgcgggtgggattgcttcagtcctatactgttactgtgcaaaaaaaacatcttagggaatagttaattcttgttgggtttgtatgactaattgtcttatattagttctgatgccaaccacaaagaacctaaaacgctgtaacactcataggtcccaatttccctatttgaacaggttttggtggttgatgtgacaactgtattggtggtactttctaatatcatcactagtcattgtacttcaaaatttaattggaatctatcattttgtggctggcttttattgtgaatttgctttcacggtactgtatagtgtattaaacacgtcgtgtgcttttctaaactccttgttcctgaaaattattctgatcaatagtgatgtggtatctctggatctagcagtttccctcattttcctgattctctttcaatcgaaatgtagtttttctatcagtttttagtgtattttaaaaggactatgttttgaattatttttcataccccaaatttagcagcattcgttcccttgttaaaatctccagaaccttctgaagaatctgttactgcatcattgaaatgcatgctgagcatcttctgttgggttgctctcatctttgaaccaaattaatgaggattgtagaatcatctacttattttaggcccctcaatgtaaattggatcggcccatctaaatatgaatggcctgacatacctaactggcccaacacattatgcctcatttggcatggttcttgtactagaagactactaggctgtgatagtgtttcacatgccatagtttgaagaaagaataacttagggaagagatttttcatgttaaatactctgccatatggcggcactgcatgatagttggtgcatgtgtctcttacgagtcgattgaactgagcccatataaccatgttgcagaaacattatatccaagtattattttgcatagtaccttatagaaaggaaagacagtattaacaatcttgtagtcttctctcggtttttatggtttggttaatattgtttttttctactaatgttgtagtagctgttatgcatagccataagtcttcgaaagttaataaatgtcatttgacttggctttataagctactaggccagaatatgaccggcactgcttatttcaagaaaaacgtgcaaagcaaactgcacttgcatgtcccttaggaatgtgtagttgtaccagctaacaaccgtttgacaaggcatactgattgattagtgcttgatgtcatctgaaatcttatcttttgaaaactaaatggaagctggagaaactgtgacaccattagattaccattgtcaaaaacctctggattcaactattttttttttcaaaatggaagctggagaaactgtgacaccatttgattaccattgtcaaacacctctggtttcactatgaaattcatcaaaccatcaagctctttctgttacctgccagtgccctgccccttcttagggtgctctgatttcatttgcacctgtcaggtatctatagagagatttatttggtggaaagtaatttgactagaatttctgtttcgtataatatgatctctctctgtccaatacctcaaccatttaacttacaatgtcaagaatttgatttcccacttaattactaaaccgcatgctctttattctgtgcagctctatattaagtgtttaatttcttaaatttggggatactatgttcatgatgtttcaatattaaaaaaaggcatcttggcatcattcaatgtatatatgcatttatctgggccctatgtattcccaaaattatgaagtaaagtgctttgagtaaagggtgggcatatcacaactcatagaaagctataatctagtgggggcaaactgtactccaatgttccacaaaaggattaccagaagatgttgcattaaaaggtatggtcggctcatgctggtgcctagttcctctgcctaacctgatgtttttagtgttggaatcaagatctgtagtaaaaccttaaatccagtgtagggcacagccacacaaccgctggtctgctatcgccactctttatttttaccacttgtgtccaatatttgctgctatcgccactctttatttttaccacttgtgtccaatatttgcgaagttgttccacctttgcatctggatctttgctgttcatgtgacggttgcatgttatgagcctcacattttttttggctgatggtctcgtacaaaagctctctactatgctggagcacaaaatggaattatccttaatcattctacactttcgtctttgttagatgctcttgtgcagaaagtgcttttcaaaattcaatgaaaatgcctctttttctgcaaataagagagcgagaataaaacctttgatatcaccctttttctatctgtaatcactatgcccgaccattagtaaaaaagaggttgttctgctcaaaagttttgatcgattctctttcacctgcagctgaggttcttttttctagtgggcgtggcccatggaatgcctcaactttgatctttataacagcttagatgcttaacagcgacaaatcctttgcgtcaggcaaaataaaaccagcataccaatttgcgtactaatacagtaaacgtcaagcaatgtacatgtacagcttcaggacgccacatgtaagtatgcatcgatgcattgtcaactcatttttatccgtgtagatcacatttattttatccgtttacttttgtattagcacacatcagctctccctctgtctctcatctgctgatgtctttctgaagactatttatataggaagctttctgaatgctgtagttttcattttctgtgttctttttttctaattgtccagaacatgcatggtacatctctctcgtctatgacagcaaaaaaatgaaataaaatcatatacgtatatctatctatatgaagtgcttgcattttaaccttgattaataataacgctgtctaggatttgcaccatgttttgctgacaacaatattgaacctgttgctcgcagcaaaaccgaaccaaggcagcagcacacgagtggaacctgagcctagggcggagagaattagtatgtccgaatgtcgttactgccgtcctgttgattgtttacagagacaattgtcccatgtttaagggtctcagaacttgttttgccaggaccaggttcttgatccttgaactgtattttaattattgcccttgatatccaagcctgcttccccagctgcatgacaagcgtcctgttccatgatttgaatattgcagactgatccatgttgcctggcttcatttaagattggacaatgtgacacgatgatagcataaccgatgcttcattagcagcatcttatggagatttgacaacgtgaggaccacattccttggcttggatttagcttagcttagctctttctcccaggattaaatattcaaagatcattttactgatttcatgtgccatttcttgagctggcagctggaatttcgcagggtgacatgaccagaggcctggatggaaggacgcccgtgcggcagcgttgtcgcaggtttttttgtcaggattatcccaaccacccaactaatcccgtcatgtgttactctgagttttctcttagcagcataattttgtctttgacgatccatctgggcattatttaggatgtttagtcctaaagaaaagcttagtttgacggccagtatgttgaggtgtttgtcattttctttgtaacgaaatgactactttctccgtctcacattgacacattataatactattaatctttgtctcacaataagttaaattttatactaaatatagcatatcatagtaattatgaacatgaattcattactacgatgatgtatcacatgcagtattagattaattcattgagaaacaggagtacctaccgtttacccttggttgctcttagcttaatttggtggccttgctttttccagggaagaaatgctccattgctagctccctccatcgctttttagctgttaccactactgctactttaaaacctactcccacaactgaagataactgaaagtcacaaagaaatcttgcttaaatgtctagtttttgtcgacaaatatgtatacagtgaacccaatcattacagcatgtcaaatgactcgaattactccatgtttatcatagcgatgagtagggaaaaaatggattgtctaaaggtcagtctagcatgttctttttaagaattaaaacttatagatctacttgtatgaataaaataaataatatatactattaagcgagcaaattatttgaaaaaaaaaatctaagcaaggctgactaagaaagtttccgaaggaattgcagttttagaagcatgtcacgaataattcaattaatagttcgaggttgtaagctaaaagttgggaccttaagattttctaaagtaatttgctatacacctgaattatctcctctctctttattactgaactagcatggtggcccgtgcagattgcgcggctagcatcattatattttctctcatataatagcatatatgttttcttattatattattcaaatatattaaaatgacatcataattttaaattttgcaataactttacgaaactacaaatgtataatattcatattgtattttatatacgtgttagttattaattatttttaatatcaaattttagttatttgtaagttatatatattcctgtatagactctagactcatcttttcatatttctttttttaattctgaattttctgtaaattgtatttctatatagactctaggcacttcttctaatattatttatttttatttctgaatttttattatttctaattgtatttctatgtggactctaaactcatctttcaatattctttaatttttaatttcgaatttcagttacttgtattcctatattgactttaaactctttttcccatgttttttcttaattttgaattttagttatttgtaaattgtatttttatacggactcaaaactctacttttaattttattatgtttattctgaattttagttagttttaaattcctatatggactctatactctacttctaatattcctcattttttaatcccgaatttctatttttttcttaattgtatttctatatggactctatactctacttctaatattccttatttttaattccgaatttatattatttcctaattgtatttctatatggattctatactctacttctaatattccttattttaaattctgaatttcagttatttcctaattgtatttctatatggactctagtctcctcttctaatatttcttattttttaattccgaattttaactatttctaaattgtatttctatatggactctagtcttctcttctaatattacttattttttaattccgaatttcagctatttttaaattgtatttctatatagactctgctttttctttttctccgattaatgtgagaatttccaggctatgagagcgaacgtctaatattccttatttttaatcctgaatttctatttttttcttaattgtatttctatatggactctatactctacttctaatattccttatttttaattccgaatttatattatttcctaattgtatttctatatggattctatactctacttctaatattccttattttaaattccgaatttcagttatttcctaattgtatttctatatggactctagtctcctcttctaatatttcttattttttaattccgaattttaactatttttaaattgtatttctatatggactctagtcttctcttctaatattccttattttttaattccgaatttcagctatttttaaattgtatttctatatggactctgccttttctattcctttaataatataatagatttttcttcctaccatcctcctcaatggtgtagtatccggtgccagtaagacccgccgtaccatgccacccattcctcctcacaacctcggcgatgctagtcgcctccttctttcttgactccgatgaccccgcgtcgtcacctcccattgcctcctaactactctatgaggcttgatgaaccactttgcccccttatactcctccatctatagttaccctcacgccaacgctactgtcctccttcgatggctcctattatcggatctgatgtcaccttttattgtttcctaatcactcaaatgataaggcttttcctaccgtcattcttgcccgtgactgaggcagaaccaccatctcctccttgcattgtcatgtccgctaacccaccgttgggtcactactgcctcggtcatcctaggaacacctcccaccctcttctgccatcctgaccctgaaacctaaccaatcggagactagctaaagttcattagagatgaagacaacacacaaatctcagagaaaaattgcgatgttatgaattcagtgatattgcccacaaaaatgtcaaagtgatgtctaacaaaatcgctttctaaaaaactaaaatgtcatacctcttggcttcgatgacgtcactgctgccaataaggagaagatgcgctcctaattcgtgctccacaacatctgacggccacaaaattgactggttagcaactactccctctgtttcacaatgtaagtcattctagcatttgccacattcatattggtgttaatgaatctagacatatatatctatctagattcattaacattaatatgaatgtgtgaaatgctcgaatgacttacattgtgaaacggaggaagtaattagcagcccgtcaggaaaaaaaaacaacattctattaaaaatttcaagagaaaaagaacagagttttgcaatgagagaaaagagacactgcaggggcaacatggacattgcaccgaacggtccaaggccaaggagaggagacgaccccctatatctgcgccgtgccatgccgtgtagtcccttgcctgctcagcacgctgcactgcactccaaaccacacagcctcctcgtctcgtcttctgtctcgcgcgcgcacgccactcgctgggagctcatggaggtcggctcgctgcagcacctcggcgacagcttctcctaccggtggctcaagcacgcggcgcaggcgccgtcgttcaagcgcctcgtcgacgacgatgtcggcggaagctccaggtacttcatcgacatggaccccgccgacctcttctccatgcggtggacggctccgggcaccgacttcgacttcgacttcgacctgcccggcggcgacgacgatgccgcctctccgatcccgctgctggtcagcgcgagccagatcttccacgatggccgtctacttccccacgagctcgacgacgacggccgcttcggtgcccaagaagacggcgatgccgctcgcgtcgcgcacttgctgagcgagccccggctctcggcctcgtcgccgctgttccactcagcgcagagcacgccggcctcgctgagctcgtcgtccagcgcgaggagcggcgccagcaagaacgccagcgcgccgccgctgctcgccgcggggaggcgtggcggcgggtcatcgccgtggaagatactgctcaggtacctgcggttcctcatgccgctctaccggaaggtcagggcgctgccgccgctgcgtgctccgaggacgagggtctcgccggcgagccccgcgagcgcgagagcaagggcgtccacgtccagcatcgactggtgccacggcattgccgacacggccgtccatgacgccatcctctactgcaagaaatccagtgtaagtgcaccgaaaccatcaaacacaatcaagcaagcatccatgcacattcacacagatgttgattagcatttaatggcagttcttgctcaaatagtttcttgtcatatttctttcagggacaaaatatatagccaggaacaaaggattcacaatctgcaagagcatgagctgatcttgtggcctctcaactcaagatcctctcgttttttccaccattatttttgttgtacatccacataagttatacactgtatatgcatgtgacaagctgcatgaggagtacgtttaacggttgtaaacagctcgtttagggtgtaatagatggctccctttcttgtctttctcgtttgtctttggccatgtgaatcaattgagcatttctgaccattcctgttattaattaagtgaactaacaagaaattcataagttagattaaagcatctagatcatttgttggctcaatcatgtgccttttccgagcataatcgtgtccctactctaacataatccgcgggagtattattgtactagatctcagcaaagaaatcctggtaatactatactgctgatctggtactcatttagcacgttctgttaacttgacgctccagtggtgcctattttgaaattcatttgtaacaattcgatccccatgaattgaattatcctttccatcatatcgatgtgaaagttcaaaaacatcacttttatgagtttttttttctccgtgtggaaagtgcaaatttttagtgaaaatcatcctgactactcagttgtaattttgtgatttttagtcagaactttgttcaattttagcacaaatttaaaattcaaaacttgcaggctgctttaaaattaattttctaagtaggccttccaatcttctacttgaaattagttgcttcaaaatctcccttagaatttgcagtttaattttgaagtcttgaaattcgtggtttcaagttaattaatttcaaaatattgaaaaggcaaaatcctaacatagttaattgttgcgcgctatcatgtttgaacccgcaaaacttcgtcataataaactgtgtgttgcagataggattagacatataaaaattgcaacgatttagacagttagtaccttgtaatgcctccatgtccgtatccttgtttaccaagctcgaatttgaccagcaacaataatatataactagagtcataaattgttcgaagcaaaatcaattgaggtcccgtacacacggcaaccagaccaacaaatatctccaaatataaagcctaaatgcgccattaggatgggccattacgtcgtcgatgaatatatgattagtaccatcagtcgatcgattgggcaggagttgttcgtttttcccaccaacccaagagaaacagaaatgttcaacacaattgttaatttaaattcatgcacgctgtccttgtccaattacacgagaatgtctcaaaaaagagactctgtatacaagccagcgtcagcaacaacatgcatgatctctgcaagaaagcaactctaaattagggcagtaacagtatcatagacttaaaaaaaatgcttgctttgaacgacaacgcaggtaaaatatatattcatgaacagggatattgtttcttaaattaagaaacaggatgcaagaagaagtaaacgaaaggaacccccaatataatgcaaactgatttaattatgaacgcagcaatatgcaaattggattgcgacgcgtgattcgtacaggctaaatgattaaacaagcacgcccaattgcacgccaaaatatagcagaatcatttgtttcccgatggatcagcatagctagctagacacgcacacctgaattgactggctaaacccagaatcagtgagtgcagagccgtttggtgcatcagcgtgaatgcacggttgcagcaggcgtaccaaagccacgcagtcgcacacgtacacgccatgggcgttccaggcgatgccgtgtatatgcagatatatctgtatacgcacgtagatacgtcaaactccagtggatttatcgtctcaaaatggtcgtatcgatcgcgttttaaaatttaaacgtagcggtccatgcgataagatgagcaccgtacatggatacgaatcggccgggaccagtaccagttagcagataattaacgtgctcgcagagttgtcgtattgccgcaacagatgatagtactagttttcgaggcagaacgtacacagaccggaccggttcacatccattaccacataataatagtatcattacagttattaacatgtgagataatagaaggatgagattcatgtatcagtaactataatgatagtgatattatgatagaggctgtgtttagttccactggtaaaaaaaaattgtcgggtctaacatcaggtatacggatacggatacacatttgaagtattaaacgtagactaataacaaaataaattacataatccgcatgtaaactgcgagacaaatttattaagcttaattaattcgtcattagcaaatgtttactgtagcatcacattgtcagatcatggcgtaattagacttaaaagattcctctagcaatttacacgtaaattgtgtaattagttaataaaacagcctacgcgagctggttcgctcagctgcgtttggaacagcagccaacgagcggtcgagcagagtaaggccgaaatgagtagtagtttttgtcacgaggcgggcggaagagaggcgagacgtgcgcgagcagcggggcggcaaggggaatgagctgggcctacgtgcacgggagttgggtgttcggggcgggaccaggtggtgcacgcgtggatgggagcgtgagggggggtccgggtgatgagggggatcgatcggctggctcgaccgatcgaggggatccgcactgcactagcacctgcctgccctgcccgatcgatcagcgattcggtgcccaccgcggatgtactacgtacgtacattgcccttgtcgcaagctacctagcgttgcctcgttaacagcaggcagacggtggacgtttggaagcccacgaacagcggcagctcatcagccgatcaacgcgaggaagctcaaagcttgacgtacgacggcgtcatcgtactgccacacttggttaacggtttctgatgacttccagtcataagcctaccacatctgctccaaaataagttaacctcgtatggaatatgactatgtctaaatttatagtattacaatgagagagactagagaatgaaatctcattaggatgggatactttaagtgactttttcctgatacctgatacccgagtaccggctggtacctggtaccctggtatcgagctggtacctagatatcagaccttggtacctgggtaccaggcatcatacccagagagagagcgaacaagacaccaccgtcggccgcctggtacctgggcatcttgacttcgcttgaggcagagagacgtcgccgcagcacgtggcggcacggcacctggaccacaccttcgagaagctcgcgtcggcgcacctcccgctcatggcggcgtcgcccaccgagccactcacgctcccctgcctcgcccaccgcctcccgctcaggctccaccgacgaggcgcactccacttccttcgcctcttccctcgcgtgtttgacctccgcgccctgctcccgctctccctctcgctcaccgcgcccaccgctgagctcctcgctgtcgccaccttcgccgcctaccctacggcagcggcggcggcggcggcggccggctccggtgagcggtggggcaacgacgaaggggagggctgcacctcgggtgccatctgatttagggaaggagagtgaggtaggaggaggggatccggattagtaccccgtcttcatgggataccgatgtatagattttctctattacaatgtatcatatcccgtacaagattagtttatttggttcggatggagtataagagaagaaagccaaaataaaaactgtctttgtcaccatgcaacgaactactcgatctgcctgatcaaaaccgtcacagctcccggcccaaatagtaaggcgaagcaatacgctacggcctacggtagcgatcagctagtagcaacgcgagagaatgtaagtatgtaacgcgtagagacggatcgatcgctctcgtgccggtcggtcgcgggctcgcggccggtgcgcgctagttcacgtcaatcccacgtgaatgccatgagcggcaagggggtaagcggacaagcgagctatcagaggccctcgcgtcgcgctacccgccgctccggttgcggggggctgtagctgcacgggacaacgccggctttaatgcgcgccttggcgctgcccgcgtccgtcgctctcccggccggctgggatcctgactcctttgcactgcttttctttatctggacgagccaaaacctgtggtttcctaacgttttcagattgattgagatttggaggtttggcatgatggattgtgtttggcagcgtttcgtatcgcttgaaatctactacgtacacggtacacggcccgtccttctggaacaaacatgggaagatggttcagcccgggccattctcctcgcggagaaatcgaaacattaggagttgggccgtgagcccatctgcccatggcagatcaagtaagtggtggcctgtcatgatctcttccaggttaggaataagtctactttgcttttcttaactaggggtcgaatctgatttgtattcctaaaccataataccagatattttgacaccctcgactattaaaaccagtgcaatttaactctctcggcggtttcggaggataattttactgacatggcgtcccagtcatcaaataaattttttaaaatgtggggcccccttgacatctcatccctctaataacctctctctctctccttttttcttcttggcgcacggtggctgacggcacaggcggcgagacaacgacagggagcggcaacggcggcatctggcggcgaggacgttgcggtggggacgacgtgtgaagcccgagggttctcggctccttccatcccagaggcaatgacatccatgtggcaagggcccgacggagggggtgccaactgcggctgttatagtggtgggcgcacagggtgggctgcccgatggcagtagtccagggtgacgaggagggccccgtccccctgatggcggtggtatggggaaacggatgtcgctggcaccgaggaagcggtggcttgtcgtcagggctggatccagggcatcgctgtgcctaaggcgaggtcaaggcgggatatggatggtggcgtgttggcgatgacttgggggctcgaaggatggtgccggcagcgggcatggccaccctctagtggtggcgttgggggtgctccccagtcaacaatggagtcatgggtggcggtgacacaacggggttggcgtggcctggccggcgaatgtgtcgaggagctggagatatccccgcgcccctctccctcattctgttgttgcctgccgtctcgctcctcgtccaccgagtggcccttcatgcacggagcaaagggggatgagagcgggggaagatagcgtcagcaccggcctcgtcgactgcgtctccgccgatgcgagcttgccttcgctccgcgtgtgaaacaacaaaagaaagaaaaacagggagataaggatggtttctgacgtgcggaccccacattttttccctcttatcacttgtcggtcatatgtttattttttaatttatttgatgactggactgccacgtggacgtcacgtcggtgaaaaccactcttaaaacagttgagagagctaaattgagctagttttcatagttaaggggtaaagatatctagtattacggttgagggatatgaatcatattgaaagtatattttgagagagtacaagtggacttaatcctccaggttatggttgcgttcggctgcactagttgtgaatggctgcagctagcagccggtgtgaactctgaacagagcctatgcccatcgcctactttttgaagttatctcgatcaggggccccgggcaacttgtacacgccagccgaaactgtcagcaggcacctggccagctaggcggcagcgtatcatcgtcagcacccggtctatcaccaaacaatcagcgccgaaccgactatacacacgtagtactagtaattgaatcggtacaatgaactcgtactcacgaatccccttaattggtcaatgctcggaacaccaagcacaagtcaatccattgcacatgcaggtagcaggtgttgacacctcttgacacagcacatctgccgtcctgcctccagctcaagtggccaagttccccagaacaaaccaaaaccttgtgaccacaagctcacagcttttattgtcatctcacagtctcacagaccatctagaacgctgctcaaaaaatcaaaatcaggggttaaatccaaaggctccatccaaaacccagtcacaatgcagagctagagattaagcgagtctaatgcaatcataatccgttttaattaagctcctctcttcagagcaaaaggtgccaatagtttgacatcatatcgatcctattcctgagagccgccgtcggcgtcgagacataaaaatcacaaatggatcgtggagcatgtgcttgccgcaggcaatgatgaaggatcagcattctcctcagaacagaaacaacggcagcacaatacaagcatactaccttccagggaacgaagccgccgggatggaggcgagcaagtaaagcttcagggagccgcacagctaagcctagtgtgaacaataatccggcactaagcatagcatcaatttaatacaaatcggcagaaaagcagtgtgagtgtgtgaggctttgagctaccaccactgtgattagcacgagctcaaaagatgatattattcccatccaacgaatatttggtccgagtttaatagtggcacactccaactaaacaactgaaaccactatcacaacttgcagtagcagtataaatagggcactggtcagcaacgcatgctcgtcagacagcccaaaagctgagagagagcacgcatccaaagttccaaactagtctgcagctgctgttcgtgtgcatatccagtgagtgaagtgcaggaagatgaccaaccatggcgccacctccgctgctccgtgcagagatggtcacggatcagcagcaagcaggagacacatgcccaggcgtgggcagatcaaggcgaggattgtgtcggcagccgtgcactcagtcgcctcggtgctcttgaaagccctccacagcagccacatcctggtcagaaaccccttctgatggagctatcagctagtataccgaaattaggcgagttacctgttcggctgtacctggaatcagctggttttcaagtgtaagcatggttcagaaagtgatagcctagatggatgtactcatgtacatttctttctccctccctcgtttcgcatcttgtttgtacactagttttgttattatcaatcacacagtgtggttaaagattaagcaagctcttgctactccgacccgattgcctttctctgctaccaattccgcctgatgatggtgagggacgcgaaccgccgcaccggcgttgccttcctcttgcgctgccggtggagagaatggccgcctcagccttcagtttcgagaattgccttcgcggcctcacgggcggcggagaacggggatgtcgcagactcgtcgggggacggcgcgtgtccgcatctcccaaactcgcatgtagaacggcgggaacgagctctctcggtatgcacaacactgcagcaactccgcacgccggggatgtctgtgttgtaggctcgtagtcgtagccatccaccacggggatttagatccactgcagtcgactgatcatcggcctcacatatcaggcacgatacaatttgctgcagaggatcctgaatttctgatcaccgccacggcgccacatcgtccaacaagagtagcagggccgcgccacaaggctgcagaagaagggggacgaacgggaacgacgggacgtactagtaaaagtcagtaacggaaggcggcggtaggagagggggtttctcgtttagacccgtctggtaagtcgtactggattgcttgggtgtgccacatttagtgggctttctgaaacaaacaccgggttgcaattacggcccatgtaatggagcctacactattcatcctcctcttccttttttttatataactcctctgtcctcggctcaaagatcagaatgtagacaatctcaatcacaattacacccattttccccaccgtttcgaaggcatcccatgctccaattcatgatggcctgggtcatccgtgccaaacctatgacttcatgccaaacaagctttcggtattcgttacaagtcactactcttcttcatccaaaaaatataattaaaaaaatcatctaaacacctgtaagcaaaataaaattatttttaagagcttgttcactttgttgtcaaatcaattttatcaaaatttattatgttttaatgctaccattttttggtaccgttggatatgttcaatttgatgtcttctaaaattttataatgttttttcgagataaaatttttgaaacttctcaattttgttaggatagtattggcaagatcattttaaatttgttaccatactataaatttagtacattcaaagtgaacaatgtctaactccatagacatgtgggccatattctctctccccaagagtcagcttctatgcttaatgcccaatacttttattaggactgctaaaaagatgtctataatgtatagaaaattcacactgtggatgctcttataataaatactcactagtaaggatgcatttatcatgtgtttggtcatagggatatgatgggttgggttggagaaaactagttctttaaagtgtttggatcagggataggtgagatgagatgatcatgattcctgaaaagtaatatttccttcaaataaaaggctccatcccttaaataaaaggacggatcaatctaactcactttctctcttattggcatccgggacacaccctccaaacccttaaaaatagtaccattccaacccttgtggcaaacatatactcccaatcaaacacaagccatcaggcccgccagtccgcaacggcatcatggatggacataagatcgaggaagaagcaaccacgaggaaaagaaaacgaaggattcgccacccacgctagcaattttcttctgtcaattcctttcaccattttcaggctgaattttgtcaggcttccagcccaattaattaattaggagtaggatatggtcagatttttcttctggcaattcatgcctgctcgtggatcagaccgtacaatttacgagtacttcactgtttcctttctagagatgttgtgtttggtcagatttttcttctggcaatcatgccttatccaaacagagaatggcaagatatcatctcacacaaagaaagcaaccagccattagtccacagtggcacagtacgtgttgccttgcactcttcaccttcatcacgccctgcggctcaagattcgcatgctcgtgttgtattcaccttgcaaggcaaaacacatcacgagttgcacagcaaaccttcgcttggacagaacgagtccacagccttaaccgccatgcaatgcaccacctcaaatggcaatgggcattggcagaaagcgagatgtctcggccggttaaaagctccatggacgcagcacacgcaagcagttattgccacgtctattggctcggcaagtttggcatagcaggcagaaagcaatcaataaatagcacgcatttactggggggttaacataggcagggattgatacaggacacacccgtaatatcctccaccggtctaggcactttctgtatctatatatacgtaagcacgtcctgattcttgttgcatttctcgtcctgatttgcgtcctgcagctctctctcatcacagtttcgcaatggccaaaaaaacaatactgcaggtaagtaacgctctccgtctccgtccaatccgatcaattttcgtggcgtcttaggattattattttcttatagaatcaagaaagggaattttggttggttggttggttgcaggtggtttgcgcggtggcgctggtggcgctgtgcgcgtgcggcgtcgcggcgtcaccgtcgtcgccggcgggagcggggtgccggaagcacgtcgcgaggatcacggagtacggcggcgtcggggacgggaggaggtccaacacggcggcgttcgccaaggcggtggcggacctgtcgctgcgcgccggcgacggcggcgcggcgctggtggtgccgaaggggaagtggctgacggggcccttcaacctcaccagccacttcaccctcttcctcgaccacggcgccgagatcctcgcgtctcaggtgatctgagccaccaacaacatcggttgcatgcatcaaccccctctcttattaccatttaccatgattaactgcgccattatctctatctctatctcggctggtgtttcgccgcgaaagtagcgcatgttaaatgtccggttcctactactagctctaattcacctatagctaatctaataaccaatttatatgatagtcatgtcatacacacattgtatcttggagtcgagtccgtgctgcagctgactacatatctgtagctcactgcttttctctctcatcttttatctcattaaaatatattgtagctagctaatagtctgctatttttctctctcatcttttatctcattaaaatatattgtagctagctaatagtctgctattgtcccttctcttaccgtcacacttgtgaccaaacagtcacacgcgaccgccctaaagttggcgggtactagctacttccgttttattggcgtagatgatgctttttgccagggaaaaacgccttttttggtctggggtcccatatctgtcctcccaggctcccatctgttcttgatggaatctcaaactggcaaactgttaatacgaacattaacatgctaaatgccacggttacatgctgtattttttttttgtcgtaatcaaccttatctgattgtcgctctcaagaaatgggaggacaacgtattaaggcggcgcttaaatatgtgccaagagctgtatgttgggagcttgaacccggtgatgtgtcattgcaattgcggtggttgcctattgtaaggatgagctggtggctattgaatacatgtaaatgaaccggttttgatcagatagctgattaattagtttggaccattgaaggtcaatcgatgttaatgtgatccgtttcagttgctaaccgtgccgtactgagagaaagagaatggattgggagtgttaggacaaaagctctgccatgtcatttcagaaatttctactgttatatggttgctccacttttatgctttgaattttgtcagcacataacttgtggacctgctactcttatctgtttttgttcacccgttttcagttactagtgtaactggttcatctctcattatctgaagtgttgacagtctaagctgttcatttcgttcttcagaacttggaagattggcctctgatagctcctctgccatcctacggaagaggaagggacgaaccaggcccaagatacagcaatttcattgctggatccaatctcacagatgtcatcatcactggtacacgaatgaatgcgtgatgaagattgctattttctcaaccttttcgtgtaactgctgtgattgtggtatatgtttagctgtggatatctgaaattgagcaacatttcaggtaggaatggaacgatcaacggccagggccaagtctggtgggacaagttccacgccaaggaactcacctacactcgcggttacctgctcgagctcctctactctaacaatatcatcatctctaatgtcaccttcgtcgactcgccgtcatggaatctccatcccacctactgcacgtaagaatcatcagtactcgcaaccagaattcagtttctgaacggttagatatagatcatgatgctcaccttctttgtgttccgtgctgcgccagcaatgtgaccatcagcggcatcaccattctagcacctctcaactcgcccaacaccgatggaatcgacccaggtataaacatacaagtcacactgcacttgatcaatgctgccatgaggaaagcattggtttgtgctagatgtgatgagctcttgttgtccatggtgcagattcttcctcccatgtcaagatcgaggacagctacatcgtgtccggcgacgactgcatcgccgtgaagagcggctgggaccagtacggcatcaagttcaacatgccgagccagcacatcctcatcaggaggctcacctgcatctccccgacgagcgccatgatcgcgctcggcagcgagatgtccggcggcatccgcgacgtgcgcgccgtggacaacgtcgccatcgacaccgagtcggccgtcaggatcaagtccggcgtggggcgcggcggctacgtcaaggacgtgttcgtccgcggcctcagcctccacaccatgaagtgggtgttctggatgaccggcaactacggccagcacccggacaactcctccgaccccaacgctctgccggaggtcaccggcatcaactacagcgacgtgttcgcggagaacgtcaccatggccggcaggatggaggggattcccaacgacccctacactggcatctgcatgtccaacgtcaccgcgcagctcgcgccggacgccaagaagctgcaatggaactgcaccgatgtcaagggtgtcgcctccgacgtctcgccggtgccgtgcccggagctcggggcggcgggcaagccatgcgccttccctgaagaagagctcgtcatcggtccgcctgaattgccaacgtgtagctactgaaatactgatataggatgatagtatggtgtgggtaatggcctgggctatgagatgcttgggaccaaagagatatatatgatgtggtttagtgagtaaagttaagcagtttgaaaatgctgccggataatctctttacacccaattcatttatgagtgctcatctgcgaatgacctgaccaaagcaaagccttttcattttgtcttctgacagtaaatacagcacgtgacaagataacaaaatcatcaaacttctaaacgaaactttgcaaaaacaatgacaattgacaaagtgagaagcaaagctcaacgtgcctaggcagcggtttgcaatcaccgtcttcccctgcccttgctcatgaagtggtggcgcttcaacctcttcttccggatcaccacggaggacttgatgtgctccgcgaacggcatgccaaggagggtgagcagcctgagagcctcgttgtcggtcttcgcggtggtgacgatgcagacgtccattccattcttcttcccaccgacctcgtacgggatctccgggaacacgccctgatcacgaaggcctatggtgaagttgccatggccatcaaagctgttggggttgacaccaaggaagtccatggtcctaggaagcccaaggttgatgagcctatccaggaagttgaacattacctgcagcaagccaaaataagctcatcgatcaaacatattccctaggttcccaaatacttgtcactggatactattcatatttgaactttgatcacttatattttttagaaaataaaatgcatatacctaaaaatatgccatattattaaaggttgttactccacatagataggtattaaactttcgttcgtccaaccatttaaaatttgtggtcaatgtaaaatactgacggccaacggtgacaataatttggaactggatggagtaattgcaattctcacacatactttaggctattatactgtcatgcaaatcccaaattgatacaacattgcagtccccaatttgtcaatgtctgcatcgcaagtagccagaggtacagaggactcaccctgccgcggagcgtaacggcaataccaatggtgttcccctcgcggatcttgaaactggcgacggacttcttggccttcgtcttgacgggccactggccggtgatcatggcgaggtccttcatggcggattcgagccccttggagttaccggcttcagcccccaacccgcaattcactacaatcttctcaaccttgggcacctgaataaaatcgagaatccaaaacacactcctctaagctcaattattgaacaacaatcgaatttcccgagttccgcaaagaaatggccatgtctatcctataattgcgagaagggagacagaggtcgaacacctggtggacattggtgtagccgaactcctcggtgatgagggggaccaccttctggtcgtatacagccttgaggcggtgcaccttctgtgcctcggtggggtcgacgaggacgatgcccgaaggcgaggtcggcggcggcgccggcttgggtggcgcgtcggccgcggcggaggcggcgacgcggagggctcggcgaggaggcggggagcggaggaggaggcggacgttacgggaggaggaggcggtggtggtgacggggaagggggccggcgaggacggcagggtcacagccgtggccgccattggagcgtgcgcggagacggaggtgggagctgaggagggagctttatgccatggatggattacgggataaggcgagttggctgtggctggctgccgttgctgtccagtgtcgcaggtgggctttctcgtcatggttcggcccatcgaactgttcgacatggtttcaggccttaggcccatcaaaaccgttgatttgggccttaggcccatcaaaaccgttgagttgggggtgaactaaacacggcctaagagaagggtaaagttacatgagtcaacaactgcaagtctgcagtgtgtgaatttcgatatatgccttgttttggtcaaccggtaacagtgtttgagtatgtggcccattctgtattttctaatgcactacaggacatcactagtatagtagtagtatgccattaaacgatgacttcaaacataaaaaacgccgatgaagagcttaaacaagatcaagcaaactctgaacctagcaacagttgctggcagatcagcaggagatctgccacgcttgatcaacattgaaaaatggacggaatatcacgacgaggatcctcgtcacatgcttatgcctaactaatcatgcagtaaccgtaacatgcagttctttataaccaggggacaatcactaggatctgatttgaaaggtcccagatcacaacattgcgcttgccctaccttgttctaccaaggaccagcaatgccacgaccgtgatcctgtgaggatcgacttgacaccaagagtagaaacacaacggacaatatcttccttgtcagtttgcaacctaatcctgataaactacattaacctccttgacctcaagaagtaactgtcagtctgtgaccttgtcacttgtcagggccttaatgaacagccattcagcagtatggaggaaccgcctagtgtgcataagcttcattaattcttcttcacggtcaaaaagtaatcagccatgcatcactttcatatttacatccggcacatctcgtgaacaagagatacagaatgtcggcaaataaagaatataaaagaaagtacacattttatcagtgaacacctcactgtcagcagcacgactcaaccagactaataaattcagaatggtactgattaatatatatcattaccagcagtactagcaaaagcatcagccattcagccccagcacatcatttctaatacctgtgtgctccaccgtccaaatgagcttccaaatatctatctaaattattcttctattaacaggacagaaaagcatattacaaggctacaattgccactgaagcaaaaactaataagagatgacagcaaataaaaagaaaaaaatgtgtgataagtagctctcattggatcgcatctaaggtctctttcctcttaatcctcctcttgatctccttctccagctcctcaatcccacccacctcctccagctcctgtcaaccacataaaacagagacattttagaacatttcagacaatttttccgacgatcacaaatatttgtaatacatcttagaacatttcaaaatttccagtccttttatatcaacacagttcaaattctacattagcttcccaatcacaaattcatgcttgcaataaaggagtactgcaagtatgcaaactactcgacaaatggacaccgttggagcaggagtaagccaacaagcatccatggtagcatggggcacgaggaagcaaagcatgaatagcatgagacacatctcctcaccttgggaccaaggaacagcccatatggcacaccttcgaacttgtccatgtgatgtatctgcaagaatgaatggcaggcaaggatggatcagctcacataaattcagaaccacggcaagagaagctcagagacagggatgcgtggtcggctgcagttaggtggagagcgaccgggccggacctggtgggcggcggcgacccgccggaagtagggcacgttggcgatgggccccaccgggaagcggcggtggaccaggccgtcgtggacgaacatgtacgccatcccgaacagcgtgatcccgagtccctgcggcgaacggacacgtcagcacttggatcatctctgcccagagccccagatcacaaaaattcaaccttggcaatcaaattgaacaaaaagaaacgctgctagcgcttgtattttacttgttccggtgagaccgttgatgggtacctcgcatgggtgaccatggcgccgtcgcaatgcgacaacaatacctattgctttagtacaatctacgttatagggggaactatttaatcattcgagggatgttctctcatttgcttacagaatatccaaaggttatgaaattttttgacaacactcagataacatatctgtgcaactacataaaatcttatattcaaactcaactcacacgttgagatataaaaaattaaattcaatgtatgattagtagcgtaatgttcacatctgaattatcttttcttttattcgtgttgtgtatatggaagttgaacataatttttggtggactgatagatctcactatactctacattattactttttaaaaaaaaaaattcataactatttgtatcgaatttgaaagagaaaaatatacgagataacatccctcaaagatattagaatccattataggtttctctgggaactcatggaggccaggccactccgtttttctaaattttctcgatctcgaatgttcaattttttattgtttatccgatgcagcaaggacatcaagatcttttggagttcgctctacgctttggcttctcttgacagataaattcatttttttttggcaggcggccatggaatgtgaatgtaatcaactgaacatagtactacatcatgcacttttgtcattttaatacggccacgttaagcacgcttggtcaaatcctggtacagtgtgtttgagagaagtgatggggatttggttgaaatggaggaggatcgaccactcaccgcgccgaagcagaggccggggacgaggccgcgggtgaagaagccgtaggcgaggagggacatggccgggacggcgttggtgatggcgaagacgtcgttgagctcgaacggcccgtctcgcgggcggtggtgcgactcgtgcatgtgccacagcgacgcgtgccacagcgcccggtgcgcccaccgcgcccagaactccatccccacctgcgcaaaatggcaaggcaaaaccaacacggttacacgagcgacgcgcggcgtcgtgcggacggtgcgtgtgtgtgcgcttaccgcggcgcccaccgatagcgcgaaggtgccgaacatttccgtgaccgggatctcgccgctgccctggtcgagcacgcggagaaattttagtgctgcggcgaaggaattgccgaattgggtaatggtaagatgcgagcgggagtttggcgatggcgtgttacctacctccatttgccaggcgaagcggtagtagacggcggcggcggccatggacgtgatcccgaggctggacatcaccgctgccaccaggtacgtccgccgctccgactgcttccgcgccgcgcgctccgccaccgccctccgcgcatcctcctccggctccggctcacccaccgccacgcgcaaggggacggccagccgccgcgccgggagcggcgcgaacgccagccgcagcagcgccgggggcgatcggtgtgccgccgccaccgcggcgggggagaggagaggggcccgcgcggccaccagcctcgcgacggccatggatgccgcagccgcagcctacgcgaacgcggacgcggggatggatggacggttttgattgggcgggtgaagcggtccgcgtccgcctcggggagcgagaggcgtcgtccaagacaagtgggtcggatggagtcgccgtcgtcacgagtcaacttgtgattgtgagcatggaaattcgtgaggaacgccggctcggacccggtggcttttatataggagtatcaggggccatgtggaaacagcgacttattcacgttgacactaatttagagtattaaatatagattaattataaaaccaattatataaccttatactaattcacgagacaaatcttttgagcctaattatgtcatgatttgacaatgtgatgctacagtaaattttttataattatagattaattagacttaaaaaattcgtctcacgaattagctctaatttatgaaattagttttttattagcatatttttaacactccaaattagtgtccaaacatccgatgtgacacggactaaaaagtttttagtcccatctaaacagcccctcattactccctctgtttaagatggtataaattataatacaatgtatctggatatacctctgtctatatatgttgtattagaatatgtcacattctattttaggttgttttttttttctggagggagtaggcacgaatgcacgatgcggatgcgagctgagtcatgcatattttggaatggaattattctcagatcatcagcaattggtgtattggagattaaggtctttcctgaagctggggttatctcgttgccgctgggtgattggccaggttgaggccgcttgcctgagctaccgcggcgtcaggggcagtggaaaatgacattgcaggttcagggcacctgattcgccacgtggccgtctcaacgcatccgcgcacgcagcttctggtcagctatacaccgcgccggcgagccgtcctccgctgcgtcgccatcacaacgagttactcctgacccctgatctcaagcgtcggagttcacctttcgattgagcgctcgattctggtctgacttataaaggtgcgacatttttcatcattttcttatcgggaattggctgtttattatatatctaaattcttgaaaactattcaaaatctctttcagcatatactttcatcaagtatccaaacctcaaaaattctgagatttactatcggttttcgtgaaaaaacgtaaaccctaactgagatctgtatgtagttcatgttctagctcatcatcgttctgctccatgcatgccatggccaatgcttgctgggcacaataatttttaccaccacacttcttcttttaggcatagctcctttcctttgtcgttaaaaaattggagaggatagaacatctttctaaagtacgaactccacctgatcatgttcgcttatccagaataggaatgtggctgcctgccctacgaacgccgtaggccatggaaggggtgtgtacgtgtcagggcagcgtcccgacgcgagcgtttgcccggcgaatgctgctgctcgccgccccactacgtggccactggcatgtacccaccgcacttgccgacgcccacgctttcctcccgctgcagtcacgcttcagcagctcagcacctcccactcgtgaattgggcaccccatgaaaaagatggaaaaagaaccaaaccgcttcaacctcaacgatctactattaggggtttacaaaaccacacgattaacacacggttattacgattaccatgcacgataacctttgtagtttttaaaaccacggtatgtcttacggttaccgcgcggtaaccatcttaccgcgggagttcggtaaccgtattaaaaacggtaaggggaaccctactacttttactcagaaccttagatgctactcagatcactataaccactgggctatatgactatttacgaagccctactactatcccccttgattatactcgcaagaagagacatctagatcttttaccttcgccctggtgtagtcaagtctcatcgtttcgctacctgcttacctggtgatcggtggttcggtacaaacacgacggaatatacgagtgctctcgtggtgccgatggcgacgcgcgacgagaggccacctgacggcgacgggagcctcgccgtagtgggggcggccgcgccgcggttgctcgcgctcggcgacacgtacccgacgggggatttaggataactggttttcggaggtggacgtggtggtcaaacgcgcggtgagttttttaattgggggaaacttttggatgatttggatctccaagctgccgtaacagtgccacctattccattttcgcggtagcctgatagcgtgaagtgtgaaccctgaaatggacggataatggaatatggcaatatcgcatacggagtatgcaaatgaccgaatgtgtgtgtgcgggtcgtcgtccacgtttctcacagtctcacctgtctacgacagcaatcgactactactcctccgtctttgattttaatattttgtttgtactatttaatcatttattttattaaaaaaattatacaaatataaaaaataaaaaattgtgtttaaagtactttagataataaagtaagtcacaaataaaataaataataattctaaatttttttaaatgagacgaatgatcaaaacagtacaagcaagttaaaatacgttatattagaggacggaaggagtactacggattgattgatggatcgggatggctttgaggacaaatatctttgctatctgcttagctgcagtcgatcgagcagttaactaattggtttctactccatggagtaaaaggaaaaggaatgaagcatctattgttctctgaaaattgacaacagctcataccactaaacacgctaagcatgtgcaagaaaaataaaagaagagcggcaaaacatatactctctccgtcttaaaatataacaacaatcaatcttgtatgttcagatttattgtattagaatatatcctatccagtacaaagttgctatattttgaaagagatagagtagcagtactaaaagcgctaaagcatgtttttagtaaaagaagaagaaaaaagcgactcaagttctcaaactcatgcttaacacgctaaacatgtatagtaccaacagtacatgttttagcggcacctttgaaaaactaggggcacctttgaaacgtatataatattaaaaaaaatagatgaataaaaaacacataattttaacagaataaaagtacgaaacaaagtccattaacataattaattgagtattaattattacaaagcttgaaagataacttcatttgacttttaaagaaatttctatataaaaaagttatttttagaaaaatcatttagtcgtttagaaaacatgcttatagaagacaaagagttgtaattgctaaacgaaaaaataaacgaggccgaagtgaagctaaacaagctatgaaattaaataaaagaaccaaacatgtactaagtaaagctaaacaatcttttttgtttggcatgaaagctaaacaatctaaaacatgtactgccaagtaaaacaatatagcaaagcaaaaaaaaaaagtaaagctaaacacgctaaaaacatgaactaccaagtcaaaaagctaaacatgcactaagtaaaacaggtacgaagtagaagcacatttcttttacccattcataaaataaatgtactaaaaaaacctgaaccacatgtgttcgctatttaaggttcccaaccagaaccctccgtacggaaaacggagcgatccattagcgcgtgattaattaagtattagctatttttttttttaaaaaaaagattaatttgatttttttaaagaaacttttgtataaaaactttttcaaaaaacgcaccgtttaacagtttaaaaagcgtacgcgcggaaaacgagagagaggggttggaaaaggggtgtccgaacacaccctaagtagaagcaactaaacatgtactagctgagaaaaaaaagtagaaataaactaaacatgtataagtaaaataataagcatgaaattaatacacgtgctaataagtataaaaaagaacaaggtaactaaacatgtactaattaagttaaaaaagtacaaagcagctagacgttgtactactaaataaaataactaacaaacatgtaatcaatacatgtcccaagtaaaaaaaatgcaaagcaactacccctctgtcaaaaaaaaaaaaaggtccaattctaaggacaaatctggattctgaatacatgcaatccagatttatctctagaattaattttttttgacagagcgattaaacttgtagtagaaaaataaaataaaacatgggccaactaataccacctaagtactccatccgtctcaaaataaatatagttttgcactattcatgttcaatgtctgttcatcttacttgaattttttattagtatttttattattattaaatgataaaatatgaatagtactttatacgtgagtcttttttttcataattttttcaaataatacagacagacaaacgttggatacgaatatccatggctacacttatcttggaacgaatgcagtatatactaactccgccccgaacaaatataagtctaggttgtttagcatgtattaagatttgtgaagaaagattattatgcctcgcattaataataggaaataattttaatgataagtaaatgatgggacaattaagaatattttattatgacaaatgttgtaagaaaaattaaatcatagaaatataattattatgagatggaggtagtaatactaggacaataccaaacatgtagcaaaaaaaggtaaaagttgaatggttgttaagggtaaaatagaaaaaaaattaaatgataagtaattgatgagacaattaataatactatattatgacaaatgttgtgggacaaatttaaattaaaaaatactaggacaaaaccatacttaaaaagtagtgggacaaatttaaatataaaaatactaggacaaaaccagacttgtttaaaatataaaaaatactaggacaaaaccatacttaaaaagtagtgggacaaatttaaatataaaaaatactaggacaaaaccatacttaaaaagtagtgggacaaatttaaatataaaaaatactaggacaaaaccagacttgtttaaaaaaatttataagtgtggctgctgggattcgagcccaggtctccacggccacaacgtggaattctcaccactaaactacagccactttattaaacaaggttaattagtcatcatatattgaataaaatatggttaaagcacaagaacaaacttccagagcattttttgcacgcaggggcagccggtagctaaccgtatctgtttgttattgatcgcagggcaaaatttgcagcttggcatgctgaaaccgcgatatacatttgtcgggcagatctcagtgttactctaagtctgaatgataatagacattcgcttcttcagtaattttcctccaccctcccattgtcattgtcgtgttcttcaagttcaatctgaattccaattctcaagcactgatcgttccatgaccccatcggtaggcaaaggagcaacaatttctacagattttcctttccagaaagcgatctatagatttcaccttcaatcaggaaggatactggaaggtagcaataagtgaaccgaacggcccaagacaatccatcacaaggatggcccatgtgaaagaaaacccacccaactgcaaattactaaggcccagcctgggcaaccaatcaccgacctttccagagcccaccgtatagcaactccgggcctatacggcacggcccgttatcgaggctcaccaacccgagcgggaatctccaggcaaaatcatcggctgcctcaaaacccctgagccgtgcatcctagggtttccctctcctcctcccctctctccccgtccggcaacgcagcctcaccgttcaggcggcggcgaaggccgcgtcgaccccgcgcagcgcaggcgccatggccgccccggaggcaccctcctgctacgttgggatcgcgcggcagtccgccgccttccgcctcatgaagcaaatggtgcgtgatactacctaattcaaagttttcctcatgcgttggggcatgcagtatgctattgctagacgtaggtttatgttggttaacatcggttgatcctgtcggatatggagtctgaaggagttgctgttgttgttcctgttgaattgtaactagcaacgtttgttaatgctacggagtggaatttgggaactgccgcaaacgagtgaacttggcttggattttggaaaggagttgaaattcacattcttcacgagttatggctgcacatagattgaatttagtgtagttaatatttctaatcgaaccaaatgagtaacgtgaatggaatggtggtttgcactccataaacaagtttatttcgtcagattatactgatttttctgtaatttagatttgttctctttttactgattttaaagtgtagttagcattttttttttcattatgctttaggggtgggaagaaggtgaaggccttggtaaagataagcaaggcattaaggggcatgttagagtgaaaaacaagcaggacactcttggtatgtttctatatagatcttctactttagaagtctatttgtaaggatatatatccttgttaaccacccgtgggctctcttaaacctaatctgatcgtttctgcaggtgttggtgtagacagtcctcataacaaatgggtatatgacaccacccaatttgacaatatactaaagaaactgaaagtggtatggcgtgtaacaattactttgtttgctctatgtataaattggtcattatttcagttcctaattgtttcctattatctttttcttgtcatttgatcgttgctcccatcttctttggcagcaatccgctactcctgctataaaaggtacctgacggtgtttgtgcgtatagttcttattttcatcttgttaggtgttgtttgataacatttttggtgtagcagaatttgaagatgatgtaagcaattcaccagatagtacaccaaaggaagctaaaccaacaaacaatgaagttaccaaagttacccgaccccaaggaaggttggtttgctcccatagcttcagtatttgtatttctgtatctattttttcttctctttacagtttacgcaatacttatttcagatataagaaaagagagagggggaaaagtgtgagcggttattcagcaaaagatcttgaaggcatacttgtgagttgttattcttatgtgtgcctatttctttcttagctaatctagttactatccatgagcaatttttttcttgtgcacctgtgtaaactgtgtaacttactttattacatgcatgaaatattgtgtttgcacaggttcgcaaaagtgatgacaattgcaaagtggaccaggaagttgaaccaacatgctgtgatgaacctgatcccatcatctgtcaagatacaggtctgtaatttgcatgtttagtttccccatcattgcttcttggtctgagccaggactgaggtgccaaacttttagaactagaatgtgtacacactgcatacaagtcactgaacagctaaatggtaaagctctgctgattatactcatatactgttaattttggttctctactagacgagatctaccatgtcagcatctaagttgctaattgcttaccagagtaaagcacattttatttgctctctaatctttctctcttcactaatggtttgaattgtgactacctgattggttgtactgcacatggtctgatgcttggtttggattgaaatgattctgataaatttgttactctaaatatgtaatcttcttttgagaccatagactaatatcattgagattttactaatagttcatgacaactctctgttcagtatcgcaagctgatgatgtgaactggtgggggcataaatttggattcaagtcaggcggctttctaggagcaaaatcgcgcaagaacaaatcttctgctacaaaaggtacttcaaatgtccgccagacatttggggaagaagaccaagaaaacctatacaatcttgttcaggttggtattaacagtctatcagatctcccataatgtcctataacaagactgtccatttcttaatgtgcttttagagactttttaaccacatataagcaacttgcctttgaattctatatttttcttacagtttggcctgaaattgcaaagtcaatttagacctctgttgattgattatcgaacaaatctgatgtatttaaaaacatatagatatagctgagttctcaataatatccattccatctaaatggtctttgtaactgctgcaggacaaagccacatctggaaagcagggtcttggcattaagggtctgccaattaaagttgccggacaccgttggaaagggaacaaaacttcttttggtgatagcgatgaggaaaattcaacccaatccaatgaattatcagagttggaagaagatggtgatgaggaagaatctgctaacgataatgaactaatagacgccaatgtgaatactgtgaaagaaatgtgcgtggatgttaaacaaaaacataaaaccaaggtcaagaaactttgcaaaacaattcttcgtcaggtatggttgtttaattatcatactctctgtatgtggcttcatgtgttgtgccgtaatcacaacgtttatttacttgtattattcccaggccccagcacaatctatgaaattgaaggaacttaaggtagctgttgaagcacattcagagtctatgttctccaacttctcttgtaggcgtgaagctctattgttcttaaagaggaaggtacgggttttctttttcatttggcagaggctttgcgatctttctctctttcgttatggagtaattagggagcacctactatagaaggtatggtatgtagttgcataaagaaaaacagatagcagatttggttgcaatgtaacttgttgggatcttcaccatagccattgtatcatcagcgtgacctcattgaattagaacagaagctctattgagctacatgttgctactgggcagcggtgtaatagccttatttaacctttttctgtctattttgcagctccaaggaagcagaaaattcaatattgatggcaaacgggttcagcttgtatcgtaaattacgaagccgttcgggtgtgacatgaagccattgtggtcatattaggctattcgtgcttctgatgagtgtacgaaagtacggagcacagtatgctctgcggtatagatgtaagaagtaatacccctcacgcatggggggtcaaattttgcaaaacttacgaacggctgagatgctaattgtgtgtacactgttgagcacatttgattttcatcgttcatttccctacagcaaatgtttggcagccggttctgaataccaatgcacgtcaatattgtaccttagctggtgtattagctggtgtatcttcaattattatacttctgtttggagcgtgtggtatatgattggagctagtttgtgccaacgttcagaggcgctctacttttagaacatgttttttgcacattgattttgttattatctgaaaccggtgccaccccctgatgattttgcctgattaattcgtcatgctagttaaaaatatattttatttgttaaaaaaaatattgttgtattgatatttaaatttactttcataaggttataatatatgagaagttagaaggaaaaagattagttttgaagaccgtatcaactttgatcgagctttgtattatattatggaatagagggagtagtactgttttaatttcaccagataagatatacacaaaccctggtgattgtacatttctactgacctgccacgtggcactttacattcgcatagtcagcttcgttcacagcggtaggcggcggcccggcgtcttgaggcgatgcgcattggtcgggggaattcgggataagcagcgaagtcattcatggtcgcgccagcgacgccgaggccgtcgcggatcctgccgcgagcgtcgcactcccactcccagccggccgccgtcggcctcgcgtccgaccgcgccgccgccgccaccgtctcctcccgccgccgccgcaacttcgtcttcgtcgtcaacccctccggtactcccccctcctccaccccgctacccttaccccctatcctatgcgcgctctcaacgcccttcacgtcgtcgcaggcgccaatggccgcacgggcaaccagtggaagcagctgctcccgcacctccgcacccgcttcgctgaccaatgcgatgtaagactttcgatttctcttagatccctggatcgtagcatcctgaaccggaagctgcaattgctgtatgagaccatatttgggatcagatccccatgctaatttgggggctctacggaatgttctgatttgttggtattgcgtgatcagatttgtgagtgcatcacctcggccccgttcgacgccatagatatcacgagggaggtgtgtatgggcttcctatagctgccagtatccaattgttaatttccccttttggttttcttgttacaatgtgtgtatgatgatgatgatgtaggctgtaaaggatggggctgatgccgtgattgctgttggtggtgatggaacacttcatgaggtattatttgtgttgacttttgcaatatggatacaacctttgtactaaatttgtccagaaacttgatattcaaatacggtaatatttgtggatggaatgtgcaggtcgtcaatggcttcttctgtaagggaagtcctgtccatgctcttgatcaaggacctgatcattccacagcgcttggtgtgagtgtacttagtttctagctattctatccaatcagatcacccttctagcctcttaaattaagcattagactattctgaactgaaatgtttgtttatgcactggaatttgttcggtagtgaagcggattgtttttctctgacagctcattccacttggaactggttcagactttgcaaggacatttggctggtatatttctccagcataatctacatatggtgtttagataacctctactttcactgatgtttctttcttttgtgcaaccaggacaaatgatcctcatgaggcgattgatcgaattgtgagaggttccttctttgattcttcttttatagtgtgtgctgtcagtccatactcgtggtctcatagtggtcattcatctcctggtatatgtatatgaatgcacagtaacattattaaagtaccagttgtcatatgactagccaggtgattgggtttgtcttaaaagatttgaaataaagtttttggaagcataacaatgaaattgctattataaactggccatcttcatgaaaatatacaaaaactagatttatgtctactacgaattcgcaatcataacatatgaggctcacaggtgcatatttttgcaggagtcaaatcaaaactagatataggtatgatggaaggcccagatggaaacccacattattttgttaatgttgctgatatccatttgtaagtcaagcatggctcatttgacctgtgaaattcaatggatggtttgaaaaggaaaaaattgctctgcacctgcaggagtgctaaggcgggttatttttcttctatgtacaagagatttggcaacttatgctatgtttttggagcgctcagagccttttggggacatagtaatcgagatcttagaataaaggtttgcatcgcactggttttagaaggaagcttagttgcaatcttactgatttttttcgtcattatcagtcccacacctcttgaatttactagtgcatataataggtaaatggtggagaatggaaaaccattcgtaaagtcactgcactatgcataggaaatgccaaatacttcggcggtggtatgaagatcactccaacagctgatcctttcgggggtgaccttgaggtgcctaaaaagtcatttttctttatagttttgagtaagcattaagaaaagttagcctttgttaatttatgtgtcatttcataggtcgttattcttcaagatttcaaatggcatgatttcctgctcaagcttcatagattgtatggaggaactcatctatcagtgactggtgtgtcatcgataaggtaaggggactccgctaatgaatcttagtgttgctctacttactttaaacaatgctgagttaagggttgtacttctggttggtttcatccaataacccttcagttgttatttggcatataggtcagatctccggacagattaatcttgttagcatcatcactggtagttttgcaatgacatgatggcaatcaaaattgttgaggaatatttattcgagctctatgcctctattgctttcctcctgatatgtgtctcattagttctaaaacaggattcaatgtttgttaagccttctcaaaatagctaacatcactattaggctgtttaactgggtattctatttggggtcactaagtgacaatatttttgtcgcagagttcagtcgattgaagtagcagaaaaggaagttagtgctgacatctttgtgcaatctgatggggagcattttggttttcttccaaccaaattttcagttcttcccggtgcagttgatttcttctgctagattagtatgcttcttcctgtgggatacaaaggtttcttaatccttgtcaagtcactacgtgtactttgaactagctgtgttattttgaagtgatatcgtaattgaatagttacattcattttctggcaatacatgggataaaatctgttgtcacccgccatgtaatgactataattatatgcaacatttgctaatcaaactaccataaaaatttggtggtgacggtgcactatgaactgtttgaattatactggaccaaactggcatcaatgtaaatgacacaatgacttttaggcttgtaccctgtgtaatttatacttttgccttttgctcaacaacagaaggacatagttagctgcagtttcaatacaaaatttatttaccttcagcttccaacttcgaagttactattcttactcatagtaccttatgaatcagtcacacgatgtactcctatatgagactgatgctgctagaattcaccacccaacgttttctcaagagtaaattgcactttacactggtaaaacgcacctatttttgctttgtactaattttagcacatactttcagtttttatcagttgtactccctccgtctcaataaaaagtgcacttagtattgggtgtgacattttatagaacacttatatgaaatgtcacatccgatcttaggtgcacttatattaggacggagagaatattgaaataagtttcactttatgttaggatacatcatcaaacctatagaaaattcactaacttatataaaatttgaataaaactttgtgaaacatgttctaaatttgaatgggtccataaattccacttgtgttttataagattttctttcaattatgtgctgcaatctagaataatatacctgcatggaagtcaaaatatgtactaaagctggtgcaaagccaaacaaagatatgctctacccaatgctatgtaattcctccgtcccaaaatgtaaagagttttggttgaatgagacatgtcataatactacgaatcttaacagtagtcttacggattaggatgtgtctcatccaactaaaacttcttgtattttgggattgaaggagtacaatatactcttctcttaatttgtttggttcatctattattttttaatgggtatagtattttgttagggggagtactaatcaattacacggccgtacctgtgattatgaagtcgatttaaaatttctttcttgtgaagtgattctcaagcagagtatttgctgtttgttccttccatacgtaaggaataatttctgttgcttgaaaatttaaatggccattgagatactcctagaaagtaccctgtcccctgatgctgcggcaccagactttaaccctgtctatgacttgactttattctcataatctgccatgttctcctgtagccctgtcgcttgaccatgacgacgtcatacttatacgttctgaccttgtaaaacttgtactccctccgtcaaaaaaaaaaaaaagacaaaccctgggtttccgtgtccaactttgactgtccgtcttacatgaaattttttataattcgtattttcattgttgttagatgataaaacatgattaatattttatgtgtgacttgtctttttaatttttttcataatttctttcaaataaaacggacggtcaaacgttgaacacggaaaccagggtttttctttttttgggacggaggtagtacttcctccgtcccaaaataagtacagccatggttttccgcgcccaactttgaccgttcgtcttatctgaaaattttttgaaaaaatttgaaaacataagccacgagtaaagtactattcttgttttatcatctcataacaacaaaaatgctaattataaaaaaaattaaataagacgaacgatcaaagttggtcgcgagacgaaggtagtactacttacagcagctttggtcatgaacagcgtgaaaagaaagtgtgttccttctccgctgccgcctgggcaaagaagacgaaaataatggtagaaactggaaaaaggaaggaaggcttgtccaaagcataatccaataatcctacgtcgtgacaggtacggtatccgttttttccccgtacgtccttcccatgtgatgcgtcaacagttaaaaaattgccctcttttgctcggctcatccgcgcgccgcgcgcgtctcggccaacattggcaaacacgcgacgcagccaccgttccgtccccgcatcctcctgcgtctcctcgtgctcgtgcggctctcgcgctcgctgcgcgcctgcgccgaatcgagcgaacgccgcagccgcaggttgcagcgcgcgcgcgcacgtcgtgtgcccgtggctgcgtgccgcgagtcgcgacgccatgctaaaaagaaaaaaaatatcaccggacgcatcgcgtcgtatcgggcggagcacacgagtcatggacctgtacgacgttgtgggggcgtgagttttactcgtcctcatgtcatgtcgtccgcgagaagcaaaaggaatttacgcacgcgctcgtgggtcgggtcgtggaacgtgaacggcttgtacgtcggggtatatggggacaaaatggccttctgttgcgttgctacaccccgtggttggcgttgcacgtaaggcatccgatcgagcagccggagcgagccggggtccgggggtctgattgtgtgaacgaatcagtgatcgcctgaatggtgatcggagcatatatgctttggctggcccggcgtgatgattactgcgtagcacagtagcaggacgcactggaacagtactagtaagaaggccatgattattatcgtgattagagtacacagcctcgtaattgcacatacgcaacggaggcgctgccaggtgtcgtgtaccattcttttggtattagacttgccatgactatcgtgtgaatgcctgaatggcaattccgagccgtagcttgcgtacatcttaaagaaacccactcatcgcgatgacgctatcagccacatgaacatcaccagccagactgtatcctcagggagcccggccgccaattgagaaaatctgcaaatgggtacgactgctaattactactatgatttaataacacaatagtagaacagtgtgaaggtgatactaccaaatattcgaagccttctctctctatctctccacgagtccatgtcaaatggagaaggaaaagggtggagctcttttttgcttggccctgcatgcgtctgcgtcagagcgcgcacgaccagcacacacacccccacattccgttggtgcagtgcagtgcggtgcgcgcggctcaactttgaaagcggacggccgactgactgacggctcgacgtcgccgtgccgccgagctgtcacgcagctagctgacagccaatgctaatcttggaagcgcacgtcacctaactcctctccagaatccaaatcacaaggggccccggcacacacaagtttgcaacgaggtggtggtcctcactcctgaccgtctgtcctagtaatgcaaggggaaattatcctctgattgttgatttgtctccacatattaggccccgtttagttcccaaaattttttcccaaaaacatcgcatcgaatctttggacatatacataagcattaaatatatataaaaagaaaaactaattgcacagttatggaggaaatcgcgagacgaatcttttaagcctaattagtccgtgattagccataagtgctacagtaaccacatgtgctaatgacggcttaattagtctcaagagattcgtctcgcggtttccaggcgagttctgaaattagttttttcattcgtatccgaaaaccccttccgacatccggtcaaatgttccatgtaacacccaaaaattctcttttccctaactacacatacccttgggagtgttcgttaggtggagataggagagattgtctatcgttttccgcgcgcacgcttttcaaactactaaacggtgcgttttttgcaaaaaatttcaataggaaagttgctttaaaaaatcatattaatccatttttgaaatttaaaatagttaatactcaattaatcatgagctaatggcttacctcgttttgcgtatcttcccaatctcctcaatccccttctcttcaaacactccctagtcactttcggatactaaggaagagctacggcttgaacaaaacgcataatttccagtcttatcctctattcaactcctcattgtattaattgctgctcccttcgtttgaagttaaaataattatagctatatattattcagataaaaataactatattttagaatattttagaacagagaaagtagaaaggagctctcacgtttggccataccatctagtaactatgtcaaccaatagatcatacttcctccgtattagccattaaactgatgagtatcggtaaagaagttataaaatctcattacaatgcgtgggatgcgcgatatagtcattactatattttaactcagtgttgtggaagattaagggcggttgcgcaattgtcatgtatctcgtgtactgtcaatcataagtttcaattcatctatacccctttaaaagtctttaatattggttgcaaagaatttgccctcttaccattgcttttgtagtttttagaaattgcatcattatgtttttcatgacaattgctctatccatatttgaatatatgagattattcggttatatctttgaaaatttaaccgtcaatagctctaaaaacagttagtttgaaacacataacaatcatatgggaacatttttatttatatgtagttttacaatataataattttgttacttcctcaatcccaaaatatagctatctattactccaggagtacaactatagatcaggacaacttggtagctatgagccccattggttgtcctaataaatcaaaaccaaagccagaacttgaatttttaagttgaatttaagatattttcaatgtagttttttatattgggttttaagtcgctaataacacatatataaaagtgttacctataaattaactttcattctctaataagttgtttttggcttattatgatatatgtgcaatcgatgaggtcttatattttgggacggagtatttaaatagaaaacaataggtcaaataagtctcagtaacacctgagatcctgggttcgattccccacgggaatgaatttttcaggatttaacggtattgtgctttcagtggtaggcgacgtacctgtcgacagcgagacgcctgtggtgacttcgtcaatcctaatggatttgccggcccagtcttcggagatgctcataggggtagggtttgcgtgtgtttatagaggtgagtgcatgtgcgttgtgagtgtctgtgttgtactgtataatttttttttaaaaaagaaaagatagatatggtttacatgcactcttgctcagagattgaatttcagtggtgctgtagacctgtggtgcacaccatatccaaattaccatcgtccctactacagcactactcctttcttagctcactgtcggtgggtccacatgacaaactgggcccacctgtcatacgagcgtctcaaatcggtaacaacaaactcgctagcctcaccacctcaaaactcaaaagttacccagaacgctccccacgccgctctctcgtcgtcaagtcgcatgcctatgtaaagcagagcgaccaaagaatccaaggaggccaaagcgctctctctctctctctctctctctctctctctgcttcatcagctccccgtggcggcgatggcggctcagaggaggctgctcgccgaggcacctccgcaccagccgcacccctcgcggcaccagcagggcgcgccgtcgtcggtgtggagcgccgggtacctcaacgggtggctgtcgcagcgcacggcggtgttcgggctccgcctctgggtgctcatcggcatcgccgtcggcgccgccatcgtgctcgtcctggtcctcgtcttcgtctgcctctcccgccggcgccggcgccgcgatgacctcgcatccaatctgtacccggccgacaccaagattctcaagcagcatctccagcagcccacgccgccgaaggacatacaggagatcgttcgccggcagcagcggcagcagcagacgccgacgccgacgccgccgcagccgcctccaccggcggcgcaacatggggtgcagctcgccaaagcagagactccgccgccgccgcagcggacgcagccgccggtgctaccggcgggatccacgcggtcgacggcggccagcggcatgtcggccacgacgagcggcgggagcgagcgggacggcgccacgccgaggagcacggcgagcggctcggctgggccggaggtgtcgcacctcgggtggggccattggttcactctccgggagctcgaggaggcaaccgacgggctcgcggaggagaatgtgatcggggaaggcggctacgggattgtttacaagggcacgctgcagaattccgccatggtcgccgtcaagaatctactcaataataggtactaatcctgtgccttctcttggagcttttcgatttgatttggacatctccagcctttccatccttgtatagcctagaattcgtccttgggtgagtagaaaggatggagaatatagttaggaatacccgtttttattttttattttttaaagaaatcaattttccctttctgtttaaactggggtgtgtgatttcgtttgttcgtaaaaatgccactgatttcgtctgtttaaccgtgtttgtgttcttgttcatcggtttctttggctgtttgctccggttgtattcttgttcatcgaattgatacgcagatctctaatcttatcttcttctgcgataatgggttgttggacttggatatgatcagtctgatggaccaggaagtgagctgtcaaaaactgtgaatttccatttgaagaagggaaagatccttttttttttctagtgtatttgatcggattttttgtgcatagaggtgcaacttgtttcagtttattcatgaagcagtggtctgctggtgaacggttgggtcgtggggctcaagaagtttcaaattgctgtcatcatttacctcttctgtgcgcccatctccattccccattcgcctcgatatctgtgacgcaatttaatcctacacggctttctagggactggattaccgtttcattttctcacacattttcttgttctgttttatgacaacaaaaaatcaaattgttttcctgctttgccaggggccaggctgagaaggagttcaaggtggaggttgaagcgatcgggcgtgttcggcataagaatctcgttagattgctcggctactgtgtagagggcgcttataggtacaatgaaatctcttcatcaattttgtgcattattattccctctctgattaatggatgttttactcacattgccgttttggttgaacaggatgctcgtgtatgaatatgtagacaacggcaatcttgatcaatggcttcatggtgatgtaggggaagtgagcccactaacttgggaagtcaggatgaacataattcttggaactgctaaagggtaatgcttctctcactgttgcacgccaattttgccaaagtgggtaccttgaacagtgttatattggtatgccttgcctgattctgtttaatacttcgacattaaagattatgaatattatgggcaaatataggtcatgatcattcagattttagaagacaggtgctagctggcatgggaggcttgttttgttgtgagacatgcatcatagttaggatagtagagtctaattctggtgaaattgattgtcgtaggaattcaggtgctttactcaagtttgttaggttgtgttccttagcatgcacatattcccaaagacagctgattctaacccatgtttagcagatacgaaaaaaaaaacatgtttttttctttgttagcattaggcatcatttggttgttcagaaaacaattagaatttcatgtgcatttaaatagtacaaacgccaaagtaaaggtgtcgaatttcttggacattgcatgtgctcatcttgcattcgtcctttaattgctttcctgttgccagcttgctttattttaatcaaagcacccagtctgagattgttttgattcgctctatagagatttaagatactgcatgtaaataactaaatacttaccttgcacatgcgttcggactagaacattgtgaccctgtttgacagttaaaatctagattaaagcatcatgtgcattgataagcactctaccgataatattctttgcctgaaagcaatattgtcagtggcttgcttaaacaacatcaacagttcttttaaaagatgggtttgatagggaaacacatgaatactgacacccaacttctgctctctaggctggcctatcttcatgaggggctggaaccgaaggttgtccatcgtgacatcaaatctagcaatatccttcttgaccagcaatggaatgctaaagtgtcagattttggtcttgcgaagctattgtgctcagagagaagttatgttactacccgtgttatgggaacctttgggttagtattgacaatccacacacaacctttactgtacataaaagttagtacatcttatcatgactgaaattggctatgttgcagttacgtggcacctgaatacgccagcacggggatgttaaatgagaggagcgatgtttatagctttggagtacttataatggagattataacgggtagatcaccagtagattacaccagggcacctggagaggtcagtatcctacctattctttcatgaatctcttccaggatcgttggcatctgatggagctaaattgtcttcttttcaggtgaacttggttgaatggctgaagaccatggttgctgagaggaaagcagaggaggtagtagaccccaagctgcccgagaagccttctcccaaagcactgaaacgggcacttctggtcgcccttcgctgcgtcgatcctgatggccacaagaggcctaaaatgggacatgtaattcacatgctcgaaatggatgatctactatgccgcgatgtatgttctactcacttatgaactttttgatttcttccatttactaaacagtatagttaactcattttctgattgcaattgttcatcatacaggataagaaacccggaagagatgcgcctcagacatcggacagacacagctcaagggatggcgggaacttcagcaagcgtgagaaccaacggtacagatgacaacagcccagcactacagttgaacatgagtttgtatggattgccattagggattgccaatattaaccatgttgtcattacataattttttcccctctcgttggatctcataaccagctctccttgctcttttgactgtattatactcgagcatcattctatgacacttgacacttataaactacacaagtgtagggtggtgttgtgactgagactgactatgccccagctaatgcttacagtgttaatgtgattctacctaatgcaagtacagttgtctgctctaatgcatcttttaccagtccactcctgataccagctgcctgctttactgcactgggagaagtaatgctttcttcttgtagcctaatggttggtgcctgcttgcacatgatgtcacatgaccattttctgcatctcatctcatctcacacttccatcctgcatctaaccctttgtttatgatcgccattagtagttggctgcagagcttgggacttgtatattctgctggcaaatgcttttgtccactatactgcatctggtgatcagctgcacagcatttgcgccagttcttgtcgcttcgccttgtcttgatctaaatactaatcttcgtttccatgttcagttgctgtgactttttcgtactagtatattcattagttcttttttacagccaaccagctctggatcttgtgctaataaacttgaccgctgacagtactgattaattagcaggtgatgatcctaccatcacgtgaatacgtgatcgaacaactactgtgcaatcaccatgtatgcaatgaatggtcaagtactaacatgataccatgccacaaattagtttgatcatgctgattcatttatttgacactgtacagtctgtactactgaagtggaatagcatgagagaagtttctttcatttttcaacggttagcttggagctactgtgccctggaaatgttcagagatggattcttccattagaaaaaggttgagttatgacttgtgagttgagagagtagtgcaggacacagcacactagtggccaaaaaaacggcttggaggattcatgaaccgatggcagaaaaaaacaagaggaaaaaaaagcacagcgaaaggttatccggcacaggctgccgcaaatactaaatcttgttggacagagacatttttgggtgatatctgacgcgttcttcaccctttccccactttattcgatagaataattgaataaacattcacctatcttgataatgcttaatgccttagtctaattattgcacaaagtctctcaacaacctgaaagacgcagctaagcctgccactgccgttgtgatgacttgtgaacagctgctgctgcttcatcaagctgataatgcacaatcatatgccatggtacaggtacacgcattgtcgaggtctacgtccacatagcttcaggcgatctccgtcctgtagcgtagcgacctcgtgaacacctgagctgttccgaaatggacgcgagcaatatccacaaggcaccaggttgtcgggttgccgccgttggggttttcccggtgggccagtcgacggcggcaacgccacatggaatagaaccagcccgacgtactagaagaaggcacgggcgccagtctgttgcggctagctcgccccccatggcctctggtccagcctttaactcgtcgtgttcacctcgcggttcgattcgattcttcttctgccagcagcccagccttcaccgtgagtgctactatactgatacgttgtgtagccatcgatatgcaccgtccgattagtgaccagacggccggaattacatcgatttcgatcatgtttgatgaagcttaacattctaaaaagacaatcggttggtagtcagtttatagaaatatgaatctactagtttttttttaattatgcaattgcaacttcttaaatttcaaataaaaagctgaattgtttcgaaaggttttgttttaggagaagtttcagctaccagaaactctctcaaatatgcccatagcccatccgcagttggccgctgccgttgttacggctcccgtcacgcgcggtgtctctcacgtcctctgcggcggccgctgctgcttagctggatagcaaacgccgagccgtgcacgctccgctgccatggacagcgactcgcgtcgcgcagcacggcgccacgagcgcacaacgcgccgggccagcctcacgcgcgcgcggacgacggcgttccactggaactcggtctttctcacgagacgccgacgccgtcgtctactcgtcttcgttcacagatggatagggaaaaaaagggaaacaaaaagggcgacgcgcgtgagcttgcatgattgatatgtaccatactaatataatctgacaaaagaaggtaatgctaagagataagagaggcaatgatcactttcagcctttggaaagctgacgctgaggcaattatgtagggaaaaatggtttcatcaagttgtgctagtgtcggcataaaagactgcaatagtgctagttccgtatcaaaggtgccgcactgacactgaggatgagggtgtatgtacatgcatggggagctcttttgatcaatcacacaagagagatgatgacactactagtaagcatatgcctgaacaagcacacacacatacatacaggtagtatgacatgcatgctgtcagttcagcagcacaagagatgccggagagaacaacagctgcgttttagcttctaccacttgcagttgcctggctaccaccaccatcagagagagggcctcttggttgtttgccgttgttctgtggggtcaggttgtctggtgcagctctctttggcctcaactacagtcaagataaagcgttgataaatagatgttccatactgatttatgtaacctttgtgagagtcttaggctcttagcagcgcaccttttcctcggatttttgataaaaatgcctcaacaggatgttcttggggtctgttgttatcactgcgattccagacacaaacggtcagggaaatagtgaaaatagcaacaaaaaaaaaagaggtgatttctgtacagtaaaaaagaaaacttggaatagttggggtagttctggtaggaatggacgagagcccagaaagaaccaaaacgaggtaaagagagcgagcaactatcgagtctgatcgactacgaaaatatctaagagcaggtacaatagcaggctattagccagctgtaaacatattttaatgagagaaaggatgagagagaagagcagcgggctatagatctgtagccagctgcatcgcggactctaagacgcaatgtatgtatgacaggtgtgaccatatattaatagtatagtaagcaactattgtatgaattggctattagattggctatagatgaattggagttagcagtgggctatactattaaacttgctctaatgaactaaagcactcaagaattcaccactatcagaagcaatatcccatgcacaggaaattcaagagggaataggcagcaaaaatacggaggggctgttcagattgttgccaaaataaaccttacctaaaattttagcaagttgacaatattaccaaaattttggcaggatttcttatgtatttaccaaaatttggcaacaaaccaaatgtaggcacatttttggcaactttgccaaaaaatgatatggttgaaaatggcatcaatctgaacagcccctgaataaactggaaactaaggaactagctccatgcctgcaacggaccaatgaagtacaatgtttacatagaatatctaaaaacaatgttctttttttttagataatggaaatggtttacatctttggcctctgccaacaggcacacgggcaatgagtcgagaagaaaaactgtgttctataaatgtaaccatccaaatcatattggcaatatggcataaacagaacacttcaataaaactatgttggcagcactagaggaagatgactaatatgagaggttgctttggttggccagttcatttgctccttactaataaattgcccagcttgcctatagttttctttcatttttcttttgtggagatggtaagcagcatgcaatcaattttttactgaatacctgtacctgaaatctggagatagttcagtggacaggcctgaaagcaaccaggatgtttggtggttcggcctggcctgccaaaagattaggctaggaggaaaaaaaggacttaacagaatgctcatacaaaattgtaataggtacacatagtgggtcagagcaaagtctctgaggcgaaaatactaaattatgttgattcatcattaggaaactccaacctctagtccaaatagatgttgctctagcatgtgttattccaaaatttgattgctaaaattataaaagcatttaacttatcaaatcaattcaaggggactcaactatgaaggtgtaagatcaggtttagttggtctttccagtttgccggctaggccctggctctctgactctcaaccttttctgctctccctcataaagtcatactccaagagaaaagtttgctttgaagctataaaaaatgtaccagaacaaaggtcgtaagggaactacttgaaagtaagctgggcaaattagccataatgtatgtgagttacatatcaagaagccaaaactacagtcctagggaatgcaaaaaatattgactttgaagacatatctaacagtccaacagaatctattcatggatctatcactcagaagatactaaagaggctgcattactgaaaacagtatagatgattggagttaaatatgccagccatgaaaggcaagatagtcactttttggctcagaccaaacaactcagaggatctgctatgccatgtagagtactactgtaaaaggaatttgatgcaatgtgaatgagcagtcacattcaactatacacatttgaacgtttaggaaccacacactcagaagtgaggagcagcacagggaaatcagcattggtaaaagaaacaagggagcaagataccttgaccgggaggtggatccgtcctgtgtgttgcaatgtaagtggctggtacgacattctgaaacacaaaaaaaatagggataagtattggcagtttcgcaccaatgcaacatgtccggactccagagaataagttaccagcttgatactctgacgagaaacacaaatatgacaaactgaatatatgctttgcaaattacaatgcaagtggctgcctggaatgacattcggagcaaaaaccgactagtaattcatcaccacaactgaaaccttaaagggcgttggccatgagagaaaccaaatcctaaatgtataatccatgattcacaaatacctcccaaatgagatattatgatccaactatttggcattgggacttagaaacaaatagtactaaccaccttttgttaatcatgcgcactggaatttcagacacacgctctgacacacaataggactgactagaggtaaagctccggcgtgagggatcaggcacacaattcatggcatcatcaacacaatcaacctaattctgaattgtacttggcggtcggaggcatgagatcacgacagctaagcacagagatcgatcgcgagtgaggggggacagagtcacagaggggctgaccgaccaagggctgcgcggaggggtcggcggggacgacctggctgaagttttgcgggttgtaggacggccagccgcccagggagctctccatcgccgccgcggagctcgccgtgacgtctccgactccgactccggcgacgccccctcttggtttctccacccttttccagcgaccatggattcgtggaggactataatggagcacacagagtcaacattaacttttgggtttcggcccattattgctatcttttgggccttagatttcactggccaaatgggctttaaggcccattttctacctatacatttgtgcttagcgttgtcttgtgtaattgtgttattatcagataataccacgattatacgaatgaattaattcttttagataatggaatgtaacattccagtctttactcaaagagttacagccaattattacagaactcacacagaacaaaactcacatagaaagttcacgatagcacaaacaaagctaagcaaacataaactaatacacaccaacagaagaaaaatatgccataactattgaattgtattagagaaccgccacccgaagttggcaaatatatgcataattgtcgtcaaacgaatgaattaatgaattaagacagacaatagtacaagattcataagttctttttttcgaaaaaaacaaaacacaatacaaccacgcacgttcaattacatacgagcccacttaccaaatgcatacatatatacataccctatccgtataaccacctttaaaagtatgtcttaataatgacaaagtcaccacaagcttctcgcactcatcgaatgtgcaggtaaaaacgcattcgaggattggaccggtatattttaaaattgataaaatcatcaccgacgttttcctatcaacgtatagattgtctatcactaaaatagtatatgtactaagtttgcaacttgaattcagatggtgggttcaaaggaccttgccacaaccacaacccacaagggacaacaaggttacccgaaaatgtgagttctttaaaagcaatgagttttgtttctgtaaataggggtgatagatccatgatctattgttgcaagtaaaccgcaagataagattcgtgcaggagccgtatccttagacagatactaaatcaagtcagggctagctcagagtctcgatcattaagaagggacaattgccgctaatccgacagcgatcagtagcctgtcctttctgttaccagtcgtgggagagttcggattctccacaatttgtccaaatggagtggtatatcaaggtaagctgaagagagaggccggcgtttcatcatccattgttttttttcctgctgtatcgaatcgtacaaagaaacaaggagacggtctctttctagtatcgattaggctgtgacctcccataagtgatacaagaaccggcatgctgacatttcaagaggatgcagatgcagactgaaaactgaattattgacatatatgacgacatctatgtacgaaaaccttgagcaaattggctaagtgaaacagcgaaatctaagatctttttcggcggattgatggcgtttcgagggtggccaagggcccgtctttgctgttggttacggtcaaggtataactgcttgcgagacatcatggactattctgtggccatcgatgtgggggtgtttgtgtgagtgatgtgaagatgctggcgaaagccttgccgggtcttgggccggttcgacgacgacggcgcccatgggcgccgtttcccttcttggaggcgttgtcatggcattctttcatatccccacaaatttctaggtgaaaacctccttccgactttcgaacgagcggcggtggcgttacacgttgtgtcctccttgggggcgtcacttcggagaagttctaacgcatcgacgactgtcgatagtctttttcggttcaaaagctttcataccttttgttcggtgaggccttcgccttcttgggtccgcttctttcttgtggtgggcaacacgctcttcggttgtttctgctaatgaagtcgaagctgcttgctgatgggggtgcggcgacgctcggcaatgatgacatgttgcagtctcttccaaggagctctggtgctggccgtgtgaaggaagttgctcttcggtggcttggctgacgtccattgttggatgtcggagctacttttcgctttggtgactttcgtggcttcagtgttgctgcagttgtggagtcggcgctgctaggtcgcttgggcggctagcttagcaatggtaacacctcttctgcaatgtgggagctgttgtgtcgcttttgtgtttagtttggcagtgacgtcctacgattaggctccgccgtcgttgttagttgtgtagagcggaaggttttagctggttttcctgtaattaaccgtgcagctgtatggtttttgggcccggttttccttataaactgggtcaattttttttttctaagtataacagtggaacaaagttcggcattaggttaaaaaaagatcttttttggggcttgcgaggtttggacaaattttaacttataagaatgtatttacatattaatctgtaataattttcaggaggcttttccctcctaatgtagatagagttaccctcattattatttgatggcacatactgcactagtatatatgataataaatgcagacatgcaaataaacagttaaatgtgaagtgtatagcacatgtaagtaaagtaaaaaaaaaactcaaacctgcactagtaaatgtagtagaacaagtatgtaggagcaaagtatgaaagttaaaatgatatgtatacatgagaacagggggagtagtagtggctcaataaaacctccatgtttagtccttaattagaagcagatgttgtttgagagagataccaatcacaataactttaataacattttaatcctgaataacttatacagtttcatgctgtatatcttgcacgactggagcgatgaggactatgtgaagatcttgacagtgtgcaaaaatgctatttgttaaaaaaaagcaccatgaaaaattaatatgtatgaagctatgccgaaacaataaacctaaataaatgcatgcctatccatataaattttaacccgctgacaacccgacaatgagttactgcatctatcctaaaatataaaaaaattaggattaaatacatgtattacgaaagtaggcagaataccaataataagttatcatctcatccaaaaatataagaactttaggattgagcacatgtattatgaaagtatgtagaattaagtaagagaaagttgtgattcattgagaaaacgaagtaggtagagaaattaaattaggaaatgttattattggttaaaaagagtagaactactattaggagcgctagagcgtggaatattgttcatagcgccaaacatgcgttagcccaggcccaccccaccccacgtcccgtcatcccactcctaccgatccgagtaaattgtttactccgatcgggtgcctctaccacccacctttatttgagtaaacaatttacttcgataataaaaacaacttccatgctttcgatctcaccccatgtcccgcatcgtgcacccaccattatcggagtaaatgatttactacgataaaaacaacttctctgcttccggtatatattctatttttcccgtacccaaccaaccactctcgcccccactccgttttttccttttttttggatctgaatcgatccaccatcccagcccacagatcggcgacacaccatgaaggacgacgacgacaccgtggtggttgatggcggtggccggcgagcagtggccggcggcggttgaggtgaaggcactacttcaggcctcgctgctggacgctaggcagcaccataaccagcaaggaggtgttcacctgagccaatagcaacaaccagcggctactccacgtcggcgacattgatagaacaagcaagtaaggaaatgacactctaatttgcatctgcatactctctttcaacttcacgcatgaagccctaattttttttgcaaatcaaattaacatgtaatctccaatattacctgatctcaattgataggctgcacaggtcctacatttgcacatcgtgctccatgtagctggccgcagaggttaaggtggagtccaccggtgatggagattgtttgctatttttcttttgctcgtcatctgtattgacatgaacgagaatatttttacatttttttgtgcttgttagatgatggatggctgctactgtgcaacgtcaagctcaactctataccacaccgctacattcttccatgattccatgatggatttttggctgaatcattttttttcttttctagtttgattcacctgtgagtaattttatcgcttgtgtgtgattgagcctgtaatttttttcattcatacaactattttgtgatacagatcaacaatactcttagtaccagtttttattcttatactgtatattgaacacatcagtaaacatattactacatggtggctatgagatcatggctatatcgagaggaatgtggaaattgttttactcgcagaccacaaaatctaaataatattggtaaaagaattactagcgttgtaagcttgtagtaattcttttacgaccatttaggtatggcgtcatacgatgtggagacattcatgagaataaatttgttactttagaatgagcagatgtgggaggctgggagtaaatgaaaaattccacggagtaaattcgttacttttcaaacgtgcggagatactagaaaaacggaaaactcggaaagaaaaactagacggtaaatattttactaaaacgcgaaaacagaaaaactatagagaaggaatgaataacagaaaaatctggatggttaatattttacctggaccattgatgaagcacatataagatggaaaagagaaaaaaagaaacacggaaggtggggtgttaaaaaacgaaaaaaaacgacccgagaaaaggtgggatgcggaggaaaggtggggtggtaaaaaacgaaaaaaccggaagtagaaggcggtgtgcagcgctcgaattattattccgcgctgtagcgcgtggaatagcgctaccgtaaaagagagtataagtgaagatgttgcaatattttaaggtaaattttaaatgctagaagttgttatattttagatagagagagtagctaaagttatttcctttatgtaactatacattgagagcgttcatattagccacaatatatcttttattaagagaggtcaaagatgattcatcacaatctctttaaagacctatagatgtcagaacaaaaataagaaaaaattaccctgtaagatcatggtgagttcatattataacggtatagattcatctctataggtgtacaagtataattgtatctaaataaagacatgctaatagctgcatatcaaacttaattcttttttatatattttatctatataacatgagttaagagttgtttatctccgattcaattttaaaggtatattcctgtgtaaaattgtgtgaaaaaaagctagtttgccaaaatggagcacatggggctaagctgacgggggatcctctagagtcggccagcattttcatcctctactattttccaggtcttttgaatcgtgcgaagaaaaaaggggatcgtctttttccatggatctgtaagtcttccatatacgcaccgtcatgctgacattttcagtgatcggatgaatggcggcatatatctgggaccaaataaaacctggtgcaaattggctccacgaaagccaagatcttattcagagagtaatcgccatggaacatggtgagattggcatatactatgtaagttggacagttggtcgatcaagtcatcaaacaacttacagagaagataaggtgcgaatcgatgaagctgaaccatgagtgcaaaaacgttcgtaaagtgtattgacgtacattcattgaattttcaggggaaatttgtctctaaaattgatgaatcaaacatttgaaaatttcagagaaattttccagggaataattttctctaaacttaactgccaacgtttggacagttggtcgatcaaacaacttccagagaagataagatgcgaatcgattaatctgaaccatgcgtgctaaggtttgtaaaatgtattgtcaaggattaattgctaacctataacgtacattcattgaattttcagggaataattttctctgcttgcagacagtcagtaaacccatttatgaatacttgatgtacatgtcctgattcgttctcttctctgtcaatgtggatgatgtattgatgtatatgtaagtataacagggtcagtctaaaattaaacacaagacgactttcccgacacgcttacgcgcgtcgcgttgaaaggattcaccgacttattgactcatagtgcaaatctaagtggcatctgccttttattttcaaattagtttggcagctgaagataaagcttccggctaactgctaggttatggggctaataacacacgagaagataatataactgaacagacaccactaactacagaaaaggttgcacatatgcaaatggaaaatgacatgccccattaccagcactgtgcgtgataaccttaatatacccacttatccctctatttctttcctgcttcaacgtggaattgggccatgcacgttgttttcatggcctaatatgtttcctgatttgttaatcgtgactcaatcgctgaccaagctcaactctgatattgaccaagttaggtaaagtagggtagtatatcttagatacactcgataatacagtaatacaccgataagtggaatgtgatttcaaccctaaaatttcgtatttaattctcaacacgcttataatttcttcgtgaaacccttccaaatctcattttaggtaaagtagtgtatcaagtaaaaaacaagccaaaaggaaaacacttgttttttttagtttgttcgttcgatgatgaagtacccacgttccactccaacagaagaggccaaactaaagatcaggcatgctgtcctaagagaaaatcgaaggtcagactgagtcctacacaccaagggtagcttctgaaacggctgggatgatgaacaaaagggtgtcttttgtgcgcagcatctaccggccaatattcctttgcaggcgtgcgcctggtgattcaccaccagcagccaccggattctccgccttgcaacccatgcaatctcgagaatatgctgcatcatgaaactattcttaatgccgagaacaacgagagaatcattcagagttcagacatcttttcgacagtcatatgctagctcctgctattagagcaaatttaatagtatagtccactgcaagcttaaaatcatctatagtcaatctaatagtcaattcatacaatggttatctagaaatgtatactacactattaatatttggtcctatccgtcatacacacattgcgtattggagtccgtgctgcagctggctacaaatctgtaagagcaagtttaatagtatagctcaatacaagctcaaaatcatctatagccaatgtaatagccaattcatacaatagttgcttaatatactattaatacctgattctacttgtcatacatacattacgtcttggagtccgtgctgcaactggctacaaatttatagccagctgttcttctctcttcctttatctctttaaaatatatttatagctggcttatagcctgctattgtacctgctctaagagtaagtataatagtaggctataaggtggctaaatgctgaggtggaggagagagaagagagaggagaagtgggctgtaaacttacagccggcttggatacaagaaccaagaaactctgtgagagagacaagcgggctctgtattaattgtaaagagctaactattatataggcaggctaagagaaggctacaaataaccttatagccaacatgtcggctgtattattagagcaagtacaatagcaggctataagcaatctataaccacatatcaagaagaaaagagaagagagagaagaaagcggactacagatttatagccagttgcaacacggactcaaagacattacgtgtgtatgagatatgagaccgggtattaatggtatgatatatttttatagttaactattgtatgaatgagctattagattagtaatagatgatttggagtcagtagttagctacactattgaagttgctcttagccttgctctaacccgctttcttttctctcttatcttttcttctcgatacgtggttatagctggtttatagtctgctattgtacctgctgttagaagtattctatccatgttcacgtgtgctggtggtgatcatgtccgatcccagctcagatgggcctaaatgagcgtgcaattcttggtcctcggaataggagctgtgcattgtccataggagtacttcatgattagagagtattgggcgtgatcgaccaaaaaactacacaatctggggcatccttttcttttattagaccgatataattaaccatgcatcatgcaatgccaagtgcccaagtatattgctttcaccacaacgagggttcacgctttagcttttgtcgcgctcattcaagtagcaccatccacaataatcaaagtaactttccttttgactgaacctgtcgagagtagtaaaaaacagagaccgtcacgctgacgaccagcgggacagcaaccgccacgtgggcccccacgatgccggtcggtcagcagatcgggcaggcgagatttgcccgcacgttttgccctcaaacccctgatagtacgtgcctttgacagcaaaagaagccgtggcagatcgacccaacaatgtgtcatcctcctgcccccatcgcacacagaaccccccttgcgtgaattgcatcgcgagaacccgaaacgcctcgtcggtttagctgcaacgtagattcaccgatcgatcgatcccttccaccacgctccactccaccgggggaggtaaatccacgggaaaacgggtgtagtgaagcgagcgaggcgcgcaccaaccgcagtcaccaccaccggcacccaacacccagacgcgcggctccccggttgcgccgcactcgggctgtttggatggtatacgaagtttatcatcattcatcatactttttacgtcacatttgtttaagttgtggcttacaagtgtcacactttagggagttaatgacatgtgaggtcataatagatgagaagaaatcttgtcataagtgtggctataaaccaaacaatagactaacttaatcaatcttgtctactggtgtggtaatctttagtaacctttaggaattaggatcaaaccaaacagcccctctggggagaggccgttacgttatcccacgggggaaaaatacgagaaaccgcaaccgaaaagagaggaggaaaagggagccgcgcgccgtcgacgccgtgccacttaaccaaccagccaactcaagccccgcccgtaataaagcgagccccccgccgcacgcacgcacgcagccgagaccaccctgctgcagctgctgtgctgcgcgggttaaaaagagagagatctattaactggccctcctctcccacagcaaacacactcgtgtcgtactgagcatctgagctcggtggttgccgaggaggattcgccggcggcggcggcgggggggagatgtcgcagcatgcggtgtgctgcggggcgatgttctgggtgtacctgatgtcgtgcgtggggctggtgatgttcgccgggctcatgtcggggctcaccctcggcctcatgtcgctcagcctcgtcgacctcgaggtcctcgccaaggccggcaccccgacggacaaggacaacgccggtacgtcctcctctctctctctctctctgccccccctagctctactgctgctgctgatcgctgcgtgtgcgcgcgcgcgcgcagccaggatcctgccggtcgtcaagaaccagcacttgctcctctgcaccctcctcatcggcaactccctcgccatggaggtacaaatctctcctgctgtttttcgatcccctgtatgcacgtatccagattggagctgatggctttgtggcggcggcgtgtgcgcaggcgctgccgatatttctggactcgctcgtcccgtccttcggcgccatcctcatctccgtcacgctcatcctcgccttcggtgaggtgaggcattgatccatctcgcgtgtccatggactatgggttgctcacttggggtttggctggctgattcggtttctcctgtggtcgcagatcatgccgcaggccatctgcacgcgctacgggctcagcgtcggggccaaggcggcgcccgttgtccgggtactcctcatcgtcttcttcccggtcgcctacccaatcagcaaggtgcgcctgctggcttagcctgtttcgttgctcttgtttgcttgcaaagaatttgggggaggaattggaaccttgtagttggtcacttggccggggtgtgctcacaatttggatttggatgggacactacaagtggctgaccgcgactaggacgcagatcggttacttactgattcattaattaattttccaatcaagggacttgtcccattctcatttagtcatctgtctacaaaattctttgtagccggtgactaattaattagtaaatgtaatctgtcccattccccattgaaccagaataagcaatcatagccgtgaagcaagaaccctgttttagtgttcttttttcctttgccagactaggaaaaatgccttcataagcgtgtttgattgctcctgaataattttagatgaagcaattcaattcgcttcttagtttaattatttcctgctaaactaattgttttctgaatcatattttacaaagaaaaaagaacagaatttaattggggctgaaacacagcgaactacttattgtcgcagatgaatgttttgagttgcattcaactaaccatttccttgtttctaatgcaaaattagctataattagaggatgcatagatatgcttgtgttttccactaatgccatgtcttaatttgattcatgtccatctttccagttgttggattgggtactcggaaagggccatgttgcacttatgaggagagctgagctaaagactttagtcgatatgcatggtaatgaggtaggttttattcttattctcttatgcatttctggtaagttgtagctctttacactatgtagtttgcatcaatagtggttttttttggttgcaacagctgtgtgcggcgtccaagagttgatctcaagaggccatgttctatatagattctagacaactttttatgacatgttatagcaccttaaatgagtccggttataatatttgctgctatatggacaatatgattgggcatttctacatgccttgaatattttcttctggctctaatatacatatattctctgggctacttgtgtttgcaatagctattggtgctttcctcagacaaatatgaataccattaaacttctgctggttcacttgttcttaggctggcaaaggtggagagctgactcatgatgaaaccactatcattacaggagctttggagatgactcaaaagactgcaaaagatgccatgactcccatatctgaaaccttctcacttgatataaacgctaagctggacctgtaagaatattccaactattgtacgtgttttgaatgacacattctattgatgctactgttctcttcttgataggcacacaatgggtatgataatgaccaaagggcatagtcgtgttccaatatactctgggactccaaacaatattattggccttatattggtaggctaaactttatgtattattaacttttttggtgccaaaaatcctgttccctagaaacttatgactttcatgttatttactcttggatgcatgttgtcaatgatcaatctttgtggcttgagttgccggttctaactgctgtgtcagtcacactttttattgtgaataagatagcacattacagatattcgatactgaatctgctagcccatttcagttttaatagataaatacttgaattagagaagaatgtttttgttgtgatgaaatatattttataaattcattaatgatattctagttctctggttaaaggaagcctttgcagcagtcattcaaccatgacacgtcggtaataaaattgtcataaaataattgttttcagttgattgtgggatcacatactctaacgaaatacagatatgagtgactaatttggcagagtcttgtgtacttccactcaagctgcccttagttattcaaaacctgaggcaacattcacaaatttaagcctttctaaacatgcccttatgattgcttatatttttgccgggtcggccgaaagatttggtcgaccaatttcattaagtgggggaaaagatttaattgcctataagtaattcacttttggaaaaataacaacaataactttcccgatccttccattactgtcacttcctggacatcctatatcccaatgaaatagccaatcttgccactttactttcatgtgtttgttatttactatttgaccaataagcaaagaccatctcattttcaggttaaaaacttaattacttgccaacctgaggatgaagtgcccattcgaaatgttactatcagaaaaatcccaaggtatgatcttttattgctttatcaaattggctgtttgccccctaggcccctactgttcctccctaaaaagctactactatgttttcattggcttgattaaaaaatgtacccactattaactttctctgagtctgagttggaagtcaaaatctcgtgcagatacattaggcatgcttcaagaaagctcaaggctacgcatatctactactacttaaaaaataagaggtgcttccatcgtccgtcaaaaaaaccgggtgaaaaaaaaccggaacgaatccgattcatcaacgcggtaaaagaaaaatcgggaaaaaaaaagaatatgtccgattccacaaaaataggaaacaaactcccatctgttataccaagtcctattcggttagcatcaccaggagaaccgacaccattcacagagagagagagagacgacgccgccacctctcccgcccccgtcggaccgcagccgcctccatgccgccgaatctggcggaggcgaggtccggcccgccgcccctcccacccccgccgggctgcagctgcctccacactgccggatctggcggaggcgaggcccgaccggcgttccatgacgtccgccaccaccaccactgccgcacctccccaccatgcacagagagagagagaaagagacgacgccgccgcctctcctgccctcgccggaccacagccgcttccatgccgccagatctggcggaggcgaggtccggcccgccgcccctcccgctcccgccgggccgcagccgcctccacgccgccgttgttcggggagagggcgccgcgccgttggttgtgggggagggcgccgccgccgccgctcgcgggaagaggggcgccgtcgccgccgctcgggggcgcggaggggagggcggcgatgtgagatgggagggagggaaatgggctagggtttcggcggctgaggagaaggaggggttttgtttccccgatatcgacgctcggccgtccgatcaaaaccctaaagatcggacgatcggtgtcgtccaggccgaaatcagcccaagagggatcgagagtgaggccacttttctggcccaagcccaggttgtggcctggggaggggaagtgcacttgcgcgtgcacaaaaggccgtggaccgaccggcaagggccggaaataagtctattttaggtccctcaggcccaaaaaaagagaataagttcatttttagtgctcattttttcagaagcattacaacaattataagttattgaatgtgtttatttcgaagcaaacctaaaaggaagtattttctttctttttccaagtaaataattgttaaatgacgtttgtattaataaaattaacaattaagctctgaaaaattcaaatataatttcaaagagcgtaactaatcatggagaatttaaaaaaaattaaatttaaccatgtcattttatttctcacacttgctttacttgtaaatttatttaattatacacatacctacttaaaaataccaaatatttcagcgaatttgtattttaattaattgcatatttttctaatctgtacgcttcacattgtaacacacaggcacttttgctagaccaaacaacacttttggtcaatatacacactccgtaatcacccggtgcaacgcacgggcacttttgctagtataactaaagttgacaagttaagattatttccatggcttaaactgagggcacccaaggttgctacatactgtgatatgctttggaattgattcaaatatgcacttctgaatacttaatgcttctatgctcttcataacaagagaactattctcagatatttggaatctcttatttaaggaagctatactccatgttgccttgtaatttgcgtgtatctatctccatacaaaatgttcgtttgtcatcttctaattttcctttggtgttgctgctttttggtatatcagggtgtctgatgatcttcctctctacgacattctaaacgagtttcagaaaggtcacagtcacatggctgtggtggtcagacgcataaaagaaccaggagcatccattgaaaagacttatagtgacagatcagattacaaaactaacagcgacagatcagattacaaaattaaccacagagatgcccatgctgatggtacatactttccattagccatgatgatcacttgtttttccaggaataaatatttgtttggctgtctgatcatttgaaaataccctcaggtttgtcaccctctcgtgtcagcattgctggaagtcgtcgaagtaacattgaaaagaatggagaggtgcgcttatataagaaatcagaaaaaaagcgggacaatattcttgattttaatagcggtccacttccaagctattcattggatcaagaagcagtggggataatcacaatggaagatgttatggaacaattgctacaggttggagatattcttaaatacagcttgttcttaatttatatttttatttgaaaacaaagtcttgcatttttcacatcctgatgcttttttgaggacaccattattttttctccatttatactcttgtttgttgtataaagattttagtgttctccaacctatgggagcaacacgtttaattcagcatgatgttgcatttttttagagtcatctagtgttttccaatagttagaaaagaaactagaaatttttcatagatgtatcgttctttgtaaaatattttcgcttatacatgcaaactggcataaacttctcttggcaggaagatatcttggatgaaacagatgaatatgttgatgtacataacaagtaagtggcttgaaccctgttactttttactcttaacagaacctccaaatgatgagagaactaacatttctttgttttgcaggattaaaataaacatgctacctctgggcaaatcattatcaccaactatatctccaagtaatgggccccattcccaaggactcaggaggacccctatgacttctccattgtcatcataccatcatggtggctccatcttacgttcccctgcttcaaacaatcctcagtctcctgggactttgccgacaataatttctcctgaaagatcgcctgcttctcaagcaccttcgcgtagttcacctaattcaactcaggtgagtagtcactttgtgtctatgcgggttatataggctatttgtgacacatcacatcacatattattttattttcattttatttcgcctaaattgcaaggaacttattttcatctacctgtaaagatttaggttgtattttccccttgaatgtgaaacagttgttggtggcctacatcataccatgctcattgttcttctgtttccttcataggtctcaaggaattcgtaaaacggcgttgagagctaaagagctctaaggacaacgtttcctgagaaatggtaaaatgtcaacataaacagattaagacattttgagcttaggactgaattatacagatcagcatatctcttgtactgttgatgcttatttgttgattacatgcttgtatatacgtatggcttagcatctggacatcgctatagatggaagtctcactacctactgtagatgtatttttgtcagcttgcaattaccattgcagaggaaagcttgaagataaaaatgtaaaaggaatgcactagtatgcatttgtgctgttcttgtatgcatgcccccatcattttaatgatcagcaagcagatgttggtgcattcactgatggctatccacaccatttaagcactgtacaagtcctctcatattgtatcagaaattcagattagtgataaggcgcaagcttatgtttgtgatgctagtttggtgatattgagcagagtgttgtgactaaagtcaaagttacataatgagatcagatcataagattgcaaagggcaaacctcataattatcgagtgggccatcaagagagaagctagtggatcagccggaccatcaaggacagttttacctgaaaagataaagggaaatgtagggcagagaaatccacttcaaccttaaaaaaaaatgtaccagacacatgctccttccgtaaaaaaaaaacaatatagaaggagacgtgacctctcctagtataacggtgatctctcctaggttgcttttttttttcttaggacggagagtgtgtatataagtgacagatccgagacgtggttctcgatccgacgaccctcggtgatcgcagttcgctccttctatacttttacggttttaccctgttgtatatgaacagaggacgaacatgtaaataaatactacttccgtttttttaatagatgacgccgttgattttttctcacatgtttgaccattcgtcttattcaaaaaatttacataattataaattattttgttatgagttgttttatcactcatagtactttaattgtgatttatatcttatacatttgcataaatttttttaaataagacgaatggtcaaacatatgagaaaaaattaatggcgtcatctattaaaaaaacgaagaaagtacaaaatattcaatgcgtgcaaccgaaggcatggatgaggtcaggatcatccatccggaaaaacaaaaggacaaaaaagagaagaagagcttctagattccaacgctacgtatccaaccgcgatcgcttcgtcaaatccgcgcgcgcgtcgtgtcgcgtacgcgcccacgcccactcccacgccttcgcgcgcgcgcgcgcgcgtcgtcgtctccctcaccactcgccccgatcgatcgatcgatcgagtcgtcgtcgtcgacccgttttctctcctcttctcgatcgttatatcgcgaccagtacgcgctactacttctcactctttgccgctcgtttcgctcggagtagccatgctccaggcgagctcggagttgcagcagcagccggcggcggcggcggcggcggccgggatgtgggtgcccgggatgagcccgcaggcggtggacgccgggctgtcggcgagggcgcaggagatcgcgcggaggcgggaggagatgctcgggatgctgcatgacctccccgagtccgagtacgagctctcgctcacggacctcgtcgagaaggccggcggtgtcggcgtggcgccgccttcgccttcgccgtcggaggggaaggcagagccgggcccggcgcggacggcgtccggcaggcagtcggagcagcagcagcaggcggcggcggcggcggggaggccggagaggagggggtcggcgaggcggtgggacagcgcgggcggcagcagcttccgcagcagcagcgacggcgtcctgctcaacttctacatgccacgctccttcacccgcagcttcaccgcgccgcgcaccactggccccggccggccgccgtcggtctccggcggccggaccgccagtgtctgctccgatcgcaacaagaggtaatcaatcaattctgactccaactaacactccatctctatgttctccatcagtttgattgcaaattaaggagattaattagtactagatcacgaagaacacacagaaattcgttagaagaaccaactttttcaacacaaatattgtactatttagtaaattcgtttttattcagctagcgataatatagtactcccacagcataggaccaatcaaacccgtacatagacagtcaacaaaagcaaaacgtataagcatcaaagccggcacggcaattccaaaggtaaagtaaaacgagtctacatagaaatggtcctactctagatgccgcctgctgatccgcgcaatctgtaaaacgaagatcaacctgcttgactgcttgtacgttccccacatcattccacctgttactgtttggtatatccagtagtacatgctacagattactgttttacacgagtagtacgagttactgtaaatgcgacgacctactccgatggagaaagcaagggaagcgagtgtcgtacaaacggatagatggttaccacgcaaccacatgagtcgggacaaggggacgcgtccttgtctcactgaattcgtggaccagatagcgtgcgcagcgtctggtttaatgccggcaattctgagatcgacttgctaatcgcgacgtgaaacgaactgatgatgacgatgatgcagggagagagatggcgagaccgtgcggtgctggtcgctgctgtgggatcggcggtggcgcaagtcgagccggggagatcacggcaacgagtccgccatccgggccgcgatcctcaaggcggcgaaacacaacgcttcttccccaaagaaaatctgaatgctgctgctagcgtccatcgttttggtcttagatagctagcgcagacttatctgcctgccaccactgggtgtatcaatactaatgtatggttttgtacatacttatgagtgtccattttgtgcttgtgaactgattgtgtgtgaaaaactgaagataggcatattggaaatgattccataattgcgtgcacatccagggtatcgttgtgaactcaagttcagtttataatgggaggcagtcgagatgaatcatatgtattgtttctgaagcattttacaaaattgagatgcaacattgaacagatatactgtatagctccgttttccttccacgccttgcactagcacataatgtaacgggcactaccaagatctctaaacaagagtcatctatctctaaatagactagaaaagaagctacaatcccaaccataaccttataatctcaccccagatggcacttggaacgaacatacataaatatgtcactatggacaaagataacctaaaataatccttatttgccatcattcctcaggtcttattgaagaatcccttttttttctttggtgaggatcttatcgaggaattctgttggccaaccaacatcagtctcagcaactctgtatcaacaattttccggagggcgtcagattcatatttagctgacagacaaaatgtgctttgcaaatattaattatcagaagtacttacattggaaatctttatccaggattcaagtgtgttgatggcctccccggagcgttgtgtttcctgtgctaacgctacaccatcatgcaaagtatttactttaccactgacaagaagagatgctgcagcattcagcacctatgaagaaaaaaagattgattaatgttttgcatagcaaagcaactcaacgtgtgcaaggtaataattaagtgtcatatatgatttgtgaaaaaaaatctaaacaaaattaaatcctatcatgacaaggatcggtaagctgtttatgacagggcgcactgcaaacccccatctattgaagaacttcctatgaaatattcgtatgttaaagataggctaaccactgcagaattctgagttcattgtaaaaaaatgcattacaagaagtttagaaggtagaaagtagaagtaactagaaagagaggataactgtaatgattaacttacgagagcatcagcaattgaacctctttgaccagcaagaacatcctggagaacttttgcgttgaacgctggatcacctccttttagatcttccagcgtgcagcggggtataccaaaatccactggattgtaacataattttaaaaagtgagactaaaaaaaaagtgtatcatatcgtcataatgtatttcagaagttagcatgcataattagaaataagtataatgtgcataaaacatgcaattgatgagactaaactcgaagactcgctcaaattacacaagtgagtccaataaacagtctctgtttctaaaaattctgagaaaaacatagaaaaaaaaactcgtacatggatcgaagagcattttttcaatctttcttggtgtgacatcaaggatatatccaggccctacagcattgataaaagaaattctcagttaaatgcagaacacttagttttaatattccaaggtatttttttgaggaatcatggaattttagcagcagtgtagcacagtggtgaaatggatacattagtatgtgtccgtaccaagtgggcttatttcatccaaacccttcgaatggacaaccaatgctctcttcattccaaatttctgagctgccttagccatcttggtaacctgagtaaaacaaaatatgttcattagggatgaacaatgaacactagatggaaaaccagcaactgcaatatagcttttagcggggctgacatctcaagaaaaaaagctttataaccatgtatctgcaagtcaagtaacacaatatttgctaaagatgaagttcactaaaaattggaaaaggagaatcttatatctgaactctgaattgagcaacatcggttcaacagctcaacagtagatgtctgatgcttgcctttaaggtctttaatataaactcgcatcatttgtcaacttaaaaactgccctacacctactttaagtataaaaccaagacaatagtggtgatgatgacgatcatgtgggtcaacgaaatattaaattgtcactttaaaaaatcttttcttgcatatcatactatttatgctttgatgatttactagaagaaaagaagaaatgaataaggaacttactatgttctcgtggtaaacaccaataacagcataaggcacccttgctggatttaagagaggaccaaggatattgaaaactgtctttattttcagcttcttcctcacaggtttcacgattttcattgctggatgatagtttgcagacatcatgaatccaacacccacctcattgacacatcgtttaataccctgaaaaaagaaaatacaataatatatataaaccccaccaggtttctgatgccataagatgcatataatagtgaataatgtaaaatttgaaaagccaggggcaaccagcctttctgtgcttagaagaaacagccacattataaataaatggagcgactacatctagaattcctaactactccctttgtccacaaatatctagagacgagtctaaatatgtaacaccattcagcctcagtttgtgactacaagaacaagctatgtgtatctgcacacagtaacttcaaatgttgatgttcataatccaattactggaatccaacaattcaattgtgcctttttacaccgataagcaaacctaaacaaatgatagaaccataaagaggctgatctacacatctatgtagtagatctgagatgtcaactagacaaatggggcgtgcttcgcacctcagtcagatgaaggttggaggtaccaacctcagtggtcagcacaaattttcagtaagctatatctgcttgcagtggcagagagacagaggactggcaggggccgtggctacccctatccccaagtatcgtactattttacgcggtacacaatttagcactagaatgagtatagatctatcatttggaacatgcttatataattcctactgcatggcctgctctacaaaattttctagttccgctaccagcagcttggtggatgtgcagctctgcagtcagcaccctcagtgttggagcaaaggtttgaattgggttatgtattatgggtatggatactggtgttgtagttctaatgtagaatctctccctctgtttatgtatctcatgaacagaccaaaccacttgtactggaactttgtgatccactgagatgcaggtggcctgcttttgtagcctaaccttttattcccagaaaaaaaaatacacatgctgtaaacatcacacgtgtctttagacgaaagggagctatggtcttcgactactcttcatagccttcttttctttgggtggcttgcaaagggaccatgctgtttcagcttccatttcatatgtacgattatgtacttgacagagaaaaaaaaagtcaaacacagaaattacttcaccaaactaaaggttaaaaccacacgggtgatctaggcctgcaacccacatcatattttagaggtattcacgaggtaatatcacttgccagttgccatgaagcatgaatagtgctcctactagtgctacagagtacaggagtacaatataaatgcatgaatataagatcctaaaggcaatactagctcacaggaccaggcagaaagcaatcagtggtcaatcaggcaaaggcaactacctcgggtcccaactcgatgttgacaccaaacgcctccagcacatcggcgctgccgcaggccgacgagctagctctgctcccttgctgcacaaaacgcaagcgagaacacattattgcatcaccactagtagtactactacctaaatccaattggagcacaaactgaagggaaaatggcatgcgcatgtataatctcccataaacaaatgaaaggggcgaggagccagtaccttggcgactttggcacccgccgcggcggcgaggatggtggagccggtggagatgttgacggtgtccgcgccgtccccgccggtgccgacaatgtcgacggcgtcatcgagcccgtcgacccggacgcagcagcctatcatcgccttcgccaaccccacgatctgagaacaaggcggagaaatctctcactcccatctctggaccagaacgaaatcaaaattagcgccgcggctgaggcggcgcacccacctcttcgtaggtctcgcccttggccctgaggagcacgaggaaggcggcgatgcgcgcctcgttctcctcctccagcagcagccgcagcgtcgcctccgcctcctcctccgagaagtggtcaccgccgatcagcgtctccagcacctgacgtcaccaccaccacaacaaacaaacaaacaaacaaacaaacaaacggctgagacgagccccggaccagatgaggacgaagagggggagaagcgacgagacattgcggggcgcaccttgtcgaaggaggcggtgcggggggaggcatcggaggcccgcgcggcggtgtgttgcacggcgacgcggggcggcggcgggaggcgcgcggggagcggccgcgcgtggtgcgcgcggagggggaggaggtgggagaccggcgcgggggcgaggggcttggcggaggaggagagcttgatcgacgccgccgccattggtgcggcgaggcgacgcgaggggcgagtggattcgtgcgggttgggggtggggttcagacttcagaggaagagagaagccagcccagtgttccgtgtgttggtgtgaggcggagacctgcgagcgagcggattttgtagggatggctgcgaaactgaaacagatctgctcgccaccaacctcacttttcttttccacttttgggtgtgtttggatctaaagtttgcaaaattccatcacatcaacatgtcatacacacacaacttttcagtcacatcatctccaatttcaatcaaaatccaaactttggacggaactaaacgcagccttgttgcataggatgagtactccctccgtcccaaaaaaagacaaaccctcgtttccgtgtccaatgtttgaccgtccgtcttatttgaaaaaattatgaaaaaaaattaaaaagataagtcacgcataaagtattcatcatgttttatcatctaacaacaatgaaaatactaattataaaaaaatttcatataagacgaacagtcaaacgttggcacgcaaacccgcggtttgccttttttttggacggagggagtatgcaggaataataataatctgtactacagttattgaaagtttgaaactacagtatctgaatatctgatctactgccgtactaactctttttattaggcaactatttccttaaatggttaaccccctttaaaacgtattataggaataaagaaataaaggataggaaaaacatataaattgaagtagcgtgtttctttaatcctataatatggagtagaaaacacagacaaggttctaagatatctaacctctcacttaattctctttagaattgattataggaatgtaatactatacaaagtttaacgtccttttcctataaatcaaaggatatgggaactaaatgttgattggttggatagcattaccgtcgtgcacgtagcccatccaggttggatcctaagcgctcgcaaaactggcatgttccatcaatagctgtgttactgtgtatatctgatttatatatagaggccggatatatccatttttttttaaaaaaatcatagggtatataggaagaaaaatcctaagaaaattattcctatgattattttttttaccaatccttcgtgggcccttagtatagaattacaacatggtgtaatttaatgcctctccaaaatgcatttggtacaatcactttgatacttttatcttataagaaaaaccgtgtaatttgatgtttgggagtaggttgcagtcgatgagtgctttagagcaagtttaatagtatagtccactactagctccaaatcatctataaccaacgcaatagccaattcatacaatagttgcttactatactattaatacctagtctcactagtcatacacatattacgtcttgaaatccgtgctgcagctgactatatgtagcccgctgctcttctctctcttcttttatctctttaaaatatgtttatagctggcttgtagcctgctattgtacctgctcttataggactatgcagcatatgtgccatacatcctacactatcatcggattattccaaaaaagaagaagattattataggatgaattattgcgcacgtggaaatcgcgatgtttctacgctttggttgttggagagacaggacgaaaaactcgttctcgtgagctcgtcctgctgatggtactctccctgcttcttccgtggcgaccttttccaacgatctggctgtaagattttgctgattcgttgcacaaacaccacaaatccaacttgctcatatcttttgtcgcgaccacgatatactatgttatgtttgaattgatgaaactgatgagactggaagattaagttaacgcatgtaaaatgaaaaaaaaatcatcaacatacgactaattatgatttaatcattataaatttgacaaatagatatttgatattttaaagcaaattccgtagaaaaatttcgcaccaatcacatcatttagtagttactccatacatctcattttaagtgtgctgtggacctctgtatccaatatttgatcattcatcttatttaaaaaatttataaaaatattagaaaaataaatcacgtgtaaaatattatacatgttttatcatctaatatcaatgtaaatactaattaaaaaaaatttaaaataaaacaaacaatcgaacgttagacgtaattcgacagctacaaggaggagagagtatgtgctaacgaaaatggacataaaatctagtaatctttaactagaaaaggacagttgctcgaccggttccctatctcgcgtgcgtatcacatggcttgttttcaattcgagagatttcgttttgacgagacaggcatgacatgacagcacccgtgtttagatttaaaatttagatactcctttttcatcacatcaatatgtcatatacacaatttcttagtcacatcatctttaattttaaccaaaatctaaactttacgttgaactagacataaacacagcctccattaatccggtcagagaggacagcgagatagaattattttttgccagccaccagtacgtgcaagcggttcggtacaaactacaaagtcagataatgctcgcaattgcgtaatgttggattaaaaataggctacgacttctgcagatagtacaacatttcttttctcccttggtgacaagcgcggggagccggggaggacgagtagtacggctgcacggcaccgcgcttggatgtagatgaatggaacttgactactaggtgtactcctacctctcttccgttcagctccggttccgggcaagataggttgtttgctgtgcgttcgtagtgttgttgcctgcgatggggacatggggtcacggcagaattttcctccagtggttggtagatttcaggttgccggtgtttgcccggcgcctgtggattaccaataacatcagggagggatatcagaactggatgttgattttttttatataaatagatttaaaaaaatcctattttaagaatagatctttttcctcaacatcagttcattaacacgaaagttcaatgcctcgacgccaataataactggcaccctaccatagccctctgtaaaagcaaagtcaaatagtcaatgatgcaaatgggatcggtaccaagaatattagcaccaaggacctactccgtatttataaaataaactagggctcggtttagattttaacttttttttttaaactttcaactttttccgtcacatcgaactttcctatacatttaaacttttaacttttctatcgaatcatttcaatttcttcaaactttcaattttaaggtgaaactaaacgcagcctaggtcctcaagcgccgactcctctacatctcggctgctagagagcaagggtgtcagtgtcaaaacattggatcttggtgccagttgtcctgttgccaagactatttatgaaatatttttttctaggggtttatttataaaataaaatttaaaaaggaccagaccaaaatgtcttggtgacgtgtgcttccgctattacacataccgatcacgtgtgcgcatccggattcccaagaaagaaaaacattgcataatactccctggattctagggagcttcgacacgaggaaatctgcaaaggacaatggctaacagcagttcacactgccgtcgaagagtcgaaggcttccccatggggaatacgagcatcaaacgtgcaaggataaaaatcaaaacttactacagtgttgaaggtcaggtttagcaagacaacacgtacaatcatacactctgtgcccacaaggttcctgtactacaaaagcgaaaattgaatactttaggcagaaaaagagagttggcaacaaaccaaaccaagcaacaagaacgagtcagtccatttttctgtccccagcggcctaatctagccaccgagtaactccatcttcttcactcgcagctgcaaggatctcgatacagacgtccaatacagcctacagaacatgcaaacagtaggaagctgagtacattagcttaagtgcttgcacatgggataggacacaatgtgactgtttcatttcgtggttggacgcatagtgtgctactgttttatacagaaaaagagcagtaacctacttaaacaacgttattgaagagggggcaaggggggaggagatgcatgaaataatagaaatcctctttttagaagcaaatggaaaagttcataccgatgaatttctgcaattgataagtttgcaaccctccaacaaggacccctccagcatccagctctcccaaacatcaaatgtatgacttgcaaacacaaactccatcctcctattaatcttcagcacatttaaaaaagttaaatgttagaacattagcaaccctgggtgtcgataagaaatcaaaacacttctgtttctcaacccattttactactggaaatggaaaagttgcactagtagccctataaatgttgcgcatttgagcaatcaaacttattacttttggttgggtgtatctgcttgtacagtgcaacttgtacaagtagaggtataaaacctaagcattaaatagaggcacggacaagtgatgaaacaagtcgaaggaacagaggcatcagattaactatggaaagtaaaatagatgaccttacaaagctaagattgaggcctaaatgactattcgatcatgagctttttgctaagtttcgataaatctgctaaaacaccaaaatagaaaagaacagattcataagttcgcttggctagaagtgtcattaatttcaaaggaaaacatgatagcagaccttaatatttttttaagcagtaatcagcagctaccagaaaaggagagatgatacctgcaatagtttaccaccagcgacgaaggaacgtaatcccatggtatcctgaaaggcaaattgggtcagtagaagtgccagtgccagatatgcgtcacattaaagtaaaatttgaatgggtaactgaagcaagcacaaaaagggaaaggctaaaactatattaccttgtttttgaaagtgactaggaactgagcagcagggtccctgtttgtagcatttgacacgatatcaaggatccaaccaccaccaccagcaagtctctgtcttgcaacatggaaccctgaattatcttttgttctcaaggctacaacaaaaccatctttgagtgtatcaggatatttccttctgagaactgtaggcaacttcgtctcagaagttatttccattggggattcagcaggagatttctgcttgtattttgagtcctcaggagacgcaaatcgtgaactggaactcaatacctggtcccttccactcattgcagtatcatcatctctgcgtgaggaataattactgccactctctacagcagataattcatctgttttctgttgagatctgcggcgagcaggtctctttttccctttctttccagaacggctgcgccttccttctgatcgggggacaatatgttgagatctagcagatgcttgaggctctttatgctgggatatggctctcctcttttcgtactccatttttaactgactttcatctgtctgctgctcagaataaaaaacttgtgaactgctaaccttttcttctagctgatcatcttcatttccagcttcgctaatttcctcatcttcatcagatattgcactacttggaacagcaccatcaaagaaaaaggactgcaatatcgtgattgctttctctcttatttccatccacacttcttcactgtagtctgcacttcgaggaagaattaaaacatttggcatctcccttacctatgtcaaataaatagtatccatcattttgctgaacaacaagttctttttttataagatggatgatgaacaagtggcaccaccatagcaatgcagaaaagggcacagttgtttgtcctctactactagcatattggttgttgctcttctgtacaatatgcagaatcaagagagttcaaagttatccctaaaatagtaagagctcaacaggtggagtgcagggaacttgaaatacttgatgctaaactaaattaaatatttactcattttccatatgtttttcctagagattccttttcaacatccggaagagcagagcattctaaatggtgatgttttgatcttagatgaatttcatccatcgcaaatggccacttatcaacaaaaaaacacatcaaaagctgatggacgtacccacgcttccatccattgtggaccttcagcaccatccaatgcacaaccagctattgtaccatcaatcaatagctgtttgagtgcacaatcatctataagttggcaacttccagtatttactatgaatgctcctgtgagataaacaagaaaattatactgtgttttacggctgaactaaaggcatgataagcattatttcggaatatataatgcataaagcagaagaaagaaaggggttgaagataaaccttaccaggttttacatgctgcagacagtcagcattaagtatatgcatcgtgtcatttgttaatgtgcagtgcagtgaaacaaggtcacttgctgccaacaaatcattgagagtatccattctcctggcggcagaaggaaatacaatggaaggccgctttgcttttccattagccttcagtagacatgctaattcagttagaatagtcaaaataatactttaccgcctagcatttcttaaaatcagtaggtaattgcatacaagtgcgacaagatatatatcatgaactttggacataaataatgtgaactgaacatgaatttggggagatttcttaatgtaacagaaagttaatagcccatgaaaactttgggggggggggggggtaataggttagaaccagataagatatacccatcaagatgttcttgtcacaatgtcatcccctcctttgcattttagcataagttactactccctccgttccgaaatataagcacttctagcattttaaatttgtaccaaaatatagcccttctggtgtactacttgtcccatcaccccccccccccccccgaacacacacacaccaaaaaaaaaaaagcttcccatattacccccaaggccccaaccatacctcatctatgagggggcatcatagtttcttttctattcacttaatctttgctaaaaccctagaaatgcttatattttggaatggagggagtattgttcttacttctttatccaacagctagcattcgtaccacagcttacagagaatatatagttgtctcattcagaaagctgaagaattttgctaaaatacagggaatgagatcattcagctcacaacattacaaagggacgtctcatcataggcagaagcagtgagatcatttaagtcataacattccaaatctttggactgtctaactgttcaatcacctattccaacttaatatgttcaaagaagtttgttcatagcagaacattactaatcagaaaacaactcattctagaattgggggtgaaactgttccagtcggttgctaggtgtatgaccaaatgaaattaccacaacaacaatgcgcggattaagatccagagttttagagctgtgcaagtatacgtagaacagtagtaagaagaggaaactacaggagcgtagcaagtcgtagatccagtaccgaatggcgcggatcgaagtagaggacgtccatccggaaggcgaggctgcgagtggcgaggcagcgggcggcggcggatcgaccaatgatgccgagcacgaggccgcggcagcgcctcatgccgcgacacatcggctggacggagcctagccacccagcggcgacagcggccggggccgacgaggcgtggcgcgagagcaggtgggtccggcggagcagcccgaggaagagcgccatgacggtgtcggccacctcctcggctcggttggcgtcgacgtggaccaggcggaggcccagctccgcggcgagggcggcgtccgcggcgcggtcgggcgacccgaggcagagcaggagctgccacgggcggaggcgccgctgcgcggcccgcgggaggaaggcgagcgagggcaggagcacggccgcggccgcctccacgcgcccggaggcgacggcggagagggggacgtgctccacccccgccacgccggccagcccctcctgctccagcgacgggtcgtcgaggcagttcagtgacaccaccagcggctggcccccgccgccgccgccggaggccgccgagcgggccatccctgcgcctccctctcggcgctcggatcgggagcgtcgcgtggcgcgggttttggtgcgggcctcccgtctccgggccgaggggggctttttgtcccgtgcaaagggaagaggaagaagagggaagaaatgctctgctgctactacgcttgtcagagtggtgggccgcacgggggccaccactcaccagctcacgagggaacggtgcgttgcaaaccgtcagattcgcattgttaattgtttgcagcttgtgcttgtgtctctcgcgccactgccagtgactgagcagatgcaaacaaatcttgaattatttctttaattcattgtgatgattcgaaaacattatttagcatggcaatatttatgaagatctagtagctaaagtccagaaaagatcagttggcatatccatcaaaataagagaagtttgtttcttcgtacttaatcatggagttttgggtaccaagtaaagcactctctgcttttcttccctccaagcaaagcctggtttagttcccaattttttctttaaacttccaactttttcatcacatcaaaacgttcttatacacacaaacttttaacttttccgtcacatcattttaatttcaatcaaactttcaattttaacgtgtattaaacacaccccgagagaaagattgcctcacatcatttagctgccaaggatagacagctgcccgccgcctgtgtacattgtaacaaaaatgccggactgaactcaagtgaagagttaaaagatagagacatagagttccatgatttccatcaagtaacccaacaagttagcacaacaagatcatgccatcgagcatcatcattcattatagtgcatgcgcttaataccctgaacatttaccaggcatgtgatatatcgtcacaatcaatctagaacagaaaaaagtatgcagagcgcaaccggcatggaggcatgttactcctccggtgcattgattctgctcaatcacacaagcagcagtacagcatggttgctttcttcagagccctcatgaagggggaagtaccatccatgcatctatcagtgaaagctactaacgaacagtatttgtcagtgaaagctactggacagctgttcagacaaaccaatttgtcactttacgaagctgacatggatttttccttcaaacaaaaatgcatgaatattaacagtaagagatgacaaaactgtcgtgtagtatgttctgaacttcgtgctgcttgtttgtcttgacaaccttccaacattcgcacattcactgagttcaacttatgcttcacttcgctatgctacttaacttcagaaacaaaatttgagtgtggctcaattaccttgcacttctattccttgaacatttcagtgttgcatcagaggcatatgcctaaaacacactttgaacaaataaccaagtcagcatggtattaaagttttttaatcaatcagacaggcacatagtacccctagagctaataatcgagtgttgttacgttaacggtacataatactgtctgcagctaccagctactactcaccagaaagagagccatcaacagagggggcacacaagttgttgaagcaaatagggtacatctagaagaaattgttcattctcaacctcaagcaagttcgcaaggtacccactgtttcacttttgtgctcatctcactaggaactgaggtagaccactcatccaagtttggaagaggacccgtcaatgcaacgtaatttacactctctttctctgatagtctcttccagttgagctgtaattcaggtttacgtcaggtgggcattctaacaacagtgacatggcattgctcgtatacgtagcaacccaaaacagttaaacaattaccattccatattttattgttttaaacttttccatcatctagtactagaaactatacaactacagcagtcaaaatatggatatttctgtggttcatgtataatcttacctgccccggaaatgcagcacagagtgccttaattgtggaattctgaacccaggacgaaaggcccgtatcattagcaagagatacagcagcatcagctccaccacagttaacaatgatccgtccatctggcattagctttttcgcgatttccaaccaggtttcaacctgtaacaatgttgaaattaaatccagtagaaaataaaaaactgtggaagtgttccaaaaagttaaaagaatatagatatacaaaagtagcgtccaggaattttctctcagctgcacttttacatgttttgaaaaattgttcaaattatttcaattgcagagaatcatatcagccatttggtcaattaggcttgaaaggaagggtcgcaaaggagagtaatccatggatgccgaagacactaaggtcacgtaaggttttttgttaagaacactaaggtcacacaagtagcttacttttgttggtgtatccaaagcaccctctattgatattgggatgcataagattttttgtcgacaaattcacatatcactatagcaagccagccaaactaagggtaataaatcaacacatcatgagataaattaaaatttattacaaacttcaagatatgtagatatcaagtaatttcatccatgcttgaccatgcattcaactgatccaaggaataagaaatacatgctcaaaagcatgaaatctgatgcaaccaacgtagcatatagactggtaaaaaatgaatagaaagagatgcagaggaaatttacttcttgtagctgaggtatgatcttcccatcagcaaacaaatcaacaacaatacctgtacacattaactagatgttgttaggccagaaaactttgagatgcacttgatggtgaagttgcaaggagtgtgtggtttcaaccccgacgttttttgttcaatctccaacacgctcacaatttcttcttaaaaattgtttggagagatgtctcttcctccaaactcttattttttaggccagaaaactttcaaagcctttgaaaactcaaaaagaaaaacattaatctaacagtacatgctttccaatatactacagataatccaactagcatactccaaaaatgcatcatccaagagcgttgtataattaaatagtaacaagagagtaaagcatgtattccatttgcatcaggtagtaagcactcaccagcaaaccctccttcaattgtcagcgttgtataattaaatagtaacaagagagtaaagcatgtattccatttgcatcaggtagtaagcactcaccagcaaaccctccttcaattgtagctgacggagaaagtgcatcaccaatgcgcacagaaagtgaaccacctgattctgttgccttttctaaatcagataaaccaaaataatcccttgacagttcaattatctgtcattcagtaatgcaaactgagagtaagaaatgggcatatgaaaatggatgcgtggagcacaagggataagtctaaagaaaaataatgcaaagaggtgcttgagctagcttaacagccttaactaggaatatattactgaatttctttttgcaacacaataagtaacaatgtgaaaatatttcactaccatctgtgagcctgtggtcaccaaacaattaaaaagagagagaacaatgaaaagagtgttcaccttaggatcaatctcccatccaacaagttgcaaccaaggataaaattttagcatcagatgtgctgcagtcccagcaccctgaaaaagaaacaggggaaaagacaggaatcataatgtgcattgaatatccacaagcgtgtgaagaggtaagttgcccgtgaaaaaaatagaagtgagttgttcaaatgaaaagcctccgtaatgcttgtggatgtatgctggaattgtgatgtgtgctgataatctaattgcaattggtcggtaagacatccattcaggccttcccaaaccctctaagcatggcaggaattttgctttttatgcatagtagttatgcagaacaatgaagtatgatgaacaagataataggtgaatcatgcaccaagtgatttaccaatcctagaagagcaacaggaccacgtggaacaacagctggtaggctcacgaactcatcctgtacaataggaaaagcacaccgtattaagcatttacattgagcagccatttttaaaggatgaaaaacatcatttcaaacagaatagttggcgtagaaataggatgcgttttgcaaagaaaccaacccatcacatagataacaagtacctatatgagcatattatagtctttttttttttttggtactaaactgctatccaactaccaggagcctattactgtccttctcaaaaacttgtttatcatggatagttgacgggatagagcgtcaaattcctaatgcatacaaggcgctcaacaatattatgcttgtatgtcaaaatggcacattagtaatctaaattcaactcgatcagttcagattactcatacgataaatgcataccctgtcagcactcccgattgaaatcgctctcaaatctcacactcaactcaaactttcaactggatcaatttgggaacactggacgaacagcttgtaggcatgaaccttggtagacaaaggttttcgtgctttgctagttaatctgcagcttttcggttttcttccctccgttttgaacgacaattacaacaaggttagggccacgatcccatggtgcgctccgtgaccggttagtggtgaatgctatcccatacgccccgggtcacggcgcacgacggcacgacgcgctcgccggctcaacggattcagcaaaagcaggcgaaacaaaacagcaaacacctcacatgcaatctaaactacgctataaagattagaagcaaaggattacagttctatacccaatatgagttggtccagactccggtcttggggagaacgctgtgaacattccctgcacgatacaaccaatcgggagcacgaactcaccaaacgaatccaatttcgaggcggaggaagaaatcgcagtgtgcagcgcaatacgtacggttggtgtcgaggaggaggtagcgggtggcgggcgagtcgatgatcatgatgacctcgttgaagtcgctaccggtgatggcgaggagcgtgtactcctcctcctcctccttcgccgcttgctcctgctgctcggtggctggaggggcggagacttcgccgccgccaccgggggcgcagtacagcggccgccgcgccgaggccgctccccgtcgagggaggagggagactcgggtggcggagcggcgttggggcttggcttcgcggcggcggtggcggtggaggaggcgaggcggggagaaggttagcggcatggtggccattgctgatgagatagaatgctaatgcacggcgagggattgggttcccacgatttcaagccgttgatggagatggcgggttaggaattcccttttgataactgcaaagcgtattagcgtaatcggttcttctcttaaaccatgattatttcttaagaggccttttcggatgaggcccgataagagaaaatttcagaggcccagcagatatagtcttacaatgttatgggccataattgggcctgagtattctagtgtggttggtttcatctgaaatcaaactgcgaagcaagcaagcagtaaactcccagaataatagcatttcaaacctgtacaagacaaacaatcttgatgtgttgtattgattcgaaacttcgaacggctgtttcagaatatgagcaattttttttgggacaggaagaatatgaccatagtacttaactttctcgcaggtaccacctactccaggtgattgtgcatgataaaatgaatctgcagctaacaacctagcctctccccaacttccaatcagtttggtcaattggagcctttggacacatgcatcggacgccaattgacctgtcgccggccgccgggagacacgccgcgacaggggccacgacgccgccatgacatccgtaaaaccagcaaagctgcaaagacatcgcggccgacactgacgcacgcaacggcgcacgtcagatgagcccacgttccttgagatcgccggcaaatacactgggaattcgatgtttcaccgatccgccggcgccgtctcgcgcaccgacgcagtttctatcaaccactctctccatccaccaaattagccaaaagaaaaaggttcggttggtacttggtaggctaagctttctagctcgttttctttgtgctttggctcgctatcaacgagcagcctcccgcacttcacggcctaatctccatcaaattgcagtgacaataatgtactcttaaacgtatttaatgacacgtacacatgcagcgaatcccgaggacgtggatttatactgcaactgtagttaacgtgtcagcgcagtgcgtgcatgcgtgcgtgcaagcgtgcaaggtgcaactgtactgcatgcagcatgcgtggacaagacgtacattagctagttggtagtggcgctgtacgggagaggtttcgttggccggcggcgagggcggtggtggttgtgttcgccggcgccggcgaagagctcctcacagacgtcggcgaaggcgcggaggatgaggtggtggtggcgcgacgagttgagcgagaggaagcgatgcagcagctcccgcagctcgggggtggccgtgatctcgttctccacgatcatctgcgccatcgaccgccggaagtcgcccagcgggtcgtccgactccgtcaccaccggcacgctctcctcctccagccgcccgcgccgccgcctgccgcctgacgatgcatcgctcgcgctcctcctgtgccgcggcggcggcggcgtcgccggcctgatcccgcggtcttcccggacgcccagcgcgcgcacgccgcgctccagctcgcgcagctgcagcaggagcgtgcccacgctcggcgtgccatccgcgtcgtgcacggtgttcggcgcgggcgtgggcacggtcaccctcgtcgtcttcgccgacgtcgcggtagcacttgacgtcatcgtcggtggcgtggtcgtggcgggcgagatattgccggcggcggagagccgggacacgacggacaccgacttggcgccgccgcagccgcacatgaagccgcgcgcggccgctgcgctcgaacccttcttcttcttcttcttcgatggtaggccctgatcggccatgccgcgacgtgtcgtcgctttcatgtccttgggttgagagcaagtgagcttgtgcgctgtttgttgtggactagctacaccagctatagtggggagctagggggacagacttcttaaagcctgggcttaacaagagccagctaggtgaatttcagacatgctgatgcagtagcagcaattactcaactacagacacatttataattccaagtcattaaccaaaaaattagtatcacgctatccgttgttaggaggtcagtgtcagattctggtcgatttaccagcggtaatcttgggtcaatccagggtgaaaacaacattgacttacaaagtatagctcaatactatttctgaccgttcagttaatcggttactactcctatttgtttcagacttatacgcttaccattctgttcgtgtacagatgtactgatgctttcagattttgcataactctatttgcaagggaagttattacaaaacgcacgcaaggttgtactgctacgtcagaaacagggcaaagaacacatcagacaaatgaaaaactaacataccatttcccaagcttgcgcgcgatttgcgcaactaaatcccagcgaatagaacaaaagagcagatgacacgagacagaggaaaatccaagggatgtcaaagcgaagtgacgggagatttggatgggcctaattaacagatttcctttcaaggtcagagaccctactgcaaacagcaagattacactacagagtacagtacagtgcagaggaggagagatgccttggaagaaacactgtgctgggcctggacgtttgtttgcttgcttgtcacatgcatcttctgctggtaatacattccggccacgctaggcaaagtgctccccgtgctctgctgctcatgatcatgatcatgtcctcaacagaaggccaccaaacttacatgcttgctgtccctgcagctaaccgagattgaactagtgaagtgaatcagactgtcaggaggtaattgatgcagtaggaacaccaaacagcaggtgtaacagacaagtgtgtcttctttagagatactgatcattagatgatggtaatgtggcatacatcaaaacgaaaaaaatgcttcattagactgctggcctattctgcaaaaaataaataaataaataaatcgcattctttttaaattggcatgtcctgcctttttgagttttgactctagcacaggcacttggtactcgatcaaacatgttgtctcctgataaaaggtggcaactcctgtatcagatgcatcctggggtgattgattggaaacaagaatagttgtcttcgatcgttgtgatggacaaatggtgtggaatctcaatgatgtcttgattggcttcatggctgacggctcatgtctacctgggtatcaggcatggagcattacgaccggactcaaatgatggtatcagcgccggcgaaggcaatgggccaaactagggtcatatccagagaagtctagccaaacactgatcttaactcagcccaactgattcttggcccagtactacatatcatttctcagcccatctagcataaattggtagaaacagcccaaatacccgcaaaaaacagaaagcagcccaacatctgccttgtgaaaattgggcctgaaatactaacaagcccattatatccacttacaaaggccctaagtggaataaataaggaataagttcatctgaggtcccttaacttgtcaatgaatccgatttccgtccctcatccggaaaaccagacacaacgggtccctcaactatcaaaaccggtgcagattagttcattcggtggttttgaaagcggttttagctgacgtggcgcctacgtggctaatttaactcggtcttcatttgacgtggcattaacgtggcgattacgtggcaattcgatccggaaaaataataaaacccgtaagacccacgtgtaagtctcacacagaaaataataaaaaaaagtggtgggacccacagtcagtccaactcacctctcctcttcttcctcctctctccccatctccctatcttcatctctctctcctctcctctcctctcttcaggcgacggagaggcagcggcacgcggcggcagtgcggccggacaacggtgcctatgcggaggagctcggccgagcgacggctcggcgcgagcgtggccgtgtggcggcgccggccccggcacgggtcgcggcctcggcggtgcggacgggcagcggtgccgatgcggaggagctcggccgagggacggcggcaccatttctggcttccctgcctcctccctccccgcccacctcgccggccgccgcgcgccgcccgtctcccgtctccgccgcgcgctgctttgctgctggtgaggtgagagaaaaagaaacagtgagagagatgaccagttcgctcgcgctgcccgcaactttctcctacctccggccgtccaactcctcttccctctcacaggctcacacacttggcgcgccccttgatcaattcgttccccttctttttcttcccccttgcttgcagatgggggcaactagaggaagcggctgagacaggcagaggcggcgggcatggtggcgccgcatgcagaagtgtcgttgcagccgcaggcgcaggggcaaggggcacaaggtagtgagcctcgcgcagctgcacaagcggccggcggtgacggtgctcagtctcgagttagacgatggcgggtcggagcacgtgtcgacgacggcctcctccgcatcgtctctcctctccgagacgagctcgtcacgcaattcgaccagtacgagaacgagatggtgcatctgtttcaggatcatgtgagggtcgtcgttgatcgtgttgttttgttattgctatgttgttcagcgatgtttttctgatggttgtggtgtagctctgcttgcttgttgtagacggagaggctccatcgcgtgctcggcaaggcgaggcggcggcaataccagtcgctgctcggcgcggcggaggcgcgcaggatgagggataaggaggcagaggcctcgaatgcggcgcgacacatcggcgagctagaggagcgtgtcgcgcggctgagggcggaggcggcggcgcggcaggcgaaggcgcttgccgaccagttccccgcgcgccgctccgcccaccacacgccgccactccgcttcgccccgccgcccgccatcgctccgcccaccgcccccctctgcgccgccgctcgccgttctgtaggggagagagagagggggatagagagaaaagggggctgacatgtgggaccacatgggccccaccttttcttattatttttttatagctgacatgtgggtcccatggtttttaattatttttccaggatccaattgccacataagtgacacgtcaatgccacatgggacgaggatctagtcaaagggagccacgtaggcgccacgtcatccaaaaccggacataatactgccgagggacattttctgcacggttttgtaagttaagggatgcgttgtatccggttttctagactgaggatgaaaatcaaactgggtgacaaattgagggaccgaaagtgaacttattccaataaataaacattcctgcttaacaatcctccagaaatagtttttctccgtggtactgggattgtagtcgtcatgctggttgtcatcctgggagcgaactcttgtgtttggaggtgttcgttctcgctcggtggtcgggttgtgactacggttttccaaaccctagtcacaattgtggccggagccggaataccatacggtaaccgtggtaattgtggcaaaccgtataaaatttatcaaaatttaaattatttttaaaatttatttaaatttaaggaggtttaccgcggtttttcttttaacgcaccccgtggtaagcgcgataactacgataaccacgtgcttaccggcggtttgggaaaacttggttgtgaccaaggtgttttttctctgttttcagaattgtgctgtcttgaactgtgtcttggaaaagctggttttcccagtgaatgatgccgtgatagctttctgtaaaaaccgggtcatatgacctactacacagtacgtatgttttatcgtttgtcttatttaaaaaaatatgttattattatttattttattgtgagttattttattgctaaaagtactctaaacatcgcttatatcttatgtatttagaaaaaaagtttaaataaaacgaatggttaaacctgtatacaaaagtaaactgcgtcatttattaaaaaaggaaggaggtgctttctaaaaagaacaatcttacagaaaagaaaataaatacggaccagctaaatatgttttagcagcccgccagtattcatggagtgcaacatcctacctgtataactatagccttgaatcttgatgtgaaaatggatgttctggccttacttagtttcaaattttttcttcaaattttcaacttttctatcacatcaaaacttttctacacatataaacttccaactttttcatcacatcgttctaatttcaactaaacttctaattttagcgtgaactaaacacaccctctgttcagaagagaaaacaggagttttgggacttagtaatgtctttccaacgccagcgccagcgtcaccatctttcttttccgatcacacggtcatcactcggtcaggttctcgtcttgcaaatccgctcgtctgctagctcacattcggtcaggctcctgccgttggaaaacgacacgacccaacgttccaacaagggggcagcagagtcgctccagttgggctgggagtctctgagcaaggcaaatcagtcttagctaactaaccagcagagacgtcaagcaattggtctcatctctttcagtttcataccaatctgttatcccccaaaaaacaagaagtttcataccaatcgagacgttttgtttgatgtcgcaacaatagtagcccggctcatgttctcccctgttggatgtttgcacatgaacatgctctgcttagcgatgccttggggagttgggatttttggcgatgtgggtttcgtacaccggcaggtgacgggtcgtgtccacccgatcgtataccgtcaccagcacgtccgcgtgccgatcgtgtccaccgaaacaacaacaactactactactactgtagcccaagtcgcagtcgcagccgcagcaggccatcgaccaccactacgccggtggcccaagtgatagtatttaggacgctttcgtcgcattgcattgcccgctcgcccctctgcttttgctgctgttgcgttgcgtgatacgctcgcctaactttggctaattctgctgatatttgctcttcttctgtcatatcaccttgccgctgcttctgatcatctcccgttcttgcattcttcttcttcttcttcttctccggcgtggtgtgctgctgacggctgacgctggctggtcgtggacatgtcgaaggtgaggctctgtcttttgctcttggattctcatcctgattactgtagtagcttctgtgggataaaatgatctctgcttctgaatccagtaaaatatacatgttgtttttgtccgttacacattgcgagcgttcgtataccatggtggtgcgtaaactaacactgatgtttcacatgttcctctgctgcagaagattgtggtgaagctggatctccatgacaacaaggacaagcagaaggccatgaaggtcgtctccacgcttgccggtacgcatcgtgttcgatccatcaaccgttctgcccgtgttcagaaacgatcaagagaaatgactgctgttcgtttatgcatgtcactcatgtcaggcatcgacgccatttccatggacatggcgtcgcgcaagatgacggtgatcggcacggttgacccggtgaacgtggtgagcaagctgcgcaaggcgtcctggccggcctacatcgagtccctcggcccggccaaggagccggagaagaagaaggagggcggcggcgatgccaagaaggatggcggcgatggcaagaaggagggaggaggagacggcaagaaggaaggcggcgatgggaagaaggaaggtgacggcaagaagggtgaggcggcgg

SEQ ID NO: 9514 - DNA, 1268 bp, Oryza sativa
gtgtttatgctaaggaccctataggagaaacctcttcggtttgttctcgtttttagcctgcatcttgcataggcgtctggagaatcggtatccgtagagaagtgttcccttcgggtggaactgcctggggagacgataaactcttagctagaacaagtgtggcttggaatatctttttaagttgcttctaaaaagacagataggtgaggcatacggtgagtaccgagtaggactttatatcatctgaagcaagcttctgaggctgtctaaataggattcgccaccctgcaaagatcctaaagttaaaatatctctcgaagtgaacagtattgaacagtaatttaaacagtaaactgaatagtgtttttgaatagtaatcagccgaataaacagtaaactgaatagtattcagccgaataaatagtgttttttgtccgaagcacaagagtggtatcataagtgagtcacaagagtcacaagagtggtatcagagccagtcattatagagaaatcaaattcagaagctaatattggaaaggtaattactaccaaagataatctgaatataaggtgtagattaaatcacattgaagaccatagttagcactctaacaatagtcaattaaatttaattgttgatctgatatataatttttatataaattgggataaaaagcaggaagatttagagcgaaggattgaagatttgtttaaagaacgaaagcaatctgaagaacaatatttgcttgtcagtaataaattaaattcagtgctaaaagagctagaggaatataagacaaggcagaataagatattacaaaacagtgactatatcaaagaattattagaaataataaattctagtaaaggaaaagagatagttttggcttcaacaggcataattacctcgtctcaagctattaattcagaaaaatggacctatctaggagtttgtttagaagaatagcaagcagagacgataaatctttaagttgtattgataaacaaaaaggtaaaaatgaagacatagatgagcttgaagatattgcagaagtagacaaacagctcgaaagatatcaacgagatactttaagggcaataagacctcaacaaatatattgcatgggattttttgagaataaaaatgggttatacagaatatctagagaagtagagttaagcgttttaacaagccagttgagttaaaaattgtagccaaggaatttgaaaatggattaaagtattcagggtataaatatattcaccaa

SEQ ID NO: 9515 - DNA, 7789 bp, Oryza sativa
aggttagggtttttaatattgaatttattaaaatactaaaatatatagtcaagaaagaggatctagaatatatctagatgtgtatgtttatttatctatattctatatttaatgtaattctttttttttttaatctcctttttttattttactcttattgaatcgcggtaaagtattctaattcaataaaaatttcgcgggcgaatatttactctttcctgtcttatttgttaattcataaccttatcaaataagacaatttttttggtttgttccgccatcccacccaatgaagtattgggattcttttcaagaaaatcctatccagtcataggttctgtcgttcccactgcttctcctttaatggttaggtttgaatctcgcaatggagcttccaaaaaatttctttccgagtcaatttctcagttttattaactcgggacgctctttgttattccttgaaatttgtatttcttgtttcaatcaaattacgatttcgaattctctgttatttttattatattgatgctttatcacattgctttttatgatgtaattcatagaccatacatattggaatcctatatctttcttatttctcttccttctttctatcatccttccttttatctacatcccctttagttttgcttcacaacttagaatcctatttttttttaaagaaaaaattgcagttgctacacgtatatgatagatttactcatttatgatagatgtatttattcatatagtgactgtttcttagttaggatctcgacaatacgaagcaataggttggttattagttcattttctataattacatagtagggttcattctatttttttttaatcccctttttgaaccctaaaaaaaaactaacgagtcacacactaagcatagcaattttattaaaagatttctcaattttcattaaatcttatagaaagaggtagaatttcttctttttttcagggattttagggaaaataaggctcttgtcattttttattctcttactgaacagaatgggaagacagggttggttattcttcgtctacgaatatccaaattttaactcctaatactccatagatagttcgaattggatagcagcaataatcaattttagcgcgaattgtttggaggggaagtctaccttttttgatgcattcggcacgcgcaatttcttttcccgcgagacggcctgcaatttttacttttactccctttatatctgtttttttagttaattcaatggcttttttcattgcctttcggaatgaaactctattttttaattggaaagctatatattctgcaagaatattcccccaatttgcgacctaccataggatttgttatgtaaataggtatatgttcctttccattatgaatcgcgattgtatggccaaccattgcgggtagaatgctagatgcccgggaccacgttactattgtttctttctcctccttcatattgaccttttctatttttgccaataaatgatgagctacaaaaggattcgttttttttcgtgtcacagctgattactcctttttttccattttaaagagtggcattcgatgtccaatatctcgatcgaagtatggaggtcagaataaatagaataatgatgaatggaaaaaagagaaaatcctttagctggataaggggcggatgtagccaagtggatcaaggcagtggattgtgaatccaccatgcgcgggttcaattcccgtcgttcgcccatcccattattgcaaattccaaaaatgcaattttccatattcctagttacgtatttacttacggcgacgaagaataaaactatcactatattttttccttttcctagttcttcttccaagcgcaggataaccccaaggggttgtgggtttttttctaccaatgggggctttcccttcaccgcccccatgggggtggtccacagggttcataactacccctcttactacggggcgtttacctagccaacacttagacccggctctacccaaacttttttggttcaccccaacattacccacttgtccgactgttgctaagcagttttgggataccaaacggacctccccagatggtaatcttaaagtggccgatttaccttcttttgcaatcagtttcgctacagcacctgctgctctagctaattgcccaccccttccacgtgtgatttctatgttatgtatggccgtgcctaagggcatatcggttgaagtagattcttcttttctctcaaaaaaccccttcccaaactgtacaagcttcttccaaagcatacggctttctagatgtatatgacgatctctagacagatggatcttatatgaatcgtatgatgaagtaccacatgagtggatatataggaaaggaatccaaatctgccgaatcgctcatgttatgatcttctacatcctaggtctccgcgttccgtcatctggcttatgttcttcatgtagcattcagatcgaatgactctatgaaattacgtcgatacttctacatattatgggtaacgtaggagacatccctattttcccccgggggtcttaattaccactgcttagctttcaattcgcctctgaccatcaaattaaatgtgaataacccgtcctcctctctttgaaacaaggggcgcttccggttctgtgcgtgcttcaaacaattttgtcttctccatattaccatatctctagagtcaataattttctatgaggaactactgaactcaatcacttgctgccgttactcaacagttttctgttgaggtctatcccgtagaggtagtcaaattggatcagtgatcgatttctaggtttcgtcgtaaacctaattggttacttccaattacgtaaatcaatagttcaaaccgcactcaaaggtagggcatttcccattgatataggaacttttgtaccagaaacaatagtatctccaattatagcccctctgggatgtaaaatatatcccttctcaccatccccatagtgtatgagacaaatgtacgcatttcgattagggtcgtattctatggttacgattctaccagatatgtctttttgattccgtcgaaaatcgattttacggtataggcgcttatgacctccccctctatgccttgcggtaatgattcctctggaattacgacctttaccacaacggtgccgtccatggatcaaattatttcgtggattggatttcacttgcctatctatggttcccttgcgtgtgctcgggataggtgttttgtataaatgtttcgccgtattattaagtattctcctttagtttttttctctatctagaagtggaatagaataacccggttgaagggtaatgatcatacgtctgtaatgcattgtatgtcctagaatagggcccattcttctaccctttccgggtagtcgatggctattcacagctactaccttaacaccaaagaagagttcgacccaatgctttatttctgtcttagtgaatcccgattcgacattaaaagtatattgattctttcccaataaacgaagacttttttctgtaaatactgcgtatttgattccatccataaatcgactttccctcctatgctctgagttccagtatcgataagaattcgagttcttattgttcttatgttatggtatgaatataccatgtatgtatatacatgtatgtatatatatacatgtatatatatatgtatatatatatgtatatgtatatatatacatgtatatatatatatgtatatgtatatatacatatatatatatatacatatatatgccataagtgtggctctgataccacacttatgcttcggacaaaaaacactgttcaaaaacactatttattcggctgaatactattcagtttactgtttattcggctgattaatattcaaaaacactattcagtttactgtttaaattactgttcaatactgttcacttcgagagatattttaactttaggatctttgcagggtggcgaatcctatttagacagcctcagaagcttgcttcggatgatgtaaagtcctactcggtactcaccgtatgcctcacctatctatctttttagaagcaacttaaaaagatattccaagtcacacttgttctagctaagagtttatcgtctccccaggcagttccacccgaagggaacacttctctacggataccgattctccagacgcctatgcaagatgcaggctaaaaacgagaacaaaccgaagaggtttctcctatagggtccttagcataaacacttgtctagaacaaacgtgcaggaatacttaaggaaaattacttcatattaaacagataagcttacatacggttttccctttcgggaaacccgaaggtaggtacaagcaagctgttcttaccttacacagcgttattacacaactccttgcttcaatatactatacaacgtaggctaaagtcactactactaagaatggtggaatggagggtgagagcgcgcttggaagctttgctctgaatggtgtcttcgttgttctttactttctttactctagctaattctctatagaaataaagttttttatctcttattttaggccactcacacttcatagagttattatattcttcatttatttcctttaatttattttcgtaatattttatctcactttcttgatctaatttttccataaactctgaaacactatgtcttctattatctattatatttctatcagatgcttctgtttctaagtcatctgtggttctgggtttgtaatttataaatctaatgctggtatttcctttactattttgataacttataaaattttcaggctgactcaaagttttgctttcaattaaatcactaattttccattcttctcctgccctttcttcagaacttatttttaaagggctcatgaaagttattcccttagagtgcatattttcaatcacgtcatttacatttattttgtatttggaggcacttctattagttaatcttcctataaattctatgcttactagcaaatttgttcctttaaattcctcgtatccctttgtttgaaaaccaaaactcattttatctataaattcttttacaggcatcattagatctggggctatatatgttatcaacatattctcattcatgtcaccttctaaaaatcctaatgctgctttatctattgtgtcccaccttttatctaacagagttattaaaactttagctcctaatttctttcttgtcatacctttgattcctattatatacataccttggtgaatatatttataccctgaatactttaatccattttcaaattccttggctacaatttttaactcaactggctttgttaaaacgcttaactctacttctctagatattctgtataacccatttttattctcaaaaaaaattccatgcaatatatttgttgaggtcttattgccctcagagtatctctttgatatctttcgagctgtttgtctacttctgcaatatcttcaagctcatctatgtcttcatttttacctttttgtttatcaatacagcttaaagatttatcgtctctgcttgctattcttctaaacaaactcctagataggtccatttttctgaattaatagcttgagacgaggtaattatgcctgttgaagccaaaactatctcttttcctttactagaatttattatttctaataattctttgatatagtcactgttttgtaatatcttattctgccttatcttataatcctctagctcttttagcactgaatttaatttattactgacaagcaaatattgttcttcagattgctttcgttctttaaacaaatcttcaaaccttcgctctaaatcttcctgctttttatcccaatttatataaaaattatatatcagatcaacaattaaatttaattgactattgttagagtgccaactatggtcttcaatgtgatttaatctacaccttatattcagattatctttggtagtaattatctttccaatattagcttctgaatttgatttctctataatgactggctctgataccacacttatgcttcggacaaaaaaacactgttcaaaaacactatttattcggctgaatacttttcagtttactgtttattcggctgattactattcaaaaacactattcagtttactgtttaaattactgttcaatactgttcacttcgagagatattttaactttaggatctttgcagggtggcgaatcctatttagagagcctcagaagcttgcttcggatgatgtaaagtcctactcggtactcaccgtatgcctcacctatctatctttttagaagcaacttaaaaagatattccaagtcacacttgttctagctaagagtttatcatctccccaggcagttccacccgaagggaacacttctctacggataccgattctccagacgcctatgcaagatgcaggctaaaaacgagaacgaaccgaagaggtttctcctatagggtccttagcataaacacttgtctagaacaaacatgcaggaatacttaaggaaaattacttcatattaaacagataagcttactgattatgaattttctttattccggacatgtctgtggaaacttctgccttattgtcgtcaattgtgtgaactatttcaggacatcttgtgaaatatttgtcatgaataatattctttgtacacccggtgtctactagtgctaatattttataagatactttgggtgtcaattttattttaacagggattcttatacctaatatttctttgaaaggcaatcttactatatatttatttccaaaattagttatggcatctcttagttgaattattttagcagtattactgtcgtttagtgttatcaattgctctttaaattcggtgtttggtatgtccttattttctggtaatgctttaatatcacaattattttttaggttctctaattctacttctagtttatttagtctattttctaacactcgtactctactagataaagtcttttcatctgattctaattctatttcttttctccatttttgtttatttgcttttatacattcagcacaagcttgttttagacatatactacaagtcactctattttcttgactagggtaatatatgcaaaaagcacatttgatattatagtcaccctttcctctaatccaatcatgttcacaatttaattgatccatcatttcaacctttagacctgctaattcgtcaattaaatctaactcttcatcggatgattcatattcttcgttgatagtttcaacttcgtctgtttctatgatagaatatattgattcgtcatcttttatttcatcatcacatactaatatgttttcgtttacgctatctataattagaaccctcccttgttcttcatatttactagaatatctcttttgatctttatttgggcatgttctacttaaatgatctggcgagttgcatataaaacatctgcatgttttgtcataggttttctttggattatatcttcttacatttcttttatgtaagaagggtgctctattatctgatcttcttaagaaataccttttctttgttctaatattattgttgtttctaggcttgtcttctccatatgacaagggtatttgaactattttattgcagaaattgtaatccgagtgtttcatagatctttgggcttggatacccgtgcatatttttcttagttgcttaaacacaa

SEQ ID NO: 9516 - DNA, 18293 bp, Oryza sativa
aaccagatacaacgggcccttcaactatcaaaaccggtgcaaacaaagtccctcggcggtttagatggtggttttggctgacgtggcacctacgtggctaatttgactcggtcttcatctaacgtggaattgacgtggcgcttacttcgcaattcgaaccggaaaaataataaaacatgtagggcccacgtgtcactctcacatacaaaataataaaaaatggtgggacccacgtgggccccacatgtcatcttcacacctcccttcttccctcttccctctcccccctctctctcatcttcttccctctccctctcctcatctcctcttctgcggaactacagtaacatgccgttgggggcatttatacccgttggatcaagttttggatgcacgagattaaatgctacagtaacaataaaaataattagtatattttttattgtggctacagtgttgttcactgtagcaacgagatggcactgtagctcccctcacgtttcactgtgcgcctctgccgttttcccctcaacggcagaggatgggaacccctcttctgcaggcgagcgcagcggaggagcgatgacgccgtgtgccacgactggcgctgcctggccacctccctcgacttcctcctcgcccaccaccgccaccagctgccgccccctcgtctttggttgcgcgaggtggaggagcaacaccaccgtcgccgatgccgatgctgctgtggattccatcgacctcagccaccaccttgatgagctagtgcgtgacggggacctcgtcgatgggggatggaccaccggaggagcggtaccacgggcgccgccaccttgatcatgtgttcccactccactaattcctttatcatcacaaacaatcgaatgaagtcaatcgaacgaagagaaaaccagtcatagtactaatcaatccctcaaaataagcgatttagtgtggaactactaactaaagcaaagcatgagcgaacaaaagctactccgcatccttaacttcttagtaccacggatggacagagatgctagttttggcattcctacaagctactacgaccattcatcaatcactcagaccgaaatcagagaaaggggaagaggtgggacctggatggggagggcgtccatgtcagcgcggagcgcgacaatagggggaaggccagagccgacgtcggtgacgatgccgatgccggcgactacgcggcggtgaggccgagctgctccagctcatggcgggcgagggcaccgttgcggtgctctcggaacgcgagctccggatgggcgtggatgtggcaccagaggtggagcgcctctccctccttcccgccggctgacgcgcgctgccgctcctctcccgtcgaccggcccgacgaactcgcgtcagtcgccctctcccgtcggccgctggatgccatctacagaagcaaaagaagaaaaatatagatagagagaagagagtagttaggatgacatgtgggtcccactattttttattattttttgtgtgtaactggcgttggtcccactgattttattattttttcggattgaattgccacgtaaacaccacgtcagtgccacgtgggacgaagacctagtcaatggagtgccacataggcgtcacgtcagccaaaaccggggacagtactgctgagggacttttgcacgggtttgtaagttggggaatgcgttgtactcggttttgtagtgtaggaacgaattttgaactggtgacaaattgagggacctaaagtaaacttattcccaaaaattacggtccggattggatggggaataagtccactttccatccctcacctcatggccgtgtatgaatagcaccctcaaccacaaaaccgggtaaaacccatcccccaactccgaaaaccgttgcaaattaactccccgggcggttttggaggcggttttgtcctacatagaaattgacttgcttacgtggtagttgacttgctgagtcatcaagcgggacccacatgtcagcagtctccacctcatctcttcccctctctctctttcatatcttcctcctctcaccttctatcagcagggcggcgactgcgacgacggcgcacggaggacgagctcgtcggctggacacgccgcacgcgggggagcggcccggctcgagcacgcagaggaagcgggaggcgccggggcatctcctgagagggggtcgtggaggacaaggcatcccctccaaattgccggccgtccacgcgtgtggaggatctcgccggccatcctcgcgcggagagggtctcgtcggccggccacgcatggggaggatctgtcggccagccccgcgcggggaggatctcgccagccgtccttgggctgggaggatctcgccggccgaccgcgcgcgggggaggagctcgccggccgtccgcgcgcagggaaatagctcgccggccgtccgcgcgcgggagaagctcgccgcccgtccgagaaggaagccattggggatgtcgccgagcattgggttgtgctgcagcatgaggacagagaggctccggcacggggacgacggtggcattgcctgcacctgcgcatggcggacaaccgctccgcgtcgcgcgcacgctagaagaactccgctagcttgtttgctgtttgctcgtgctcttcgatgatttcatggtctctgatttgttttgttcgttcccccttcctgtttcgcgtgatcgccggcgtcttctctgaattcggcaaccaccatgtgctacttgtcttgccgttgatcttgctgctcgattctatcgcctcgcctccgcttcttgatattttcctttcccgtttcttgaagggaatcatggtgagggagaaatgagatgaggtggagactgctgacatgtgggtcccacgtgatgactaagcaagtcaattgccacgtaggacaaaaccgcctccaacaccgtccggggagttgatttgcaacggttttcggagttgggggatgagttatatctggttttgcggttgagggatgctattcatacacggccatgagttgagggagggaatgtggacttattcctttggatggtgtcaaatcctagtcctggccaaattatatgggccgaaaatttaggcccatactgatagtggatcgggcttacatccagtaattagaagctctcggccacccacttccccgttcaaacttttggcccatctgaatgaggattatacttcttgttacgcctgtatgaatcctattaaatatcaattattattgatataatcctcattagatgggccaaaagtaatttttagtaaatcgtcatatatcctataattaggccacacctcagacccaaaattggctcaaagtggtccacaagtctactggtgccaaaactgttgcactaaataggtaaatgaattatgaacccacatggccatcttgtactcggccaagtattggcccacttgttgccctaaataggccgaaatgaagctcagttagaggccatgattttctcccggaattaagttcattttgacttccttagccagttgccgaatctgattcgtatccctgaataataatatcggatatctcgaccaccaactattaaaaccaaatgcagtttaactctctcggtggttttggagggtggtttcactgatgtggcgttcacgtggcatcccagtcatcaaatctctactattataaaaattgaaaatatttttgtcggtattttggtacatcatccgtgtatgagtcggtttttaagttcgtttgcttttggaaacacatatccgtacttaggtcggtttttaagatcgttcacttttggtaatacagaaggaatcatataagaaatctattttaaaaaaactcgcatgctaacttgagacgatcggactcctaactgcagctcatgatttttttcaaaaatataaatatccaaacgaacagtgaatttcattttaactaaaccatataacaataataagattaaaatagacttcacccattgtaacgtaaggatattttttctacaaattgaaaaaataaaatgggacccacctgccaccctctctctatgactctctccctccccctttcttcctctttcttcttctcggccacccttctgcaatgcgttcgccgcggccgtcacacaaagcgattaccgcatccctcagatctcgccgcgcccggccgtcgtgccctgcccttgcctcgctggataccggcggcgcggtgggtcggccgcgcgatccgatgaggcggcggccatcgtcgttcaagcgccggttggtggcagcagcgcccgtggtgattccgcctcgtgccctcctcctcacgcttgcctgcctcttcctcctgcttgcgctccggggctcgcccgaccccgaccatgtagtgttcccctccaccgacttgtccagatccgcggccaccaccttccctctcctccgtcaggtgagcgaatcgcatctttatatctcatgcaagaccggcggcatgtgtgtgcactgttggaattaatagatgggctaaggcccattcgaagattaattctttgtaaaatcacaaaagcccacctcatgggatggcatgcatgtggagtttagtaccactttgcttattctaggagagggggacctccttaaaagggaggatgccctcctagccacttgaagcatgtgtggtggagagaagagggggaacaaacgagcgcgctcgctggcctggcatggcatgttttgttttggaaacattccaaaaaattcggtgcgtgaaaacggcgtggagtccggataagttacgcgcgacttatccggttcggttacgcggagtggagatcgtgcgggcaccctgatcaagcgacctatctctatataaaccgagccgccgccttcacgcaaaacacacgaaatccatctagggtttgcctcctcctctgtgttgcgccgtcgctcgtggactactccatcccgctcgccagcgtggaccggcgatcgggagagcaggtctccggaacctctgccttcgacatcctgcaccgggagaaggcggcaataagatttttgggaagcgctttgcgcaactgctccctgttcgtccgtgacggttcgccttcctctccgctcgcgtgctgcgcgccttcgtcgacgctcgcaaccgcgagtagttcctgccgagcaaccggtctttccgccacctcggtacgtgttcgacatgttgcgcatatttgaactgttcatattttactgcttagtttacatgtgtagatctaatgatgcgttaatgctagtatatatctgtaatgtcatgatttatttatggaatatattaaatcattataggcgctgtgattttactatggctggttttgccgatgcactgaggccggataaatttaccggtgtgcactttaagagatggcagatcagggtcactctgtggctgacagctatgaagtactggcaagcctatgggcgttcttaatgctgaccagcagaaagaattcaatgaggccactactctctttgtgggatgcattcttagcgtgcttggcgatcgtctgatcgaggtgtatatgcatatgaccgatgctaaggagttgtgggatgcactgaatactaaattcggtgctactgatgctaacaatgatctgtatatcatggagcagtttcatgactacaagatggctgacaaccgttctgtagtcgaacaggctcatgagatacaaaccatggctaaggaactcgaactccttaagtgtgtcttatccgacaaatttgtggccaggtgcattattgcgaaactacctccatcttggagaggtttcggtactgcactcaaacacaagagacaggaatactccgttgaggggttgatagcatctcttgatgttgaggagaaagctcgggaaaaaaagatgctgcgtctaagggcgatggtgggtagtccactgctaatgttgtgcacaaggcccagaacaagagcaaagggaaatacaaagctcagcagaccaccaacttgaagaagaagaagaacaacaacaatcctaattaggatgagaggacttactttgtgtgtggtcaacctggccatctggccaggaagtgtccacaacgcaaggggatgaaggcacctgcagggcagacctctaagtctgctaatgtgaccattggcaacactggagatggaagcgggtatggtaatttacctactgtttttttagttaatcagtctactaattggtgggttgatacaggggccaatgtacatgtttgtgctgacatctcattgttttcttcttatcaggtcgcacggggttccaccgtcctaatggggaataggtcacatgcttctgttcatggtgttggcacggtagatctgaagtttacttcggaaaagatcgtgcagctgaagaatgtgtagcatgtcccttctatcgacatgaatcttgttagtggctcccgtctgactagagacggatttaagttggtttttgagtctaataaagtagtcgtgtctaaacatggatattttattggtaaaggttatgagtgtggaggcctgtttcgcttttccctttctgatttctgcaataagtctgtgaaccgtatttgtggcagtgtggatgatgaggctaatgtatggcactcacgtttatgtcatattaattttggcttgatgtctcggctttccagcatgtgtttaattcctaagttttccattgtcaaaggttctaagtgccatagttgtgtgcaatcaaagcaacctcgcaagcctcacaaggctgctgaggagagaaacttggcacctctagaactcctacactcagatctctgtgaaatgaatggggtgttgacgtagggtggaaaacaatgtttcatgacgttgattgatgatgctactagattttgctatgtgtacttgttgaaaacgaaagacgaggctctagactatttcaaaatttataaggcagaagttgaaaatcaacttgacagaaagataaaaagacttaggtctgatcgtggtggagagtttttctcaaacgagtttgacttattctgtgaggaacatgacattatacatgagaggatgcctccctattctcccgagtctaatgggattgctaaaaggaagaaccgcacactaaccgacttggtgaatgccatgttggacaccgcgggattacctaaggcatggtggggggaggcattgttgacctcgaatcatgtgttaaacagagttcctaacagaaataaggacaaaacaccatatgagatatagattgggagaaaaccatcactttcttacttgcgcacatgggggtgcttggcgaaagtcaatataccaataacggagaagcgcaaacttggacctaagactgtggactgtgtctttctgggatatgctcaccacagcattgcctatagatttttaatagttaaatctgaggtacctgacatgcatgttggtataattatggagtctcgtgatgctaccttctttgagagctttttcccaatgaaggatacacatagtagttctagccaaccctctgaaataattcccagttcaatcacaccaccagaacaaactgaacatacacatgaacatgttactgaggaggatgacagtgaagctcctcgaaggagcaaaagacaaaggacggttaagtcttttggtgatgatttcactgtgtacctcgtggatgatactcctaagtcaattttagaagcatacgcatctcctgatgcagactactggaaggaggctgtccgtagtgaaatggattccattatcgctaacgggacttgggaggtgacaaagcgaccctatgggtgtaaacctgtgggggtgcaagtgggtgttcaagaagaagctcaggcctgatggtactattgaaaagtacaaggctcggcttgttgctaagggctatactcagaaagaaggcgaagatttctttgacacttactcacctgttgctagattgaccacaattcgtgtgctactttccctagcagcctcacatggtcttcccgttcatcaaatggacgttaagacaacttttcttaatggagagttggatgaggagatctatatggatcaacctgatgggtatgtagttgaaggtcaatacagcaaagtgtgtaaattgttgaggtctttgtatggtctgaaacaagctcctaagcaatggcatgagaaatttgacaaaacattgacatctgcaggctttgcaatcaatgaggcagataaatgtgtgtactatcgccatggtgggggtgagggagttattttgtgcttgtatgttgatgacatactgatatttgggacaaaccttaaggtgataaatgaggttaaatcattcttgtctcaaaattttgatatgaaggatttgggagtagctgatgttatcttaaacattaagctaattagaggtgagaatgggattacactcttgcagtcccattatgtggagaagatcttgaatcgctttggctacattgatagtaagccttctccaacaccttatgatcctagcttgatgcttcgcaagaacaagagaattgctaggaatcaactggaatactcccaaatcattggctcgctgatgtacctggctagtgcaactaggcctgatatctcctttgctgcgagcaagttgagccggtttacctctaatccgagagatgatcactggcgtgcgcttgcgcgagtaatgcgctatctgaaagatactatggaattggggcttcactattctgggtatcctgtggtactggagggatatagtgattctaactggatctctgatgtggatgagatcaaagccactagtggatatgtcttcacactgggtggtggtgctgtttcgtggaggtcttgcaaacagactattttgacgaggtcaaccatggaagcagaactgacggcactggatactgctactgttgaggcagaatggctgcgtgatctattaatggatcttcctattgttgaaaaacaggtgccggctatccttatgaactgtgacaatcaaacggtaattgtcaaattgaatagttctaaggataatatgaaatcgtctagacatgtgaaaagacgattgaagtctgtcaggaaattgagaaactccggagttataacgttggattacatccaaacagctagaaacctggcagatcctttcacgaagggactatcacgaaatgtgatagataatgcatcgaaggagatgggtttgagacccatgtgagttatactatggtggtaacccagtctatgtgatcggagatcccgtgaattagaacctgggaagaacaaaccattagtaaactagaggagagtaccaatctataccctctctaagtgaagatgcatgtactcttgtgagctgcaaggcaggttggctatgccttaatgagttctgttggctttaattagcgaagatgctgtcctgcagagcattcttgaaagaactgacctttgtaagcttgactgttggtcgcagtctatgaagattttgggtgaatcttctaggaagcttactaaagacctaggagtatgacttatacgctccacccgaggggtagtctatagacggtctagtaccagataagactctgaatgaaacttgcttgcacaagacttgcaattcaaggcgtagtccattgttcaagttgtgagtaagtgtagcttggagttctaagtggatgttcaaccttgatcggtctccatcgaaccgctggtatataaacagtacattggaaaagacaaatctcagtgggattttgagatttggtgggggattgttggaattaatagatgggctaaggcccattcgaagattaattctttggaaaatcacaaaagcccacctcatgggatggcatgcatgtggagtttagtaccaccttgcttattctaggagagggggacctccttaaaagggaggatgccctcctagccacttgaagcatgtatggtggagagaagagggagaacacacgcgcgcgctcgctcgcctcgccgggccggccgggaccggccgggcaggcggcgcgtgtgcacgacgtactgcagaaaaattcggatttgttttgttttggaaacattccaaaaaatccggtgcgcgacttatccggttcggttacgcggagtggagatcgtgcgggcgccctgatcaagcgacctatctctatataaaccgagttgccgccttcacgcaaaatacacgaaatccatctagagtttgcctcctcctctgtgttgcgccgtcgctcatagactactccatcccgctcgccagcgtgcaccggcgatccaaaaaatccggtgcgcgacttatccggttcggttacgcggagtggagatcgtgcgggcgccctgatcaagcgacctatctctatataaaccgagttgccgccttcacgcaaaatacacgaaatccatctagagtttgcctcctcctctgtgttgcgccgtcgctcatagactactccatcccgctcgccagcgtgcaccggcgatcgggagagcaggtctccggaacctctgccttcgatgtcctgcaccgggagaaggcggcaataaggtttttgggatgcgcttcgcgcgactgcttcctgttcatccgcgacggctcgccttcctctccgctcgcgtgctgcgcgccttcgtcgacgctcgcaaccgcgagtagttcctgccgagcaaccggtctttccgccacctcggtacgtgttcgacatgttgcgcatatttaatctgttcatgttttactgcttagtttacatgtgtagatctaatgatgcgtttatgctagtatacatctgtaatgtcatgatttatttatggaatatattgaatcattatatgcctatattctcaacatgtactactttgcttctcattcgttagctcattggcatttggtttttgagtgatccgattttagttcatgatcatgagtagcgcttgaaatttttggctcctgtatgtgtgtatgtgtagagatcttaccttgatggcgttacggatgcgttcaacatgaccgacgaaatgctgggtgctcactcgtttttaaggcagcttatggaccagatttcccttgcaaaaacctaccttgtcgttgcgaaagaagcaaataacctgcagttttcagcagagcttagttcgcagatacggcgggcgccgcagagctttcttgcgcatgctgcagctcatggtggcacggtaatggagcagaaagtagagaaggcaattgtcagttccgctatgctagtgcagttacaatcatgaagttgataggtcagattcaatccctaggggagaaatcgaaagcagaggtggaaaagagcacgaagtacgggccgtgccagcccggcccatttacgggccgtgtccgaccatgctttctaccatgccgggccgtcgtgccttgggccggcctgataaagcacggcccaagtcccagctctaggcagattgctgcctaggagcaagacgggcgaaggggggagcaagagagggggagaatggagaaaaaggaagacatgcaggcctcacatgtcagtgggcccacaatttttttttaatgattaatgggtcacatgtatattttttaattctaatgccacataagcgacacgtcagtaccacgtggaacaaagatcaggtcaataccaccacgttagcgaaccgtcctccaaaaccatcaagggagtcaaattgtaccggttttaatagttttgggtcaaaatatccgatattatgatttagggatacgaattagattagatcactagttaaggagtcatagtggattttttcgaaaagcgtaatctcaaattgtggcccatggtaaaggccgatatttcggcttacattgcttataaacgggccatatttactctatagttttgggaagggttaagtccactttgacttccttaactagtgcctgaattcatatccctaaaccacaatactggatatcttggatatcttgaccctcaaactattgaaaccagtgcaatttgactcccttggcggttttgtagagcggtggcgcttacgtggcggtgttgacctggttttcgtccgacgtggcggtgatgtggcgtttacgtgacattagaattaaaaaaactatgtgggacccatttgttatttacacaaagaaaattgtgagacccagtaacttgtgaggcccgcatatcatcctttctcctcttcttcctcctccctctctcttccccttctctctctctttctctttttctcattgctcttcccttcggccgtctgcaggtagcggggagcggagcagcggtggcggcctcctcgcacgcgcgcagcagctccgcatacgggataacctcgccgtccccatgtttccacttcaggccctccacatttgccagctgccgtggtcaaagcagacatggagcttccccggcaccgacgccgccgtctcctccgcctcaccatccttccctggcactgccgccgccacctccgcaaccatcgggagtgacgcgtactagcaccgcttgagcttccccggcaccgacgccgccgtggtcgaggtggatgcagaggcaaatggaacggttgtggtggcgacatggaggaagcaggaaaagcggcatctgttctctctctctctgcttgaaccgcgtgggcagaagcaggaggggaggtcggggacatgataagggacggggaggcagtaaaagcggggaacgaggaggtcgtcgaggtggggagtggaagggattggagcgatggtcgagggagcgaaggtgtcggtggtggtgtgcttcatgacggcggcggcggtggcgacggacttctaggtgagtggatgcgccgtagatctgcgttgatgctgatcggtcatgagggcgcgccatcactgcgcctctaggccgctcctccttctcggatggagccccctcgtggattcatctccccagccatcatcgctgctcaacctccgcctctcggtgtaaaggatggtgaagagctcaaagccggagtggaaagcccaagcgtcggcgtccctctccgtgaagacggcgatgatgaggaactggatgacgtgcgaagaagcaggtgtagtacgtcattgacagcctcgccgggtacttcttcagcaacgggccaccgacgctgctccacgtcgttgctcctcatccccgctctccgccaccgagctcgtgggcgcgttggcatggggcagagagagggaggaggaagaagaggagagagatatgtgggccccacatgtcagtgggtcccacaatttctctttgtgtgaatgaaaaatgggtcccacatattttttttattctaatgccatgtacgcgccacattgaacgaagaccaggtcaacaccgccacataagcaccatgtcagcgaaaccgcccttcaaaaccgccgagggagtcaaattgcaccggtttcaatagtttggggggcaaaatatctaggattatggttcagggatatgattcagattcagccaccagttaaagtagtcaaaatggacttattccttttgggaaactatagatgaaaacctacagattttgtaaaactataaatatagcctttatgtaaatgcaaaataccccctcccatacacacacacaaaactatagggagtagctatattttaatataacgctatattattttataaaacagttaaatcgttctcacactatagattacttacacttaaatactgtaattagattgtaaatttcaaaacatatattgtaattacattttatgttttaatatttgaatgtaattttaaatatttgcattatattttttctaatacacaaataaaattatatttaacagtaatttttatctctgtgaaagaggagataggttagatagaagtatacttgagagcaaagtgactgaaaaagtggcatcatatttttaagaacctgaaacagtgttaggagaacggccttatttatacaactccaataagataatacaacgagtttattaagataaaaggattaaaagcaacagtgcgtaatattatttttcaaattatagcttctttcatttcaccaaaaagaaaggtaaacaaaaaaaaatgatctacacggataagaaaaaaaggttacagcctaaatagatttattttatcccgatttctagggagaaggagagtttgtcaaacaacatggtcgtcgcacaatttaacgctttccattatttaatgtcttgttttgttttaattatatggagtcatgtgtgaagcttctcagcacgctaaatattatagcattcgtcatatgtatgactaaggaagtacttttgtttgattgtatagcttattacatactttacactttgccacttgccacttactgcgtggaatttattaattcagctcactcatatatggcttgttatatatgtatgcatgcatgcatctcaatttgaatataggatgtgattgtatgcgttcataagtgtaatttcacgcgttatgtataataaataattaacaaaaattgctatactaatataatatttttttttgagaaatatggtcttccaaaaccctgtcacctcccaatttatatataatcagtggtgaactggtacttaccaccggtatgttttaatgcacatcgtaataagaaaacaattatacgtacagacaatataacaaaggacaatttagctaggagaaattgacatggtagtttgaatgttgtttttatgagaaatgagactattaaatatttatttgtggagtgttactatgcaaaatttctttggagagctctacagtttactactagtttttatagtttatatgctcctcatagtatatctcatattttttagaattgccttgtgggggttgataaaaaatctaccaaacttattcttgttagagcatccgctatatgttgggctatatggttgtgtagaaatgatatggtttttgataaaacaccatctatgttctataatcctatatgcatattcttttcagagtaacatactggcctcggttctgagctcaactactaaagtgtgatgaagaaatcaagtcagtgaaagttatatgtcgtaattttgattcaatagttatgcagttgctcgctaactttggatggagattcacaaatagaattcaataatttttgtgatcttgttatgctgtgtgagtttttattagtttgtgtgtccttttgtttattcaggtgtgagtttttggtgaattggtgtaataattaattggttgtagctctttgagcaaaggtcgggattatattccattataaaaagaaaacatattgtattgtagttgtaaatgtcaaactacagaagagaaatgggggagagagaccccggggggtgacttcacttttttctcggcgaatacgtttatcaccatataattaacgattggtgcatcagctgatttcagattattgactagaaatattaatcatgaatatttctcaagaacacatagcaagtttgagatctttgtatctattcgttagaaaaccagaaacaggcatgtaatggaaggaaatgaggtctttgccccgtgtgttgcagcgggattttaataaaaaaaattatcattaatatgttattattatatcttaattgttgtacgtatttgatactaacatgtggacatttttagccttacactgttctttttttctttcaacaaaaagtgaagagttggttggagtagctaacatttagaccatctagacctacctgtcatttttccccttaaaaaaactaggagttggtagtggggaagtggtatgtagaaccaccaccactactctcttttataagaagcatagtatacacctaccacaaaacaccacatcagtgatgcctccttcgttgcgtcatgcatggaggaaggaaaggggaaagaagagggcatgcacggcggtcggctgcgcatggccagcagtgatgatgggccttgtgagaggagctagctagcggcaacagcaaaccatgtgggaggagaggatcctctcctctaacaagcggtggagtacttgcccgtcagagttgcccgtcagagatgactatcacctctgacagtcggtcacccgtcaaaggtgactggacacaacaatgaccactgttctttgaccaggcctaaacccatcaaaggtaagggtttatggccatcaaaggtgacctgatccggtgtagtgggagtaaaggactagtgatagaggactggcgagaggagcggcggcgagtccgttcatagggaagagtctgtgtcgtcacgtggagctcagccagcggcgggagggaatgacactggcagctgaaatattttgttgatttggtgttcgttctgttggatgaatcgtttttatcttttggatattgaaattattgatccgttggagaattcttagatctgttcttggtagatggatgtgtttcttatggggccgattgcaatctcatcagtgtgggctcgcaatctggcaataatgatccgctggctgattatcgctgagacagaagtgccggttccaaaatcgtcaccgacgttagttttgaaccagcactgatgtccaaacctgtggtaatgatagttggaaaattttaaagtctcaacacataatatagtactacctcttttttaaatatgtataacgtcgttgactttttgtccaacgtttgaccattcatcttattcaaaaaaatttatgtaattatttattttaatataacttgattcatcatcaaatgttctttaagcaagacataaatgttttcatatttgcaaaaaaatttaaataaaataaatggtcaaacgttggttaaaaagtcaaccgcgtcatacattaattaaaatacggagggagtatatagcaattggatagtttctttagcggcacaaaaatcatcacttgcttatgtagagcttatctaatgtgtgattatattctttcaacaaaacggatgcgcatcatttctcggtttattcctacatgtatggataatgcatgtatgagaattaattctacaatatgtatatgtcagcggccgtttgcaacgaatcaggagggaggccggaggtacagttaggagaataggcaaccaagccacctagcatgacaacgtagtaccaagattaatgttttattttaccatgaccaaaattattgttcattactgaattaactacctttaagtactcatttttaaacatcctaatgtggttggtgtggttctccaagtcgttggttatatttctttcattgatgaatctctattacttacgtattgaatctcgtatttaattctatacaataatattgcttaatttatttttcttcccttgaaagtttcataattttgtgatatggaatacatttggccaaactacaactgataatttaattttatttctagtccattattttagtttatgaatcatttcaatttctcttgtggtttgttcttttttattttttaactgggaatcaaactttatttaattggcgtaattgtgttatgtctctactttcatattcatatgtgatttttatccctattttcagggtttatgattttgcccattcttttttttaaaaaaaaacaaagctttagcttgcacctggtatattagtatatatgttaagtcacgttgacggtgataagtctgtggcattcaccattgaatattattgtatgtttacctctacttttggtcatcactcacatgggtctgccccttatacccttaaatctaggcttcttggttcaattgaattaagagatcagcgaactatgttcaaaatagcatcaacaatggccaaagttatctactctttcagaagcaaacaagatggcaatcataaataattcccaatgtggtgctaataaattaaccaaatcttatctagctgttgctactagacatgtatatatatatatatatatatatatatatatatatatatatatatatatatatatatatatatatatatatatatacatatatatatatacatgtatatatatacacacatacatatacatatatatacacatatacatatatatatatatatatatatatatatatatatatatatatatatatatatatatatatatagagtgcataggactacaagcatttgcaccaaattggtatagggatattaagtctaaaagggatatagaaaaaattattcaaagattagaagatatccaa

SEQ ID NO: 9517 - DNA, 35791 bp, Oryza sativa
  unsure (1)..(35791): unsure at all n locations
cctatatgtatatatatatatatatatatgtgtatatatatgtgtatgtgtatatatgtatgtatgtatatgtatatatatgtatatatatatatatatatatatatgtatatatatatatgtatatgtgtatatatatgtatatgtatatatgtatatatatatatgtatatatatatatatatgtgtatatatatgtgtatgtgtatatatatatgtgtgtgtatatatatatatatgtgtgtgtgtatatatatatatatatgtgtgtatatatatatatatatgtgtgtgtgtgtgtgtgtgtatatatatatatatatatatatatatatatatatatatatatatatatatgtagcattcatgtaagatagcactcttaaaaccatcttctacgagacaaaatcagagtccaatatgcttaaaatcaatatagctagtttgatgacaggatcaaatggcttcatggtctttcaaaagattgtcacctcagctcccaattcatagataagtacactggtactgcctcttggtaccttttaagggtgcatggaaatgtaaaaactataataaaaaattgcaattgtacacagttgttgataacgtcaaactgtgtatagagagagtggtcatattttgacttcactttttttttagcgaaactaatttaaacatcgatcgaccttcgaccatgcataatacgagtcatgtgcaactagcttacatatagtgttatatatatcagctgatttctgagtattgacttgagatattataatagtttatttttacaaaaaaaaatcactaacatgttccagagtatagatctttgtacgtggtatatataatttgtttttttaaaaagaaacacataaaggaagttaattaatgaatatgggcagtagcgtacatatatgtcctacatatatagctggaaattgttggagtcaacacatgcatgatatatatagcaattggatagttttttgagcggtacaaataaaatcatacgtatgtaggagtagaaggctttaatatatgtaacgttctgattcttccaacaaaacgcataagcatcattttttggtttattcctactatatgctatggatactgtataggtatatgcatgtcagctaccgttttgcaacgaatgaggaggtagatatataggtctgacaggagcatagaggcaaaccaggcaaaacctagcatgacaatgtacatggtaccgagattattgttttcttttaaccatgacgaaaattattgttcattattaaactgccattaccccattaatttttttgggactgaactattagtcaatcgtgcagctaggatcaagcatcttaatggttggtggttctccaagttggcaatatttctttcatggatgacagatgataaatctctacgtatctcggttacaatcatgttattcacgcagcatgcgtggatatattttttttcaaaaaaaaaagaacagtcagcttaataagtttcgtagacaaaatagtatgcaatagctgggtagtagtcagtactactatatatattgaactatctactatcaagatgactgctaggcttaatatacttggtatatatataatttaattgtcgcatccctccatttcaatatacatgtacgtgctgaattttaattacaagttgacacatgcatgaacttttcaacactagggcacgtgctcatcattctagttaatcctttaatttcttaggcatagtaatttgtttaaacatccatccttcaattagcaggatttttaaattaataaactgctggttcctgtataggaagaatagtttataataaattgtcctatactcgaatttttttagcccaaattagatattttcttaatgcacccatgctggaatattcgtttaattcagatgcacattacaatgctaaatttcagatttgatttgatttatcatatatttatgccttgaatttaattcatggacattacaatgcgttgaattctcgtggtagtagtagtagtagtagtagtttgggaattgcaattttcgtttaattgtatgtctttgtttcagtttttttcttacaaaatagtgtatatggcatggactggattgttaaacattgttattatttatagatttttaataatatattgttgtgacatgtaactgaattcatacacaataattccaaacagtactttacattcacttttacaggacatcagttatactttcattacagtacatatatccttgttaagaaactcgaataaccaaatttgctatttaaagaacgtgtcggttttgtgaatatgagattcaaattgcgatttgaaatatcgattcatgtttagtgattaataaggccaatagtataaataataatataaaggagggatacataatcatccaccactattagaactctaatagttcactaattaagcgtggaagggtgcacatacgggactcttatacaggtctagggacggcttattgaggataataacaaattatgatttgggaatatgtatgaaaaaaaatatgataccttcaaaattcttatgacaatcctctaattcaaagcgggccttgatggtattgtaatgtgcatactatgcctcggctataatgggatgatttgctactttcagccgcattaaagtttgcaatttttcagtcaccaagaattacacattgtagtgctatataattttgtcactgtacatacgtatatggttttagtctatttttaatctcagtttgcatgtttttacatgtaatttttgtaagttattgtggattgtaaatagtaatttccgttcaaacttttatctaagaaatatggaactttcctccaatatgattgttgtattagatttagctcgttttccaacaatgagagtgttctgcaacagttgacaaaatcttaattaggagaaaattccttccatacctctgaaattttagtcgatcccttctgtacccttgaattttcttcactccctggtatacctttaaattttgatttggatcccttacatactcttatcgtcagttgaccgtttaatatgtgtagaaaagtcaattttacccttcaatatgtgaggaatatgtagaaatatgtggactaaattgttggaagtatagaaatttgttgtgtgactataatattcataagtttgttgtacaaaaaatttaatatattaaaatagtatgtgcagcatttttttaaatgataaacatagttttggaaaacattcctatataatatatacaacagaaaaagatatgttgaactaccataaaaaaatgctacatatactcttttaataagtaaataaatattaatttttatgtcatcatgaaaaaaaactttgccgtgaataatacattgtccaataaaatcatgaatataatagtcttacataacaaaattatacacttccaacaatatagctagtttataatttccatgtttccttcatgtctaagggcaaaatggtccttttcttatgaattaaacattcaactaaccgtcaattaacggaataggtatgaaaggaatcaaatccaacagtagacaaaacttgggggcataaaaaggattggttaaacttttaggggcatagaaggatttttatccttagtccttagatggtgggaaatagaactaatgtaatctaattttattattcaatccaatctaagattgaccatttgcaatccaattggaatacacatgtaaatattcatcgatataaatatagatatgtttattttttgttgtatacatatgctagtagttgttataatcatatggaactaaataatcgaaaagtttcaattgaaaaagcattcaaataaccaccgcagcaggtgacttgctaaaagtgctagccacctatggaaattttggttatcctagatggccggtctaacatggccatgtgcaataaaagtttttttttttgcagatggctcggttaggtacaccgcttggaaaaactattttcctagacgaccgtcctaactaactagcctgtttgtgaaaatcacttatagtaggcggccgagttagactagtcggctatacgaacatcacccccctcccccggtttacagtcaggttgagtgaaaacaacccattttcggacacttgaggacgagccgtgtccagctgcctgagaaaactgatttttgtcaccagtgaaaattgattttgtgataataaacgtgtgctcgtttcttctccacatatgctagcttataggctgctattatatactctctctccatccacaaaagttacacatatttcacatttgagtttttccaaataagttgttcatatttatagtctttatgcattcaagacttaaatgaagagataaattaaatgttttattagaacctaaaaagtcatctaaatactcattggttgcatacttgcattcactccttgattttgtaacattcaaagtgatttaatttctccttggtcttgatgtcaaaagtaatatgcgtaacttttgtgtatggagggagtacttgctttactactcctagctagctagggagtaacagttttagttgcctacaattcaatacaatacaacttcgtctggcgccctcaatcgatctcgctctataaatagcggaccatcctttcttccctacaccacacaccaacacacacaaaccattgcaactgcactacactgcagcacacacaccccgcacccaccaagctaagtaattaatcatcaatggcttccgccgtggtgaagatggccgtcgtctgcctgctcctcctgtccgccggtcatctgatggcctccgccgccgccgcgcgcccggacaccgtcgacgacgcggcggcgctgctgcgcctcaaggaccgcatcgagctgcaggaggaggaggccctggccctcgccgaggagctcgccctcctcgacgacggcgccggcgacgccgtcggagccggctgctcctgcagcaccaccaagtgcaagacgtgcatcgccacctgcgggatcaagtgcttccccaagggaatcaaaggcttccccacctgcttcttcgcctgcgtcttcaccaccagcaagtgcttcgccttcggcgcctaatcgatcaatcgatcacgtcgtcgtctcggctcgtcatcaatcgcgatcgatcggtcgttttcacctaataataatataatcatatgtgtgtgtgcaaagaataacgaattaacctccccaagcttcatgtatgcatacatgcatcgttagtgcatgtgtccctgatcatgggtctctgggggaggatcatgttgtgtcgtgtgtcggctgtgtctcggttatcgtcttatcgatttcgatcatatcggccaattgttgtcgcgctggccacgtatatgtacttgatcgatgaccgagaaactcctaggtcaatctgtgtgttcatatatacatcagtccaataaatcgatcgttaattatattacaaagttttcgcattttaccgatacatgttattatatgtactccctcactgctaaatagcttttgcggtaggcacataatggattttcacagatggacatgtatatgaaccccttattataaccgatcgataacttttatataggaggctgcgcaactacatacataatactttctctgtttcatattataatactttctctgtttcatattataaatcgtttgacttttttcctagttaaactttgctaagtttgattaagtttatagaataatttagtaacatttaaaatatcaaattagtttcattgaatctaacattaaatatattttgataatattttcattttatgttgaaaatacttttttcctataaactttgtcgagtttgaagaagtttaaatagaaaaaagtcaaacgacttataatatgaaacggaggaagtagttgttttgtaggcggcaagttacaccatgcatccacctgtaaaaataatttttggtgctaaagaaaaacctaggtcaaccgctaaattcctcatccaaccctgaaacctggccttgaaaatcatgcatgcaaaactgaccaaaccaaaatagaataaccagctcaatttcacacagattgcaagaaacaaactgtccaacgacatcatctcaatttcatagtaaaaaaccaatcaaatgagctcacctgccaatctgccatagctggttgacgacgagcttgccacagtaattgtcaccgctgccaagtagaatccctcaccgtggttgtcgtccccattgccgagacaacgtgcgccctcgccacggccatcgttgcaatgatttggtggttttgaggcctagctagttgtagctaccgctgagatgaagaccttggcagatccaccacttctaccggcgcatccctaatctgcctatgcagtggcggatctaggccagctagggctcaagccctaggcctgggatccaaagtccatacaaatttcatatatatattttttaaaaaaaatgattgaatttatagaggagaggataggatagcctaggcgtggcttcaagctatttccgccattgtctgcatgggccctctggctataaaaatattttttttctatagtgcctctcacccaacaacaaaatttctttcattatatatcatcaacaactataaaatttgcatcatatgaaaaaacattcaaatacgaacaatgcctcaagtaaccatgttaaattttagttatggcacaatttattttattaggcagtcgtttagttgatggtataattgcacttaatcttgttgcaagctacacttgtgttctatatatgttgtactgtggtcaatcaaacatccccatatacttatttgtttaatgattgctcaaatgttataaatattgataaatgataactatggatatcttatattttggaatagaaggtttacatgccatgttgatgcctagatgagctggtgctcgtactaatctatatgttatctatgtttgtactcaaacgagagtagttatgtccattcagttcttaattaactaatttcttatgcgtgtgattagctagagattgaaccttagctagctcgttcaatctctttgtttatattgccaatgttacacaacatgattattaatcgtcccttttctcaggcccaaataccttacacatgttggcctggcccatgcgagggagctccgcattgaacatttatttacaacagtaaattttactttaggttaccttttattatcactactgacatgcaatctttgccgacggtaaatatcaccgttggtaatcctacaaaactattggaaatgctatgaccgatagtttatggtgggggatcatcggtcgggattgagtgtgtcggggatttgtcaactcgccaacggtgattctatataccgttggcaattacttttccaacggaatattccaaccgtaaacccgtccagatttcatggatttccattaggtcctccgtaacagataccatgattccctacaggatacttcctccgtttcataatgcaagtcattctaacatttctcacgttcatattgatgttaatgaatctagacatatatatctatctagattcattaacatcaatataaatgtgggaaatgctagaatgacttacattgtgaaacggaggaagtaatatattattattattattattattattattattattattattattattattattattattattattattattattattattattattttgttttataccaccctttaacaaattttccactctcaacaagataaatttatcattgttgcattttagaccaccctcaactattttattcatatgcatcaatttgttatatatcaaagcaatagactcaatataattgtgggaattcattgatgagtagaagttggtgtactcaaaatcattcatatgcttgagaagagagtcaggtagtccaaagtgggacaaaggtaagattatccaattcaaaaacattgattaaatggtgatccattggtgataaaaagtggttcaatgtgaaatttactcttgcatatatagccattgcaagacaaaatggatctggaacgaggaaatgaatgttcagtgcacaattaccatctcctgttgtaaggacatggtcaaagataaatgtaggttattgaactcttagataattcccatatatttagggaatattcggtcattccttacaacagtaaagacaaagggtttagccatttaacccaaaatattcgcagtgactaacaacaacataaaattgctcgtaccttgtgaatgccatctcttcaaggaaagataacttcttcaaggtaagagggccctcttcattattatgtcaaacacatcggtaattggtatttcacatgtttggtttatgggataaacgcgcatcttaatgatattgtaatgtgcatactatacatagactatagtatatatatgggatgattttgctactttcaggcgcaagaaaatttcccagtcaccaagaattgcacatggtagtgctatgcaattttgtcgttgtatatggttttagtctatttttaatctaagtttgcatatttttacatgtaatactggtaagttatcgtggattgtaaaattatttcttgtttagataagagtaatttattgttcaaacttttatataagaaattaaggacttcgatttcaattagtaatggtaagagtgatcaccattggattgcaatctaagggataaggggctgtccaggcgctactgactatgatacatggaaagcaacacgaatttcctttcttttgctacttcatccgtccgtaatatgttcatttttagctcattccatttatcataaaataattatttttagagtaattaatcattgcatcagagtttataaaagtagaaaattattgtattgggagtagatagattgagaaatagttgtattgagatttgataaagtaggggtgttctagaattattggttttgtactggtacgtgtgagatgagtaaaaaatgagcttacttgggatggagatagtaaatttaaaaatcaaaccagtgtacatcattcgttccaaacagaatgcaattctaacatttaaattcagtaaaaaaaattatagcacttctgtcatttaatttttccttgttttaagcccaactactttcccacttccaaccactcccttgtttaacaaggggcatccaagtaatttcttctccctactagtttgtcttttgaatgactacagttgcaatttttttatgaagtatgcttcaatatattgaagtatgtgtagtattaaaattacagcatatttaatcttcttatctcttaacccctttagttcctacatatattattctggaatcaagatccggtgcagttgttatagcgactgcaagttaggcagtcacatcccttcacaaccatcggatcaagctgataaaggacagatagctgtgccacgtcataaccaatctgccaacgctacagtacatgctacagggcgctacaggactatatacgcgtgctatagtgttctggccgaatctgagctgtttttctttgatctgacggtcacgcaaggactgctaaagttgcagtccacattacaactgcaggtgatctcgatccattattaagacatgactgccaggttatgcaatttcgttttgcgtatttacggcgggggctagcttggacgaaattgttattaaatttgaaaagatcttgactgggtttgaccaaattctggttgaattaaaaaagttaaaaatttcggacaaaatagttctatgccgggcccgaaatatatatgagtgcacgttcattaagttgtaaattggctctctctccaacgtacatacggaatatatgatacaacttacaggtgcgaagctaaaacaaaatagagagcagtaccacttgcttgctttactctagtttaacgaaatagagagcgataccacttgcttgctttactctagtttagatcaagtttagactgatatgaatgtatgagtttagattgaggagtacatatataatgaaaaaaaaaattcttgaccggatttctgacaccccctctcctacctagctagctccgtccctgtcgacttagagcaagtctaatagtatagccaactactagctccaattcatctatagccaatctagtagctcattcatacaatagttacatactacactattaatacctggtcccacctgtcatacacataatgtgtcttcgagtccgtgctatagctggctacaaatatgtagcccgttgctcttctctcacctcatttatctctttaaaatatgtttacagctggcttatagcctgctattgtacctgctcttaatatttcggccctcaatgtctatgcagtgtcatgtgtgcactctataaatatagcgaaccctacttcctcgtaagccaactagccaagccaatcggtccccacgcttacaagctacaacttcacctcacccctgctgcattctcgcgtcccaagttacaatccatcaatggcggcttccacttccgccgcggttaagatggccgccgccgtcctctgcctgatggtcgccctctccgtcgccgccgggcagctcacgacgacggccgccgccgccacctccacgcgcgtggatgatcacgtcgtcgaggacgacgacgacgcgacgccgacgacgctgcagcagctggagacgcgcctcgccgacgatcaggacctcgccgacctcctcgacggcggcgacggcgccgccaccatctgccccagcaactgccagaagtgcctggtcaagtgcgcgggcacctgcgtcgccgacatcgtcagcccgcccaccttcgtcgcctgcttcctcaagtgcgccgtcgtcaagctctgcttcgccaaggtttgatcatcatcgcgtcggcggccggccggcgatggtcgacggcggcgccggtgccgcttgattgcttgccttgttgtcttgctagctcgtgtctacgtactccctccgtacctatatatttaacaccgttaatttttttaatatatttgacagtttatcttattaaaaaaataaaaaaatatttttttcttattattaaatatgtttttattatatatatagttttacatatttaaaaaaattaaataaaataaacgattaaatatatttaaataaattaacggcgttaaatatttaaaaacggagggagtagtcgaggtcgccatgcgtgcactcctgcatgcatgcatgcgtggtggtggtgtgtggagacgatgatattggtgtcgcgtgtatcatttcagttgccgatcgatttacggctgatggtgtcgttgaccatacaactgtttggtgactgagggaaatatatgtaacgtgtgtccatcggtaaagatgttgttgcacgcacaagctagctagcgtggatttttaattggcaatgcttcgcttgtaaattaagcgtaatgcttctctgaacgtgcaacaatcctacacacgttcacgttaaaaaagattacagtagtggtaagtcaaacatttacaactttaactattaatagccaacaaataaaaaagttcaaacatataaaatggatgttactagatttgtcattaaacaaaaactatcgtaatatacgtaggggtggacgaaaagctcgtggctcattagctcgttcggctcgactcgactcgttgcattttcttaagggactatctatacaacattcgactgaaaattagcctaaaaatctgtcaaatgtaactgtaacataattacaatgtaattttcgtaattacactatatttatactataattacatatgtaattttcataattacactatatttgtactataattacatatgtaacctgcatccgtcatcggccgggttcccgcggcggggagaagagcatcgatggcgtccttgaaggtatccatgaacggcggcggtttgtggtgccgttcggaggcataggggaaattttcggtctgggagaaaaagagggaaaaaaagagaaaagaaagtgagaaagaaaatgtgacattgacatgtgggtcccacgtgctgagtcaaccagttggaccgagtcaaagcgccatgtcagcaaaaccatctctaaaaccgctgaggaagtcaaatttaccggttttaatagttggaggagtcatcctacccggttttctagttaaggggtatgaattagattcggcgtacttttaagggagtcaatgtggactttttcctttacacccataccaagtgaatccaaattgaaaactaatccattagacccattccaatccaacccattggcaggcttaactaggccacaatgaagtccacgttttttctctaaggctcaaaacgctccaaagtccaaagcccataatattccaaccctagtgtccctggattgaatcaagagtaaatttcacaaaactacacgttttgtagtccaagttacagaaaaccacacacactttgacacttggcacttaagtatatatattttggtagtgtagttttacagaaccacactatcaatgaatggattgcccgcgagatgacgtgattgtttcattaggatgaggacatgtcatcctattaccagccatcgcacgaaattaataggatgccacgtgttcatcctagatgaaacgaccacgtcatctcacgagtaaatccattcatcgatagtgtggttttgtgaaactaaactaccaaaatatatgtacttaagtaccaagtatcaaaatatttatggttttctgcaacttgaatcataaaacatgtagttctgttaaatttactcttgaatcaatccatcgatccccaatcccattgcgcctccgtcatcgccattgtgaatcgcaccgctaccgcagcctcggcacctcgcctccttcgtcggcagccgcatcctcgcgcttccgccctccctccttcctagccttcactccgtcgttgcaccatcttgtgctcccaggtccgagcaccgcagcacggtgttacagcctcgattgttcgtcgatctcgttgctcactgaggacgatgacttcaccacagcccacatgttagcaatcgccgttgccgtcgttcttctgctcaggtgtgcctttgtagtttcagacttccagcacttctcaataaatctcacccgatttattttgctacttctggtggtgtgtgtgcaccatgcagctgttggtcatccaaaccgtttcaccgttgcgctcgccatggaggaggaaagcgaccttcgtcagcatgtgccagcttgcgagctaaacgagctgagtcgagcttacagccgagctgagttgagctggctcgagcttacagccgagctgagtcgagcttacagccgagctgagttgagctggctcgagcttacagccgagctgagctggggtttttagctcgttaggttaacgaaccgagccgggctagctcgttatcctaacgagctagaccgaacccgagctgagccagctcgacatccacccttaaatatgcaactctttttatttaaagcatttcaactttatagatattgttggtcaaaatagtatcccaaaaactatgtcgaattctaaaaatgattatattttgagacggagggagtaactgaaatgaaataatatgtggggctaggggtgtgaggcccacctttcagctacagctactgaacagcggtaaccgcggacaatctccgtcgaacatgaatcgaagtgatgatgattggcgttcttttcttctaaagatgaagatgaagattaaggttttttttacgtaaaacgtattaatgtatgattgattgaattttaattattataaacttaaaaaatcgattaatatgatattttagagtaatttttatatagaaagttttcgtatgaaacgcaccgtttagcggtttaaaaacatgccacgaaaatcttaatcttcattcaatttttattggagaaaagaacagaccttaagtccaacagtgaactacggacgcatgtcctctgcagactgcagttactctgtgcaattcccgtcggtgaacgagactttacggatccgttcccaactcatgctacagatcattctgtgcacccaattccaagagttggcaatgagaataatagctaaggtgatgtttggattcagtgatttaactctagtctgtatatttagtcattaatttagtgtattaaatatagactacttacgaaactaattacataaataaaagctaattcgtgagataaattttttaagcttaattaatccataattagataatgtttactgtagcatcatataggctaatcatgaattaattaggcttaagagattcgtctcgcgaattagttcaagattatggatgggttttattaatagtctatgtttaatatttataattagtgtccaaacatccgatgtgataggcacttaaaagttttaatcccatctaaacaggtcgaagtgcattcctttcttcagtgattttttctggctccaaacggaggattcggagctagagagctccaaaaccacttgtttcatcaagctatttgaaaatgttgctctttcgtgtcaactagttttcttgacaagttgcaacagtgcagtacattcataatgtaactgctgcacagtgcataaatatgttggaagaaactaaaagttaaacttttgtcccagaagggaaaaattgttgcataaatacagtagttacactgtttcagctctgaaaacttagcttttaagaaaaatctactcatctggaaataaagtacatgttggtaaaagaacaaccttatgttccatgaatatattaaaaatgctccattgcaaaattctacggagtacttctcaacagcctacctcatgaaaacaacaatatatgttttacaaagttgaaccctggatccaaaagaaggggtgtaaattctgaacttattcattgtagattttttttttcaaattttcctgaagttcacaaaaatgtaaatgcaagaacgattgtcttttctttttcctttaacattctatctcgcattaattctctatgcacacaacgatcatcgttttcgcttcagcatcctacaataatccaatcgattctatgaactacagcactatcaagtagcaaaaaaataaaaataatattgccatctatgatctatctactctaaaatcttcgaacaatcaccagaagaaaaagaaatcaagagagagagcgaacaaaaaagaaaaaacaatggacaaatgtacagttcagccgctttcatcatctttcttcaattccactcctctctcttcccggtgcaaggggagcccctggctccgcatggtgtgggtgctcgacgtcgtcgtcgtcatggcgttggacgcggccgacgtggtggcgtgcgacgcggtggtggacgtcgacggcgagctggtcccggacgtggacccgacggagaagtgggagccgccgccgccgccgcgcgtgccgtacgacctccgccggtaccgcgacccggggacgcccggccgcgtcggctcctccagcgtgctctgcttcttggacaggatgatcaccacccgcttcatgtccggcctcatccgcgggtcggcctgcacgcacagcagcccgatccgcaccagcagctccacctgctccgtcgccgccgccgacttcaccgccgggtcgagcagctcgatgctcctccccttcttgtacagcctccacgcctgcccacacgaagcaaatccatcgccatgaatgagagatcgaagagaagttgatgagtactccctccgtctgttttaaatttaacgataaatatagtaatatttataatactaaattaattttatcaaattaataattgaatatattttcttaataaatttgtcttaggttaaaaatattactacttttttctataaatttgatcagacttaaaacagattaactttaagagagaaattaagatgatcgatggagaaattaagatgatggatggagaggacgtacgtgatcgaggaggttgtcggcgtcggagtcggggggagggacgaaggaggagttcttgtggccggagacgatctcgaggacgacgacgccgaagctgaagacgtcggccttggcggagagggcgccgtgcatgaggtactcgggggccatgtagccgttggtgccggcgacgcgggtctggacgtgggagcggccgtcgccggcctccgggaagaggcgggccatgccgaagtcggcgatcttggggacccagcggtcgtcgaggaggatgttgctggccttgatgtcgcggtggatgatgggcgtgtgggggtcntngggcaggnacagnagnnngngngnacgcccaccaccacctcgtgccgccgcgcccacgtcagctcctcccgccgccgccgcctctcgccgtcgctgctgctgcccgctgatccaccacgcatccaccaaagccaaaactctcgttattactccatacaaatgcagtagtagtagtacatggaatgcaacgatcatgaaccctttcttggcatgatgccaagattcagaaaccgcagttctcgcaacaacgaagcaaaacagggaaaacatatgggccgttatgggcccaatgcaggacaggacaattaaagatcgggaaaaaggtttactttaggtccctaatataaatcaaattttatttacatccatcaactgatcaaccccaaaactctttctacattctaagatttgttcacgccattacgaatgaaaaattttactcgcagatttactcaaatttattcggagtaaaatttttactcataataatgtaaacgaatcttaaactatccatttttcgatctaatggtagtttttctaagtcttcaatacataaggagatttgcagcacataatttcccctttttctggtacacttccgtcacactattattgctcacgtcgtttgcgcaccgtgagaacacacgtgtgcacgtgcagccttttcagctgttgacccacggatccagccgccaggcagcccgcccaccgtatgcagccctgaaaaaccagcgtccgtttgttcccctctcgcccccagtccgcacggcagcaagtttggcgccacatgcgtgtccacgtactcgtatttcctaccgacgcgctctactgctatcggcttctcacagatattcagacggcgacgcctctgcgtcacccaggaccaaacgaaccactaggagagcagacagcagaggcgtgtttgcgagtactttgggctttggctagttggccccccggtccggccgtgcacacgagtcaagcacgttagagcagatactatagcagactataaacaagctataaagatattttaaaaagataaaggaagatacagtggcatactatataagtcagctataaagatattttaaagaaataaaagaagagagagaagagtagcaggctacatatctacagtcagctgcaacacagactccaagacgtaatatgtgtataacaggtgggactatgtattaatagtatagtaagcaagtattatatgaattgactattatattggctatacataatttagagcaagtttaatagtatagcctactattagctcaaatcatctatagccaatgtaatagctaattcatacactagttaattactatactattaatataaggttccgcatgtcatatacacattacgtcttggagtctgtgctgtagctggctacagatatgtagcccactgctcttctctcttcctttatctctttaaaatatgtttatagttggcttatagcctgcttttatacctgctcttatcctatggctaggtcgctggtagcccggtacacctacttgttgttgtaggtagtactagtagtactactagcttgtggagaccccaaatgacccaactaatcctaataggaaaaccaccaggagggaaaggaaaacgaaagagtaggtgtgtggtgttgggcatgcaacggagaagacttttttgacccagagatgagggttgacttggtcaaaccaatgaacttttaataataataataataactgaagatgatgtgcatgggtgttgagaagctggttcacactgtatgtgcatccaggacccacagggagaattcttatgatttttcatgtgaattaactcaaattatcgtataaattatacaaaattactttgtttcaaaggaggcacaagaatatattttgcagtgtgcaaaatcgtcaaaaccactacggggatatggtgaaaacacacaccgcctttgagaaagaggaagcaatcagacagaagaaagaacaaagcgtgagaagaatgatttggtttctgaattctgaccaatcagtcgaacataatttctcttctgagggccccacggtttgttagtccgtcgaatcttatattccctgaacgaactcactctgaccagaaaggcacaccaccacgcatgatgaaaatcgcccttttagcgaaaaggcaaagcagagcagcatttgcaggatcgatttctcatgcatccatacgcaatcatgtgtgtgtgtgtgtgtctcatctgcagcagcagaatgccgcttctagaaatgcacgagaaatcaaaagcaagaagaaatggataaacgcgacctgaattctcatctcaactaatactagaggtttggtcagagaaagaaattagcgcatgcgaccaaaaccaggcgaatcataacaagatcgctactgcaaccttattataaaagatcaattacttggagcaggagagtttgttacgtgcagtacattctgaggactgaggttagagccggcaccggcagccagctggcttcctaaaatcgcacgcgtgcctaataggaaaacagccgagaagccctgcctttgcaattttgcaaaatagactatttgattaggtgattgaattttgcaaagtactagagactttgattatgtgattgatcagaagccttggccaaagttcatagatgaagtcctgcctttgcgattttgcaaaatagacttttgattatgtgattgaattttgcaaagtagagactttgatcgtgtgattgatcagaagccttggccaaagttcatagatgtggttgctgatgatagatcgatcttggactcggtactgctactagtacgacacggcttctgtgactgctgcgtcttcttccaaaatcccaacagggtagcgatgtggagacgacgcgtcgctgtacttgtcaacgactctggtcatccacaaccatcactgtgccatagttattgaatgtctaatgcaccaagctatccgtggcctatttggtttattactaatgtaataatgcaagttatccccaaattttcataaactatgcttttgttgttgttaagattttggaagtgtgtgagctttagttggctttgcctaacaaaaactttgggaggcgtttggcaaatgggcttggaaaaagaatatattacccatcaaaggatagtttttatcctaaccatacaattcttctcatctcattccatcctaaaccttcactcatttttctatcacagtcccattccttgtaaccaaatggtggtttgctgggaatgctgggttttattcaacaaaccaaatgggttgatggttccttgagtttctatttttctttttggtaagccaaacaaccactaatatccagagagatgcttccaattttaatttgggaggaatttcatttaagagaatttgggaggaatcttgaaacgtacaagaacagttaagcatactagttttgaatgaatggaagagtttttccaggttcctatggaagctactactatctcataaacagggaaaacaaacagttgggaaatgcaagacacaattttttcaagaacgaacaaatgaacatatgccctatcttgtagtaacaaatctgcctcaaattttccatgcctgattaatccgattttatctctaagactccagataatgcaagtatgcaactcaaaactataattgtgccacagtgtgcaaatgcagtgagctagtagtaattgttaagagaagagctttgtcagcaacagcaaagcatctagtagcagccgtattttaatttgttagatagatagatcgatgcatcggtgatgaccacccgctgacgcaagcaatgagctgtcctagcaacaagaaacagtgcacgcgacttttccaagcattgaactgataatccgatccccaaaaaaaaaaaaaaaacgacgcgtccatcggatgattaaactggttccgttcacgcggtgaaaattttgcggaaggcaatggcgaaggaagaagaaattggagtactcacagtggaagtttcggggcggcggcggaggggaggagaagaggatcttgtcgaggctctcgttggggacgtactcgtagacgaggagcttgtcgtcggggccgtgggcgcagtagccgatgaggttgacgacgttgcggtgctggacgcgggagaggagggtggcctcgttgcggaactcgcgggcgccctggcgggacccggcgccgaggcgcttgacggcgacctcccggccgtcggcgaggcggccgcggtagacggggccgaacccgccctgcccgagcttctgccgctcggagaacccccgcgtcgcggcgctcagggcctcgtaccggaacgcgcgctgctccctcgccgcgatcgcctccaggtccgcctcctcctcctcccgccgccgccgctccgcgcccccgccgcggcgggaggacgacgagctgaacggccgtgcgatgcgctccaggagctcgcggggcttcatgccctgctgcccccctgcctcccccgccgtggctctacttgctgctgctgctggcgcgggcgcggcggcggtggtggtgtttggttgggttggggattggtgggtggggtggggttttgggttgccgtggtcgaggagaaatgtttcagagatgtcgccgtcggcgtcggctggggggcgcgtcgcgtggcatcacgggctcacggcactccacggcgaagcgcagcgccggggaggagagaaagtcagggagactgcgcgttgacaaaatgggcacaccggcgtgtatgcggctggaacaggtcgggggtggaggggttgaagacgactcgaaagcaaatggaagaagactccaacccgggagagcttagcaggataaaggctcagtttagggtgtgttcagttcgcgaaaaaaaaatttgagtgtcacgtcagatatttgaccgaatgtcgaaaggggttttcggacacgaatggaaaaattaatttcataactcggccggagttcgtgagacgaaaagttttggtgtgtcacatcggatatacggacacacatttaaagtattaaacatagattgataacaaaacaaattacagattccgcctagaaactgcgatacgaatttattaaacctaattaatccgtcattagcaaatttttactgtaccaccacattatcaaatcatggatcaattaggcttaaaagattcgtctcgcaatttacacacaatctatgtaattagtttttttctatatttaatactccatgcatgtgtccaaactttcgatatgacagggtgaaagtttttttgcatgagaagtaacagggcataagttgtttattttcttttacggacacgtaaaaagaattacacggcaatataatagaagaagagagcagagtttgattacatatacatagaagataagctactaagaaagaaaaaaaaactcttatcgcaagggagggtggagtagggggttccactacactccggcatacgtcgtttagatatttttctaaaacaaacttgtctagttttaatcaaatttgtaggaactatcaaaatagatattataaatgttgttgtattttctataaacttgatcaaatttttaaaatgtttgatttaaaaaagtcaatgagacttatgatatggaacggtgggggcgaattttttttcttttttgcaatacaatctactactacatccgttccgttataagtcgttttgattttttttaaaacttttttttagtttgatcaagttagcaacatctacaatattaaattaatttcattaaatataacagtgaatatattttgatagtttgtttgttttgtgttaaaaaattgttatatttttatatagacttcatcaaacttaaaaaattttgactaagaaaaaaatatttttaatatgaaatggagggagagtattttgtatatagtacaacttgtaccatagaagatttattgtatttttatggcatgttcgaagttagacgatacgtgtttatttaaagactatatacatattcttctaatagattaaaaaaaatttaactagaaataaaaatagttttattacaattctttcttcacctaatggagcaaagtttttattttataaaggctaagggtattatttgagttgttaactatttgtctcttttcttctctctattctacatcaatagatattcctaattagcaatgcaaggctgagtttggttcttcactttcccaactcatctctctcgtttttcacacgcacgcttttcaaactaattaaacgacaaaaattttctatacgaattcatattaatcaaattttcaaaaaaataactaatactaaattaatcatgcgctaatgagttgcgctgttttgcgtgcatggagtgtaagttcccaactcaagaaaccgaacatagcagctgtgttcggtaaaggggagttgcgaacttttcctccgaacatgcaaaacaatatagtccattagagcaagtataataatgataagctataaggctactataagcttaggtggagaagagaggtagtgaaaaattaaggatgttggctctcatacaagaactagcttatcacaagctccaagacaaatgcattaaatgtataagtgagagatagagagataagaagaaaattgtagccaatcgtataactaatctataatatatgttggctttaaaatgaactaatagtaggaagtgagctctattattatcattgctcttagcacgtgattaatttagtattacctaatgtttttaaaaagattatcaatattacttttaaagtaacacatatatatatatatatatatatatacagtttaaccgtttagaaagcgtgcgcgtaaaaaaacgagggatatccctccaaccaaacacaccctaacagaagcactcagccagctcctgtaaataacctcgcaattacagttgtatgtatatttgtactggtactatcttcagtaggaaatctatgcctttaattaactcaataaaaaaactgaaaacgtgaatattaatcgaagtgactaaaatttattctcccggacaaattagtgagatacggaagcataaaacctctacttttactatggcgctgctgtacatgtacgttgtctagtaaaaatggagaggagtgaagctcgctgcacctcgcattgtcaggccaggtgtttacgcacgtaaacaacattcacaatggggaaacacaaaaggtgatctgcccatatctataggctctctaccagagatacatgtcagcatatttttttatttggaagagattaaatgaagagagagagcaaagctatctactaacctgaagatagtctattaagaaaaacgaggcaatacattatagagctatagatacctatgtagacatactattgaggtggtttactattaatctaatctattgctaagatgtacatgttttatagagagcaccttactttactataggtgctctaataattaatctccgttcagcttatcagaaactgcgacgaaatggcggccggtgggccggcggctttatgttcctgatatgattagggaaagaaaagacgatttcagaaaaaaaactgagtcgtcaggattgaccccatgttttcctctgcacaaaacacatgtgcctgaaactcttcaattccgtgacagcccacagcacggcaacacttaatctgatgtcaggtggctgacctgtggcacataatgttaagaatctgccctagaatattaaggaacaaagctctaaatgctggtactactttattactacatattaatttcgagtagtagtagtatgtataggaagtataaacaatttctttattctatggcggtaaggcatagttttttttttctcgactcgaaaattcaactttctctttttcatttgcatactttttaaaatattaaacattgtgtttttataaaaagttttttagaaattgtttaaaagaaatcaaataaatctattttttttaatttttatggtaattaatatttaattaatcatgtccaataatttgtttctcattttacgtgagctaaatttatgtctgccaattgagagaacgaaaggagcctaagatatactccctttaaaatatagtagagtatcataatttaaaatcaagagtgcatcgttaagaggctaaggagttgtgtagttcctaagtatactttatcactatttatagtgtcatagttggttaagttgagaaaaatcaaattcttcaccacatcttaatcatcattaggaaattttgccacacttttttcgtcgtctagaatgtcacaacagtggatacaaccaaataactaccaagcaattaaatttatctaaccttaaacgtggtaaattatgataaagtgtaaccgacaaccaaacactttataagcgacgcgtctatcaattgcatacttgagccaaggtttcaaagggatttattaggattcttttaatagaaattcggattcgagatacatatgctagcacacgtaaccatcagccagttaggagggcatttatactaccattagtcaggttagattgataaagatgtgccagaatttattagataaagcagaagagatgatgccttaaaataacggggcttttaactatttgccattattacggatgttgtttaatgatttaccactagcctcatatatcatagacacatgagggctcacatgtcattgatagggtgtggcaaatcgttaattgccatgtcacatgagtgacaaatagttaaatttccctaaaataacatcagggaagacttggaagtttgacctcacatggatcgagcgagcttggtcgttggcaacttggctggatggatgacaattgccatggtcgatgcctgatggcttgcttcagtagcagccaccggttgcctcgcctacaggtttggtgattatattgttcagtgctctcgccatctcttgccatgatgatgatgggacaccatttgatcaatattccttgtttaatcatgcaacccagaaatcttagacagaaaattttattttaagttaatttcattttgggccatgtttcattaccaaccacctttcttttattttttagcaggctccttaatattatcccggtttgtagaacccccttatcttaacatcaactacaggttgagttgaacttaaggaggacttactctttgcgtgcaatcagcacctaaccagaagatgtgaatcatccaagacacattagtatggcgtactcctcctgcttgaatcggagtttgaaaccaaacaaacttctcctcaagaggatagatgggggcgattcaggtgatatcttatgtagatataagtaaagaaagaatggtagatgataatgtgaaagggcgctgcgtttaggcgggtgggccccgaccggctggcccgccccctttctttgcccactggccgcctagctgttattctttgagatttggatagagtcttgcttcgatcctgctcctcaacataagggagtgacaggggaaaggggccggaagttttactttggaccaccctttgttaaatcttttcactttggactaataaatttatctttgttgcacaatagagtaccataaaccacatcttttgcacttcaatgacttcgagcaaatcgttaacagtgtgtcggtgaactttcatatctgtacgtatgccatacctttgttgaaggagacactgacatggttagcaaagagagttaggatgatccattatgcaacaaacgtaaatttacctaattcaaagaaaaaagattaagtatagggtgatccaaagtaaaactttgacaataaaacattggtccaaagtataattcactctttcttttttcatgcatgtttatgtttacggaatggactaattattttgcttgtcagcacgacgtcagaaaagggaacaaatgctttcttcagcctctcaacactaaggaaatgtcctggttttcactactccctccataaaaaaaaaacccctggatttctatatccaacgtttgacctcttatttaaaaaaattatgaaaaaaattaaaaagataagccacgcataaagtattaactatattttatcatctaacaacaatgaaaatactaattataaaaaaattttatataagacggacagtcaaatgttggacgcggaaatccagggtttgtcttttttttttttacgtggggagtagaaatcaacagcaggaaaacgtcactgaattcttctgatcaggacagagaggaacgtcatatgacgttcggttcaatgaacatgtttgagtcactacacgtgtctcgatcagagccgtgggatctccatcgggcggtttatctgcgacgagtgtgttttatccacgaaatcacgatccatatcttttgggtgggggcttaaggcgttaagcgtaatactaaattcttaagaggattctcgtgcacaagtttcagactaatgaagtcgatctggaccgtccgatctcgatcggacggcccagagagagccccaagtaacacgggaacgacacgcgccgtggggcccacacggcagcgggatggtcgccttcactgaggcgactcttcttctcctcctcctcctccgctcgcgccgccgccgacgaggtcgccggactccgccgccgccgccgcaccaccgcccgcgacatgctcctcccccctctggtggtcggctcgaccatggcgtcgctggcgtccctctcgctcccggtctccaccgcctcgcagggccgcgcgcgcggcgcgggacccgtcacggcggcgccgcggcggcggagggtgagcgtcgtgcgggcgaaggtgcgggagatcttcatgccggcgctgagctcgacgatgacggaggggaggatcgtctcctggacggcggcggagggggaccgcgtcgccaagggggaccccgtggtggtggtggagtccgacaaggcggacatggacgtggagaccttctacgacgggatcgtcgccgtcgtcctcgtcccggccggtgagtccgcccccgtcggcgcccccatcgccctcctggcggagtccgaggaggaggtcgccgtcgcgcaggcgcgtgcacaggctctcccgagaggcccgggccaagaaccccctcctccccacgttcccaaggctgcgccgccgccgccgccgccaccaccaccacatgcccctcctggaccgccgccgacgaagggcgtcgccacgccgcacgccaagaagctagcgaagcagcacagggtggacatctccatggtcgtcggcaccgggccacacggccgcgtcaccggagccgacgtcgaggcggccgctggcatcaagccaaagctaaagggcccaaagggcgctccacctccgcctccgcctccacctccatcgccacacagacaccccgctgctcaccctccgcctccgcctcaccaccccgctcctcgccctccgccgccgatggcggcggcaccccggcaaccagcagcgctgccaccggtgcctggcgcgacggtggtgccgttcacgacgatgcaagccgcggtgagcaggaacatgatggagagcctgtcagtgccaacattcagagtcggctacgccgtgtgcactgacaagctcgacgcactatgcgagaaggtgtcatttctatgaatcccctgcaaaattggtgaaattcatagctgctagagttacagtttagttatagtttgactgaaatgaattgagtaggttaaatcgaaaggggtcacaaagacattgttgctggtgaaggccgcggccatggcgctcacgcagcacccggttgtgaatgccagctgcagggatgggaagagcttcagttacaacagtagtatcaacattgctgtggctgtcgcgatcgagggcggccttcttacgcctgtcttggaggatgttgataaggtacatgcttattgcggtagctgcgttctgttaagaaatgtagcattgttgcgaattagcgtctagtgaatgatctaacattttctgaaaaaaactaacattgcagttggatgtataccttcttgcacaaaagtggagaggcctgctcaagaaggcacgcatgaagcagctccaaccagacgaatacagttcaggtacagaatatgttgtattgtgattggcacttggttttttatggaaaccacgcttacctgaagtttgatgatttgtagggacttttacgctgtctaatttgggtatgtttggtgtggatagattcgatgcaatccttccacctggtcaggtaggttttttcattgactgcccagtcagtatgaaattttgacagaattgtatttgagcaatatgagaactaagaacaactgtttgtcgatggctcgctcaatgcagggggctattatggctgttggaggatcgagacctactttggtggccaacaaagatggtttctttagcatcaagaacgaaatgctggttagtttgtttttcacactttacggcctgtatgcctcaaagctctgctcatgctcagtgactgaccattgatagtaatttggcatatgcaattatgcattcaactctaaaaatcaatgagtaagatttccttgcaaatatggaactaagtatattttgtcatcttgtaattggatcggcaagtggaataatttatatgcacctgattgaacgtaataagtgcatagtgtagacctgttattttcagcttcatgcttgtgtcattattgttaaaacctagaggtgccaactggatgtttggcttctctgagttggttcctgtaatgagttcataccagtctgttgttctttcagtcaatcactgacttagtttagtttaaaaaaagttttttgtgacttatatctatacttattatctatcgattctgtgtggacagttcccagcagcgtgtcacagcacatcttacctttcaacatttcactggttgcaataaatttttctttcagagatacttctctgaagcttctgaactatgtttctcccaaccttttcaggtcaatgttactgctgaccacaggattatatatggtgctgatttggcagcattcctgcagacatttgcgaagatcattgaggatcctgagagcctaacattgtagggaaaatgtccctcacaagtgctccctaagtatctgcagtttgtttgattcgaattggaagaataattccaccgagcatttgtagccattaattgtaaatagttttgttattgttttaatgttattgccatatgatcaatattttttcttatacccgccacggaataagtgaaatgctcatttccagtttccatacattttttttacttgaagatagatactctgagtccctaattctcccaggtaatgagtaattgaaaactacttatctcgcaacaggttctcgcatacaggtaagtttccagaatctcaccaattgccaaggaattttgattactttgtgaagcaagtatcacatgtttggtactaatagattttgcacaagaaaaatctgattatattcctttctttttcatctctatgtgctatgctcatattagcattggtcctggctgcctgattcttgatgagtgtactagtagtactattgaaatggaggccttgattttcatggacaatacatcacagtttgtgaacatgttgaaatgcaaaatattacatggctcctaaaaagtcaattttgtcctgtccaaacttcaaaatgagaaaattaaatctgttttccatttgctaaatttcacatttagcattcataccttgggaagttttatctaacacccaagcaaaacaagcctacacatcactcctgactccaaaagaaaggcataatcgatattaccgattaagctctggtaaatcatttgatgataaacgctaacacaacgttgtcaaaagaagaagaaactcaaaattattattatttttgggttagctggaagaaaatttcagaacctaacacaaactgtgtctgtatgagtacatggacagttcaggcaaaggcctcagctctaagccgcgtggccgccgccgccgccgccgccatagtaaccgacgaacggcggcggcggcgcggcctccctgacctcgaggatctcgacgcggcggttggtccgcttcctgatcttgatcgccacgtcctgcgggctgaaggccccgaacacgctcaccctgccgtgcttcctgtcgatcaggtggctctccagctctgcaaaccaagcaagcgcacacacagcagcagcagcatcagtcaccggcgtcgccatggcagaaaaaaaaacaaaagcttcgtttcaccggccggcgtcgccatggccagccagaccggctaccttcctactccctccgtttttgtaaaatatgtaaaactatatgtatacataaaaacatatttaacaatgaatcaaatgatagaaaaagaaattaataattacttaaatttttttaataagatggatagccagatatgtttaaaatggcgttgaatatttagggacggagcgataccttgcatctggagcagcgccctcctgatcttgtggtagcacccgttgcagtcgatgttcatcctgagcgtcatgtagtagagctgcaacacagcaaccaagcacagtgattgagcatcatatgatcatcatcccattgctacttctctcaagcttcgacacactcatggccatggctgttaccctgtagtccatggagaaggagctcttcctcggcgacggcgaagacgacgatgacgaaactgaactatggttcagactactactacttcttcagagttcagagcttcagaaaaggtagtggaaaaaaagcatggagttggccggattcttgctctgctttggttagtgcttaagcaagcgtgcctctttaatcccctttttatggctgctcagtgactcggttcattccattccttttgtgtgggatcgatgcgtgtcttcagaatcggattctgtggcagcctggcttccatgcacagccccttttagctgcttctcatctcaccttttctcatgagctctccgtttcatttctctgtatcttcagcctgaagtctgaacccatggattcagtaaaagaacttgacagtgagatgcagatatgtttctccatcgactttgagactttgtttttttagaaagtgcagacttttacgatgtatgtaacaatttgctggctcctcttttttatttttttttcaggatttggttcgtgatggatgttccatctggggtttgagacttgaatgcaagaaagtgataagttggacaggtggtacgattttcaacgtttcaagaaaacattggcatttgaaaagaataaaaaaaatgatgtacttcatggatagatttgtcatcagcatacctgtaaaaaaggtgcgttttttttcgtagctagatgcaaaatatatttcatcatgtcctagcttctttcttgacagtattagcagttcaacaataacagcaactataaagttgcaattaatcagatgaactcactttaaccctgccagttttaccaagggagcatgatcattgatcagattcttcagtcctgtactggtaaaattctgcttcagctgaaccaaaagcctcttcgcaacttcctttgcttcttttttcatttactgctctagaaacaaatttgctggcttgtgacattaacttcacaagtatcaattcaggggtaaaagactgcaaactccatttcatttcaaattggataagatgacaaggggatgataaaaatggtctaaactacaaccaagacattcacgaaagatatttgaagttttttatggagctgatataaccaaatggactgcattacacacaagactgtgacatcagaagtccaagactcagttcaggtggttgacataataacctaggagatgaaccaaagtcacaccaaagatgcataattcataaaaaaaaaaaaggagaagatgcatagttcagaaagaaaaagagaagatatatcatccttgataattcatatcctgcaagttctttcaactgatgaacagctagctgggcaatgattctccactgatcgtgcatacttcaaggagcagtggtagcattagccatggatacatcaaggagcagagcccctgaggagatcctggtgaattcagtgcatagctggtattgcagagtttgaaccacctttgtttgtttgaaggccttccatttgcctcattacttcttctcttgtaggaacttcttgtgcagtaatgacttattctgagatcttcccggtgagcaaaagccttccatttgctatcgatccactcgagtgaatgcctcagttgatccctatggaataacaccatcttcttctcccctgcaaattcagacaatggaaagaactccgttgacatggcaacaagctaaagacaagcaagaatttgcatcatggactgttaaatttgaatccactaaggaggtaatcaactgacaattcacctggtaagtaagctagcagcctccttgcatcactcaccttcagcaaaattccctcccaccaaccatcatacaaccatccgtcaatgacagtgccaacaccgatcgtagaggggttctccctctccgacatattgtggggacgaattcttgttcttccagagaggcgtatgcacagagggtcaggattagcggttcttgtcacaagcaaccattcctgcaggagaacaaccagttcgtgtcagccttctcaactcaaagtgagcttcatggacatgagcgggagcttgccatctggttactataaaagaaagaattttattttactatataactctaagttactactttagttctaccatattatcaacagtagaagttactattgtatctctaacgatagtgctctactatcaatattatcaaccgtacaagtcatctgagctgttaatttatgacttctactatcagtagaggaaaatattctactatagtagtataaatcgatatggtccaattaataagaaagaacaaaaggtgtagattcattctactacccatagaggccaccgtaaatttgtcaagaacgaactgcattttcagaagtggtactgaaattaggcgacatacctctaggtttgctcttggtgtttcaggatcttggaggtgttggtacctcaccttgatgcgatctccgcgcctcctgatcactgaaccaatgaaccaacatcccctaatgccactttcctggctcaggcattcaacaaggcaaccaggagagaagtactactcgagatactgctccagggcagagttcatcagagcagatgcaggctctgttggtgcagcattgcgtgcagtgacattgattgttgcggcctgaacatggtctcatcacctgcagtggggttctccacagtttgatgatgatgatgacctctatctgatgatcttgtgtgttcttgttgccttcggatgcgtcgggttgcatgttcacgggaggtgttcctaagattgttctaaatatctcctgttctgaatacccttgcaactgtgcaatgtcaaaggtcttgacattgctatcatcgtcgatatgccgaatgcataggtagggctgccagtcgatgttgttggcaattgcttgaaacttctcaaagtgttatttgttcaggactcaagccaatccgtctatgcattcaactctgatgtcttgcaaattgtcggagaggaggatctctctatcattaacacctggagaaagctgaataccagaggagttgagtgtgtgaaaccatcgtatctgaaccatgttgtttgcatggttatccttgtagagttcttccacataagcaacaagtttgttgccatgttggaccaagatgtaaacaaaatcgtgaacctaaaaagtgtcatgaacacaattggtgtaagcctaagattcagtcctctaagattttttttaaaaatgcgctgatgattgataagcgtaccatgaatgtaaatccccttcgccagaaggatttgtagctcttccctttttttggaatgcgattcaggacctaaccatttgaagccacttgaatcatttccagcagccgatgatgaagagtcctgaatgaataaaatgaaatttccttattaacttcaatatatagtgctttatcggaagcatttctcatgaaaaataaaaatgatcagaaattagcttaatgtacctttgttgtggagatattagcaagcttagcattttcaccatcattgttacaaattgcaacttcatcagatgtaacatctatcatggatgatacactattaggactggcaaaaaccgaaaaaacaaatatatgcatgccaattttcacagtggtgattagctgacgagtccaaagattagtgcagatcgtaaaaattgtaaatattaatatacgatgaacaaaaagaaaatcaaactgaacatgtcctaaaacagatgctaatatggggtaacaaggaacattatctcattgaggtattgactgcacaatgatgaggcccattcattttgctaatgaaacaaaaggaagaaagaatagaagaaggcatatatgtccatgtcgctaatgctagaaaagtgcatatctcttgattaattcaattcacagctttgttcaagagttgggaaattagaataaaaaagatatttgacttgttaaagaacaaaactttacaaccatttaagtgaagttctatgactcattgggtttaataaccatgataagtctgaaatacacatacagatctgacaagtcttcatctaaattgcaatagcttaaatcaagccaacccagagaagtatatgcaaggtcaagtccatactaatagcaaatggaaacaatatactaaaaagaaggtaagtttttagatcattgaactctatatgcatatctctgctatgtataggaaaattttgctcactaatatatactacaagcacgtgcacattacaaagatatcatccattgtgtgactggcaaatggagacaaggccctatagcggtgtactagtacataggggttaggacccacaagttagcagctcaaatatgtttatagataaattgacaacgggaaaggcatcaaaggaaatgtctaccgaagtaagacccttcttaggctgcgttcttttcaggctattactcctcgttttccgttagcacgcttttcaaactactaaacggtgcatttttttgtaaaaagtttctatacgaaagttacttaaaaaaatcatattagtccatttttttaaaaaaaatagcagatacttaattaatcatgtgctaatgg

SEQ ID NO: 9518 - DNA, 3490 bp, Oryza sativa
aagttcaattgttgctgcctctggagctcctggacgtgttgggcaagcattcataatgtaacaggagagccctggagctcaggtacttccccccaaatttttcattgctaatttcaatagagtcaactgtcgaggcaagctgttcccataatttgccggtttcaatgaggattaaatgtcttttattgacattaaagtttcgtaaaaattgaaccctattattagaaattcatatgcaacttaaattgacattgagcacaaaaattctagtcttcaatgcaacctcttttatgaacagaacaccttgggaaaaacactctcattggatgcttttaaagggaagaaaactccacacaaataattgttcacttaggtgcctaaaaattttgtcccctgagtgcttttaccattttatgttagtttggtccaagtgcaaaatttgttccttaaagtatccttgttgtactgcaaacatttattctactacttaaatttgaggttcttttctctttgaaggcttttgtaacaattaattggaatgaacgtttggagcgttgattgcaggtcgtagaacgtttggaacactgtaacatggaatgaagaagctatgatgttttagaaaacatatgagaagagtaagtatccatcctataattcacctcattcttacacctacaatactcattcatcaaatccaacgactcataatcatcgaatccaacggatcacatcatcccacgtttcccctcatcctcaccttggacccgcacgctccccctcccctaatctctctcgcacaccagacaccaccatcgccgcatcgcatcgccgcacaccagacgttgccgccatcgcctcgcatcgccgaacctccatcgctccccctccctcccactccatcgccggatcggattccctgcccctcaccgatttcattcaaaatgctgacgctggatcggcgggaatccgcccgcgccctctctgccaccggaatgccatcaccacgcctcgccgctctcctccgacaacgtgacgccgctgccgcctcaagcacctccgccagtgatccatactcgcgctgccgatgccggatcggcgggaatcgtgcacgcatgggctaggggaggtgctcgtgtgcgcacgggccgtctccatcgatcgatcgatcaacctgcccgcttgctcaaccaatttgattaacaccaattctgaatctctgatcatgcaagcgcaggctgggatggtggagcagcctccacagatccgttctgtcaggcatcttggcttacgggtgaactacacagcgatggtccacatgttgccccgccagatagagcagatcctgaagagtttcccacgtttaaaatcactgaaaatcctggtaataccaatgaacagccaatcttatccaaatccaatcaattgttgcataattctgaatttgctgcttattaattgctttgcactgatatgtctgaattctgatttttctggttgagtcgtggtctgaattctgaattcgctgtcaattcctctgcacaaaagtgtgtgcattttgattttctgactgagttgtggtctgaattctgaatttgctgctaattagtgatacttctggattctgattattctgattgagttgtggtctgaattctaaatttgctgtcaattgctctgcactaatttgtactatgcattttgattttctgattgagttgtgttgtgccctatttcagagatgcgatgacgttacaggtatgcaaatgaaatcgattgcccgcttgctcaaccaatttgattaacaccaattctgaatctctgatcatgcaacggcagatccgttctgtcaggcatcttggcttacgggtgaactacacagcgatggcatcaatttgcagttgacgtgaacaatcggataagtatatattcttgtgctttctaaattatgaaatggaatatattgttcttttgtgaaatttgatttatctcataaaaaatgtctgtcctcagatatggattggctatttactattgggcaagaagtgtttggtgctttgcatccaacagccatatgaggctcagtctcttggtatgaattcatcagataactcttctcttcgtaatattcatctttcaaaatatcatttcaggatcacgtcaattttttcaccattgatcttggcatagtatgaactggacagactttggtccattcccctggatgtatgcaatatttattccatttcaggaatgtacataagtgcatcatactttgtatttaacagacattgtggctaatggatgatgatataaacacctttgtatgcattttaacgaaaaaccatcctttgaaagctttttaatggaagttctaaaaggttttaattcttgtttattgtttattgatggagagaacaatttctatcttcttaagtagatggctcaggacttggtttccaatgttacttgaaaatgatactgcaagctaatcggatcaagttttgttatattgcaggaggctagcattatccaatctgctgctttgactgcatggcgtgctttatacgacaactgcaggtgaacgcgattcgacttgtacccctgattttgtctggcatcttgttccaccagatcggctgcaatgcctcccgtcaaggagttgaggaagagccacagcaacaccccctaagccggttgccctgattgtgtcccgtccctgcaaagtgctgggtacccattttgctgcttcttttagaagaaaatcgttgtttggtttatagtgtgtcccctttgttcccctttatttcttattgatgaatggaactcattggatttagtttggatgcaactgcttgtcgataatgaggtagcaaactctcctgcatcaatacattggctctctatgtggacctaatgaggtagcaaactctcctgcatcaatacattggctctctatgtggaccgtgcatttgttttacttagtacttacgagatatatgttgttttcttttttaagttgatcttcccattctattacagtaaagtccaagttcttaatttcaaatgagatgtgaccttctgctctgttttatggttgcatgtatttcaactttgtaccaatgcatgctactaaatttttatgctttttctagcagaataaaatcctataaactggtaaataatttatgggcttcttctgcattataatggaatgcctaggctgtaaggaaattaagcactttccagtatttaggcacacatatacggatttttagattaatatatcaatcttccgtgtatctcttatttattaacttctgcacatctctacccaaagatatatcatatatctcatacattgactaatgtgatcattggtgtgtaatgtgatcatttttgtctacttaaaggaagtccaggttcattattccaaattcattctagaactacagaccaatgtttctgaaagtagtttcaaatttaagcttct

SEQ ID NO: 9519 - DNA, 9790 bp, Oryza sativa
aaccaccatgtacttgtacttaactatagagctcaaataaacatcaaattagtactactgtccaatggatgattatataattgttgcaatgctattgaaactgttacatgaactaattagagtgtttttgtcatcaattcttgaacagggtagtacaacaagcttgtgttggagtattatcctcagcaaactgcatggaaaactgatggatggtgtaccagaatcaacaacaaactccattggaactttccattctagcattatagaatatgaaattgagaacaatgggatcataactgcttatactcatagtactcagaaacactctgtactgaagagatactctagtagttactgcttactcatcgtactgagacactccgtactcatcctactcattgtcaggagatacactaataggaacattactgcctactcatcctactcggaaacactctatcctcagtaggtacgctaataggagcggtactacttactcatcttactcagaaatacttacacatagatgatgcaaaaggtcatggggctgtatggggcataacaatttgctcgtcgccacgaacactcaagtcaaatgatggaaaagggcgtcatgggaatgggagtaagatgttggcaaacagtaggttcaggatgactgatgcgaagtcatcgaggagaccctgccgcgccctcaccgaacgaagtcggtccccgatgtggtcagcaagtcggttgagccggagcacgaaggcggcgaagatgtcgacggatggccccccgatctcgccagcgagctcgatgatggtagcgccgcgtccacgaaggagagccacggcctgggcatcgcgcacgtctgacctgatccttggcaagttcacctctgcgatgcggttgacgatgacgtacaggtcggcgagggcacgcagcctggtgaagttggcgacgcgccactggtaggcctcggtcatgtgcctcagtatggccgccatggcgacggcgtcgccgaaggtgcacgaggagacgatgacgttgatctgggaccggtgaggccccgccgatctccttcaccagcacctcgagctgtggcaaactggtgacctcgaaggcggtggtcgccattgcgatggcggaggagggatgggtttagggttttagcagatcggaagagggaggagggggggaggggggggattgcgtgcggattgcggcggtttggaaagggggggtgttatagcgaggggcggaaggggagcgagcgccaaattcaaaatttccgaaggcgcggtctccatataccaaaatggatttgtgccgaggcttgcgggagacgagcagctcggctgggcccgagagaggaggagaaaggaattagagcaaggttaatacagcatatttgttggctataagtcttttttttagctttttttacccacacatacaataattagctattacaattaatatagagcctacttgtctctctcacagaattttttggttcttttgttcaagccggttgtaagtttacatcccgtttctcctctctctctctctcttctcttctctctttcaccttagggtccctttgaatcgtaggaatgaaaaaacagaggaataggaaaaacacaggattctgacaggaatacaattgtaaaacagaggattgcaaaacacaggaaaaacacaggaatggccgtttgattggaccacaggaaaaacgcaggaatcagatgagagagatagactcagaggaaatgttccaagaggttagacctcttgctaactttcctccaaaatgtgcataggattacccattccataggaattttaaaggattggataggattcaatcctttgtctcaaaggccttcataggatttttttccataggattgaaatcctccaaaattcctacatttttcctacaaatcaaaggggcccttagcatttagtcgacttacagcctactattatactttctcttataggggtgtgtttggcgcctctttcccatcccttttcctcgttttccgtgcgcacgcttttcaaattgttaaacgatgcgtttttttttaaaaaaaaatatgaaagttgcttaaaaaatcaaattaatctattttcgaaaaaaaatagctaatacttaattaatcacgtgctaatggaccgctctattttccgtgagtacttttttcgaatgggaacatcaaatggcgaacacatgtgttctttcatatgtttcccaacccctctcgctcatgttccgtgtgcacgcttttcaaactgctaaacggtgcgtttttttacaaaaactttctatacgaaagttgcttaaaaaatcataatgatctatttttgaaaaaaaagctaatacttaattaatcacacgttaatgaaccgctccgttttcgaggatttggttcctagctcaggagaacaaacgcaatctaagtccactttgaatccctcaatatatgtccaaattttattcgcggagaggaagggcggtggccggccggcagaacagccggtgaatccatccttccctccatttctttgctagcttccgccattgtttcttggatttttcccccttttcatttctgcagctcacacccgctcaaattcttcacaatccgtaaagtgtgtgtgaattcttgcatattagatgctgaattgctactaatagcctgcgtcgactcgtaaatttatgttttttttttggaacagatgggccgtggccgcagtacagctatgggatggtcatcctgctgcaggccaaccacattctacgttaacaaggtgccaaccacccatcttatataggggtggccatttggtctaaccgaaaattttggttttgatcttcgtttttttccatttcggtctttgaaaagtgaaactgaatttcaacaaaaaatgtcagcaccgacaaattcggtctcggtctaggtcctgaccgaaatacagcaacattttcataaatgcaaagaaataatggaaattttcaacacgaaaatcacaaaaaaaatcataagcacgtatgagtaaatactcttattagttgtatgtctaaaagaagtaggatgtgaaaattagagtttaatcctattgaacttagtatattgtaggttgcatttagatttttttttaattcggtcttttcggttaaccgaggagactaaccgaattgaccgaacaaaattcaatctttcactgcctacgactgaattaatgaccgaatttatcagtcttagtcttttcggttcggtctttttctgcccaccctagatcttatctttagaattggatattgggatgtggtcattttctcccaattttctagcttcttgctgcaagattggcataccaatttggttgtgtaattagggtgtgtttagttcacgtcaaaattgaaagtttgattgaaattaaaacgatgtgacggaaaatttggaagtttgtgtgtggccggtgtagttcccaactttttcttcaaacttcaacttttccatcacatcaaaattttcctacacacataaacttccaacttttccgtcacatcgttccagttttaattttagagtgaattaaacacacccatgtagaaaagttttgatgtgataaaaaagttaaaagtttgaaaaaaatattaggaactaaaccatgctttatctggttttaccttgtgacagatctcgagattgaagacgatactcgagagtactggccgtccttgtactgcggctctttctcgacctgctttggtgggaaaagatctgttgagatggacgctctgttccaaaacctgctcctcctccctcaaatttagggtgtgtttagttcacgctaaaattaaaagtttggttgaaattggaacgatatggtggaaaagttggaagtttgtgtgtgtagaaaaattttgatgtgatggaaaagttgaaagtttgaagaaaatgtttagaactaaactaggccttacacaattacacctacccctcaaattccaaatccggttgagaacagccggcaaaacttggaggagggggcaaggtggcagaccccaagggcgacctcgccgccaccgacaaggaccgggcctcctctgagaagaaccgccgccgtcatcaccgtgtcgtctccttcgcccccgctggtaaccgcaatgcagaccctctttgacaccagcagggaggtcttccaggattcattgccgggcttcgtgccgccgccctaaaccgttgcgctactcgctgcccttctccttctacgcgcgcacttgccggccagcgagggagatcgaggaggaaggaaggatggctggcaggccgagggagatccaatgcagttatactagagactgcaacttaagcagttggaattatttttcatcgtcggatcgaaatgatcaacggttgtaatctgtgccacgtcagttctaaacagtaatgctacagtgctcgctacaggagacatccagctacagtgttttgccaaatagtgcctaggaaaatcttgacggctactttccaatccaacgatgcctatgtgaccgcttaatatagccactgcaggtgatctcaattccaggccgggaccggagagagagaagaggaggcgccgacgcaccgtggtggagatagagagcagggtaggacccactgatatgtgggtcccactattttttagttttatatgactgacatgtgggcccacattcttttaatttatatattttatttcaagtgccacatcaccgccacgtagaatgatgaccaagtcaaaccagccatgtagacgtcacgtctaccaaaaccgctatccaaactaccatgtatttcttttgcaccagttttgatagttgaaggacccattgtatctggtattgcggttcaaagataaaaattgaatttgctgtcaagttaagggatctcaaatgaacttatttcaaccgcaataccacatatcccgacccctcaactaataaaaccgatacaattgaactccttaaatggtgagattggttttcgtaaacgtggcacgttgacttggtcaatctatgctagtcaccaaaataaaagtgagccccgtatagctaggtgtgtttagttcccgaaaaaagttgaaagtttaaagaaagttgggagtttggaaaaaaaagttgaaagtctatgtgtataggaaaatttttgatgtgatatgatgtgatggaaagttgggaacagatgaaaaactaaacatggccctaagtgactagggaaaaacgtaaagcccacttgtcagtccccttctctcctctctatttttttccctaacaactccacgctcggcgcaactcacgtctcacctcgttggccttgcactggcattgccgcagccggagaagagggagggtctgttgcagcactggacgacgtagttggcgggcaaaaaaccgaatgctatagcaacgacacgaagcagaagagcggacgcgtccgcgcgtgcaaggaggcgtgaggtgggcaattggtcattgggggccgatcgtcttgccatggcaggcgaacatggccgctgctgccatgtgagggagtgcactgtggagagaaaatggaggtaccgagtatgaggatgatatatgggacctgctttagttttgttgccacgtaaacgcttagttagtatgagtgaatcagattaactttgctatgtcagtgaaactaatcacctatactatcggagaacctaatttaacctagctttgtatatgttggggagttaaagatttgtagtatacggtttagagatgtattttaaactcgacgtcaacactagtgatctaaattgtagtactactagtacttatcactagtgatcccatcggtttatgcagcatcgcgcttctgccgctgcccgaccctattacccaagcccatcatagcccaaaaaacccagaacaacatctcctggacggcccatgcccgactggcttagggtttggtacttgtgtcctgcctccacatcagcttcagagaccgcgccggcgccgggatgtattcctcacctcccaagggtttaaagcggcgcagtcgatttctcgctcgttcgatccgagcggggtatcgtcgtggttatggggaagctgctggacctgaagcggctcatgtccgtgccgaaggagcggaatcgtcgtcggcggcagcggcaaatccgagcccgcagtaaggcctccctcagtcgttctgcctctctagtctggcatctgtaatttgtttagaatatcactgctccttccattgtcttgtgccgttgcacagcactcggcatcgctattttgcaattgggatgcttttcagcaattttttagtgttgtttacagtttatttttcggcatacagattattttggatttaactaaaccaatgagctggatacattaatgttcatttcgattgtcagcatccactaaaaacatagacttcggtatccaaagataacatggaagcccatgcatagtttcggcagtataggggtaaatatcgggtaaacgagtgcaaatgtgcaatgtctcaactgggtagaacatatgaagtgcccatatgtacataccctaaatcttaagaaaatttggtcggccgcttctttggtcagcccagccaaaaagaaaaaaaaaagaaaaagaaggaagaagtagtgcgtgcccataaaactatattgcttccaatataagcaggacccctctaacctatcgtctaaagaggtgtaaaacaaaatatggtagacttgcagtattttcctgttgcaaaaggagatcactccctgctttgaaagcaaataaggttttcggcatagaagcaactactgggaacaccggcttacatagagagctcaaacaacgttctcaccctagccaatggacagcagtccaaaaacaaagaggaaaataactaaaatggtaaactaaaagacaagtgagctgaaaagcaagtttagatcttggttatgaactcatccattttagttatctcctctggtctgaacaacacccaccagaactacacgaagaaaagatttatcaactacgggactgtctggaagcactatctgctgaggcgccgtggccgcgctttgctgcagcaacagcggctgcagaagccaatagaaagcacgctgttcccacaatagattatttttttagggaatacgctagaagcatatctttgtattaagaggaataaaaattatttacaagaaagattgaaggggacggggtactggaatgcaacaaggacttaggctacaatctcacaaccaaattgaacgacctagggaccctagaaactagagaccaagcgccggaatcgccgcctttgccaggcaccacagctctgcctccgcggccatagctcttgcaatttccgcccagggctgccgctggagattgaacaccaggttattcctctctttccagatcatccatgctaccaaggtcgcaatggtgtcgaatccccgacaccgatccttcacgactttcttcctgctaaggcagagccactgatggaaggaggcctcttgcaggggtaggcaatccagttgattgattgccgagagtgcccaccaccagagttgacgggattcagagcagccaaccaagatgtgatctatacaatagattattttatacagcagaaattcaacgttgcagccgaacggctgtgcagttcagctgcagcccaaaccgctgcagtttaggtcttccaacggtcaatatgtcagctgaggaagttattagcaatttctaataagccaagaaagctgtaaacagtacaggatcaaagaatataatgatccacacccccagttcaaccaagaagctaagaattcagaaatatttgtaggaatattcaattttgtgccatggtaacgcctctttcaaacagcaccaagagcaacgagcaatgtgacattgaaagaaaacatggtacacactttctacgcaattgcattggatgcaattaacatcccctttccaattttttttcttcagctgtagatctatcttgataaagaagccaaacggagatttttacttcgagaggaatttcgcatttccacaatctgcacatcctccaactgatgacaccccagagaatgatcctatcatataaagacaaggcttagttattttcagattatttacctgattgttgaaacggattatttgccccacgcttcgaaaaatacattttctcgaaaaactttcttctcttgtattgcttcgaccacttttttaaagttatttgttaagtttatttatcagaatatttaatttatccctataatcaagtagataatcctcatcaataatctgtttcaaaatgaccttagtggtgtagacttgctctttttttttcataataagaaccaatgctcaagggaagtttttttaatggagacaaattggatttaaagtcactagagttttttttttcaaaaaaatcagacaaaaggtaaccaaattgatttgtggtgtgcacttgtgtgcttgatttaattgtttgcttgtatttgtgtctgtacataaccatgcatgatctattgtagatggttcaattgattcagtggctaaaagaaagggatcactctgccaacaagttgcaaattctgatggcgagagaagaacaagatattcagggcctaaccttccagaggtatgacaccaaatgctgataatgaagctcttatattagagtaaggtatctacgagtctatgactgctataagtagcctctaactgcgcactctcgtggtcctatggtacctatatcaaattgtatgaacaggtctttagtgctgcaattttctacagttctgcatgaatagcttttctctattctagctgttacaacttaaccactcccatagaaaattgtctgtgatgggtcttagatccccttgatccttgttgaagcagttgaatttttagagcttccctcccttataatctggttccggtacttgtttttctgtgtattctgtggtctaagatccagtttttcgtcatcatccatcaagtgcatgcctacctggttgagtttaaccaacttccgaagctactagctagtcaaatacgctggtatctatgaaggggccttctattgcttttcaggtcaatatgcattccattattatttgttcactcttgctactcccatattctgagtgctcatgtctactgataatgtggttactgtttccgtttcatccaactccttctcatcttcaaagaaaattatatagtaaatatagttaatcttaacctgttaaccgtaatctaaactgtttgtaccatcaattcataaaccacggagatatgtgaatgtgatgttgaataacctttgcagatagagtagaccaatacagtagcagctccatcatagtttcactccaatcagtaactgtattttttttctcaagcataagaattctgagatcatctttggctccaatgcatgataagctttactttaaccactattaggtcacttgcaagcacttgccttcatactggcccttgcttcctatgaaggtacaatctaataatattagttggtttgtaggttagctataatccaaacctggcaaggcaccaaacaagttctattttcctttattttcgaacaacgcaggagagctgcatgccattccattaagtagaaggaaagaaatacaaagttaggacaagccaacgtagcaagtcccattaagtccattttcctcaaagtaacagctttactcaacttcttat

SEQ ID NO: 9520 - DNA, 7770 bp, Oryza sativa
cccatatgttaagtgaggtattattttgtaccttattcgacgtattagtactcggataatttatataggcctatcgcagtctgggtcgtagaaacattatatggatttaaacaaggagaattatgtaacatgaagaaatagtagtacaatttgaacatgatacgactatttgcattgcgattacatagatgatattagattcgaactaggagggaggtagtgcaatagttgggggcaaggggccgcctgcaaaatagccggccccgactggcttttttgtattcgggccccttgccgccccaccagagggcggcaagggttttcctgcaaaaaaaccctccctccgtcaccgcccgttcctccccccgtttgccacgtcagcttgccgccccagaggtgggcggcagggtctatttttgtaatttttttggccggtagattatttctgtaaatatttttttaaaaaaatctaaaaccgaaaaaaattctagtttcggctcagctcggcccatctggaaagcctatgggccggctatggcccatggatagagtgcaatagcacacgcgagattcggggtagcgcaaatgggcggcggcggcggcgggaggccgacggcgagcggggcgaacagcagcagcagcagcgatgatgacggggacgccgcctggaaggcggccatcgaatccatcgccgccgtgggtttcggcctgccgctgtccaacggcgcggcgaaggccacctctggcggcggcggcgaggccagccacggcgtggagcagcagccgccgcaggaggggaaggcgcaagcacctgggcttaagctttaccagatcaaggttatttcgtgatttattcttgtttgctgctgcttcccgttccttacttataatcgattggttcgttcatgccccccagggataggcagttaggtgcgtaatgtgttactactaacttaacgcattcacttctatgatattctaagctgttttgcttccacacaattatttgttctatggttgattcggatactttgggaaaacgcatactacttcgtatgaatttcctagcaatgttactaccatggagagcacatacatgagtcatcaatttacctatgacccccttcataattctaatagcaataactcctgatggttggtacccttctccatctaccgagattctcgatgacaaggcaaatctagtgccattgtgaatgataactctcaaaggcatatatgacaactgacaagaatataaaaaattttagcaatttaggaaaaaagaaaaatagaaacaaaagagagagccatagattttcagaaacatttgagatactctgtcaattttatctcatcagttagcatcatctaattattgtagtgagtgttgagtcaaccgatgcatggccatttgagagttaagctagtggattttattcatatatcctatgcagttattcgtagctctcttgcatggtttttttatgcataattgagttgatccaaactggaaagcctagagagaaactgtaagatgctgtgacagtgttattgatttggagctgtaaatctgtaactacaccaccacagtttcaccatttcattatggtgagctgttcctactttaattttctctttgccttttgttcagttatgtttatgtgtttccttttatggttgggaaatttcatgctgcgttgtaatctttcaagttccaaatggtttgtttcaggtaaggaacatgttggacaacatgttagagaaaaaccttgaaatagtcaaaactacctgttcgaacttggccgatcctatggaaacagatggagggataaaattatttaaaaaggctccacctggcatcagaatggatgccatgggtaagtgtcgaacaacaagtattattttcaacaatattattgggtaagatctcttgtgttagcaaaacatacttaactgtatatttccagataaataccatgtgcaactgaagagaccaagaattctgcctggaacagatatcgatgagaaatccaagaaggttggatagccattatcataatataattataaccatgcttgaagtttttttgtttaacttataatactattgttccgttgaccatgatttcagttcaggcatatgcttaagtctgttgctgttgatggcaatgatatacttgtttccgcaaagaaatcatcagaaagatcattggctagattggaagcaagagaagctgcagcgaaggcagcagccaagagggaagaagaaagggtgcgggaactgaagaagactaggggagagaaatggcttccttcaattgctagacaaatgaaggtaagaccaaacataaaatgcatactgtaatatgttcttccagagaaaggcccgggggtcttccagctagccggcccgggttcgatcctcgctcttcttgataaattccaatatgagagtccctcattttttatctagcgtaacatgttcttccattgatagtttggtgggattaggatgggaatcaattgatatttgagcggctcttctacacagactatgcaatcacacactgaattgctcctctttcttttccctgcgcaggaagaaaaagcttgggagcaacggaagtgatgatgccaccatcatatcaataggggtacctgtgctaatctctgatgccatcatcggcacttcggcagtgaccttcttcactttctgtctatgacaagggacagtagatagatcatagattaatggatgattttgcgtagctgataattcagttctggatgtcagcattgctctgatccctatatgggccttctttgtagacaattttgtattgtaacattccaggatcttgtgtgatgaaagtagcgtatgtatgcattatttggatatgaatctaaaaagcttaaacaactatagttttgtctgaagtttagaaccggaagaaagtggcgagttgtcaccagcagtagcttcaacgaggctggccaattcagcccatgggctgcagcttgtagcctctttacggcccaaccggagccctcccttgccccaggatttctccgcttccctcgtcccccaccttgccgcgccgtcacaccgccgccgcctcctcgccatggacaccccgccgtccgccgccgccgccaccgccaccgccgttgcgtcagactctgattgcgactccgcgctcgtcgccgacgtggcggaagcgctcgtgtcggcgtcccgcctgccggagccgccgcctatccccgccctcctcgccctctacctcccgcgcctcgccgcctcccaccacccgcgcgtgctctccctcgccgcctcccacccggggctcgcctcgccggacctgctcctcgcctaccgccgccacctctcgccgccctcctgcctcccctccctcgtcccgctcctccccgtcctcccctaccgccacctcctcccgctcctcctctccttcgtcccgctcgacccgcttcgccacctccaccgccacctcctcgcgcacctccccacgagtcccctcgccgatgccgcgctctccgcctacgcccgcctccgcctcccccacctcgccgcccagctcctccactccctccgccgccgccgtggcgttcgcccttccctccaggctgccaacgccgtcctctccgcgctttcgcgcagcccatccaccttgccgcaggcctccctcgatgtcttccgctccctcatcgagctccgcctccaccccaaccactacaccttcaacctcctcgtccacacgcattgctccaagggcaccctcgccgacgctctcgccacgctctccaccatgcaggggttcggcctctcccccgatgccgtcacctacaacacgctcctcaatgcgcactgccggaagggcatgctcggcgaggcccgggcactgctggcgaggatgaagagggacggcatcgcgcccacgcagccaacgtacaataccctcgtgtcggcgtttgctaggcttgggtggattaagcaggcgaccaaggtcgtggagtccatgacagcctacgggttcgagcctgacctgaggacgtacaatgtgctcgccgtggggctgtgccaggcggggaaggtggacgaggcattccggctgaaggatgagatggaacggctcagcaccgcgttgccggatgtagtgacttacaatacacttgttgacgcctgcttcaagtggcggtgctcatcagatgcattgaggctgcttgaggaaatgcgtgacaagggggtgaagccgactttggtcacacataacattgttgtgaagagtctttgcaaggagggtaaattggaggaggcattggggaagctggagaagatagcagaggaggggttggcaccagatgtaatcacgtacaatacgttgattgatgcatactgtaaggctggtaatgtcgcaaaagcattcacattgatggatgagatggtcggaaaggggctcaaaatggacaccttcacacttaacaccgtgctgtacaacctatgcaagatgaagcgttatgaagatgctgaggagcttttgcattcacccccgcagcggggtttcgtgcctgatgaagtcagctatggtactgtaatggctgcgtacttcaaggagtataatccggagcctgctttgcgtctgtgggaccagatgattgagaggaagttgataccaagcatttcaacgtacaacacgttgatcaaggggctttgtaggatggagaggctgaaagaagcaattgacaaattaaatgagctcgtggagaaggggttggttcctgatgaaaccacatataatatcatcattcatgcatactgcaaggaaggggacctagaaaatgcctttcgattccacaacaagatggttgagaattccttcaagccagatgttgttacctgcaacactttgatgaatggcctttgtctgcatgggaagctagataaagcattgaaactctttgaatcatgggtggagaaggggaagaaggttgatgttatcacatataataccctaattcaatcgatgtgcaaagttggggatgttgatactgctttgcacttctttgatgacatggaggtcaagggattgcagcctgatgcatttacttataatgttgtgttatctgcactatctgaagcaggaagatcagaagaagcacataatatgctacataagttagccgatagtggaaaattatctcaaagctttgcttgtcctctgttgaagccttcttctgcggatgaagcagatgtcaaggaacatgagggtaaacctgaggcagaatccagtgaaaaagcacaagacaatgctctggagacatacatggaacgcctaaatgggctatgtaccggtgggcaattgaaagaagctaaagccgttttggatgagatgatgcaaaaggggatgcctgttgacagttcaacatatataactttgatggaagggcttatcaagagacagaaaaggcaaacccatgcagctggacagtccacactatagatttttgctcccgtgggatgcgggcatgtgacatcattagggctttagtcataaatctggaaaactcaagtgcttggctaccaggattaccatcatggacaaaaaaaaaagaagtcggtatgtcaacattttttttctgcagtcagaaccttatatttgtaactttcagtacaaagtaaattcatttttagttttttcactgcacgctatgttaaatgtataaagaataccagcagtgatttgaatctttttttgctcctggtaaaatagtgtagcttctagattccctccaacataaaattgttgagcttctacagaaaaatatataatcatgtgcgagttcttgatcataacctattaaatcctaaccacccatccatcttcaacagataagaattgaaaattgtcgatgactatacttagtaaaacaaagtatcttctgtgatattgtaaaatacatcttgacaatacggtccatgttcaaccaatatatatgtcttaatcaaccttgtaaaccataattccgtgcaatcaggcatttactcttggaccttctctgcttgaagttttcatagctgtcacatatgcttgtgtgattccatcagcatggttgagacttctgttagttttcatgaagtatgtactgggtagttggacattcgggcaatgataagtttactcattatacaatgacatccaacagactatagtttcttttgcagttgaaaaaaaaaagatagttacttgcatctattggctattgatgaagtgatgaaccacagattcttatttgtggtacagtgtgatttttttttgttcttgtttgtgaggaaaaaaactgttgtagaatgatgtgcgtttttgctgttcaatcgtgtttatttgaaatatgtttaaactttttttatattcatttcctactagtgatgccttgcctgaattcagaataatatgtttcgacaatgggtgtctatacacacacatatgaagtatgccttgagaaatgttaaaagttatgtaaatgaattgttttaaagttgtccagaccataatttgtcattgtacttaaatatatttggattgtatgttcttttagtcagtggcggagccaggacccagcaacctgggcaggtgcctgggctccgtccaacgcatgcatgactagtaacctaattaccatgcatgcttagctagtcattgtcccagccatgtgtagcagtagtattatttaattaccatgcttaacaaaatagcaaaacaagtgcttgaggattgtcaattttacttgcgtcattttgtatggatttatttgtactagttattcatcaatttttgttagccttgcctcattgcccaggctgaagataatttctagatccaccaccgcttttagtaattttcttctatatttaggtttatactctactgttcttctgactgtgttaagcctggtatttctaaggctcatctctcaactagccaccttgatgatcctagagaagttgccaggacactgcacttcccgatattgttcacccagaaccatctcagggctttattctttcagaaccatatcaagatcttagtcattcagaaccatcttaggatcttattcatacggaaacatctcagtgacttgttaattcagaaccatctgaacataacctcgaagttcaattgttgctgcctctggagctcctggacgtgttgtgcaagcattcataatgtaacaggagagccctggagctcaggtacttccccccaaatttttcattgctaatttcaatagagtcaactgtcgaggcaagctgttcccataatttgccggtttcaatgaggattaaatgtcttttattgacattaaagtttcgtaaaaattgaaccctattattagaaattcatatgcaacttaaattgacattgagcacaaaaattctagtcttcaatgcaacctcttttatgaacagaacaccttgggaaaaacactctcattggatgcttttaaagggaagaaaactccacacaaataattgttcacttaggtgcctaaaaattttgtcccctgagtgcttttaccattttatgttagtttggtccaagtgcaaaatttgttccttaaagtatccttgttgtactgcaaacatttattctactacttaaatttgaggttcttttctctttgaaggcttttgtaacaattaattggaatgaacgtttggagcgttgattgcaggtcgtagaacgtttggaa

SEQ ID NO: 9521 - DNA, 45097 bp, Oryza sativa
ttgaataagacgagtggttaaacgttacaagtaaaaactcaaaatcccttatattataggacagagggagtacaagtgtacgagtatttcaattcgtctgagtggtgaaaggtaacttcggtgaccattttgggatgagatcgggctgtttacattgcatattgcaaaacttggaatatttttatttgcacttgggtatggtgcttccttgctagcccttaactaataattggatgaagggatagattatacatgaacatgtttgtacataccaggagcgaattctgaatttgcgtgtaacttttgttattggtacaagatatccatcgtgttgcaatgccactgtttttctttaaccatttatcatttatgggtcacattctcaaaaatttctttgaatgacctgtccaagtatgattggtgttaacaatttacaaactttgcgtgcatgtctgttgcatacgtacagtggattatcctttggcagtatgacctgtttgtaatacacatcaatcttgaatctcatccgcatgaaccagattatagtttaactaaactatttgcattttaaaaaaaaaaactgcaagggaagactactgtgagtaggctttcttcgtttaagaaatgaaacatcacgtcaagtatatatgtttacccaagtaaagaatgctggaacggcaacaaatgggagagggaattacactcccttttttcgctcatcaaggaacggcaacatgatggagacgataatatgatatcatgatagcaacatgcttgggcccttcatttctccattggtgccatctcctaccaactcgccatgaggttttggccgtttgtacgcgcaagcatttcgatgccgaatcacgagctgatcagcctgggagtacgctttccggcaagcatcagggaaaaccaagccgtataagttaaaaccgagcgcccagctgaacctgacccagagattcacatgacgatcgacgagatccatccatcgctagaacattcgattgcaaatattttgggcggttggtttaagtttacccgtgcacaggcaaggaaagcttgtgggtctcaacttcgacttttgtgtacacacacagccatggatggcacatatactcactctcaacctgttgccaacacaagcacagttccctattatactatattcagtcaagagtgaaggacactcagcccattttagaacctcagagattttaagaagtagctgagacaaatatgaaaaagctgagttctcagcttttaactttcagtttattttctaaaattcatacccataaaggttctaggaatctagactaattcgaagctaaagattttctaaaaaagctacaactgcaagaaattaccatgtaaacaaacaagacgtcactctgcactgtaggctcccagtagatgatacagtccctcatgtgatcgttaaactagttcagagcccagaatccggagttctgggattaataacaacaagccaaaatctcataacacagcaagtgtgcagcgcagctgcaggccatggccatatacaaaaaccaaataccaaagcatcaccagggccggatgcctagctttggcagcagcaagtcacactccgtaggcagcagtagcaaaataaccaatatactagtagtactagtagaaaatgatatgaaacggcaagtgtcttgtgtgggcgatcgccaagtcaagaccctctcttccacgcttgcttggcaatctcgctcgcgtctccctcccgtgcaggcatgcagcaagccagcagttagccggtgagcacaagaaacaagcaaatgcaacggatatcctactaccacctcagttggccttcacctcttcgtttcctatataaatggcacagccacgctaagatcattccagtccaacgtaggaagagcagatgcatatatggtctcttcatctcctcgacctagctagctgcttctgttaactactgagaggagttagcaagctatagctaatcaagagtgtgctggttttgttcgattctgcagggtaatgtgctgctaatgtaatcagtttaagatgctcacatgatgcaccaagacatgacctaagctagctacctttgttgctttgcattctgccgttattttcggcaacttattgacgtggattattaattgcatagaattgtttaagaagttgtgttgttgatgcttaccctgcagtgtcctgggagagacgatagatatgaaggttgatccgatggggaaactgttgttcttgcttgcatggattactctcttgcaaggtaataataccagttcttttaactattcctttgccctgtttaattagcttgcaagtgcagtatcatgtcacaccaattgtagaggttttcatatatgctttggaactttactgagcgtcacggtcatgtacttaaattattatatatcactatactctgttgtaaatcgttactgagatatataaattaagctacttctgaatttgtctgcaggttgctgcatggtgaaatccttttcttacgactactcatcaagcattgaggcaagtcgttctctaatatgatctgtaactgttagtcgtagtacacactgtacactagctagtacttcatctgctacatgttatcgacgaatgtatcgttggccggcctaaggcatcgacagaaattaattatattcctgcttagattagcgagcaattaatctcgcgattaacaattaaaagctagctcgattgggatgacaatagctatatcacgggcgggagtggcggcgcgatatgttaattattacgattatcggcctcacgcaatgcgtttccggtgcgagttagcatggaatttctttcttaatttgcccgtacgtacactatatgcttttcagtaccatgcacgatagcggcggcggcggccggcgcagcgtgtcatgtaagctagctccaaacaaaatgcacacatcattaatcatttatcattatttggtttttttgactataatatatactctctcattccctaaatgtttgacgctgttgacttttttaaacatgtttgaccattcgtcttatttaaaaacttttataaaaatatgtaaaactatatgtatacataaaattatatttaacaatgaattaaatgataggaaaaaaataataattacttaaattttttgaataagacgaacggtcaaacatgtttaaaaaaatcaacggcgtcaaacatttaggaatggaggaagtatatatcaatatatgtagttatatgcaccttttctctttggtccattcttgtgctcttcatcattttattttcttattgtcattagtttgatgatcacgtttaggtatgcttcagatgtgtctgcagagcaagcaaagcatctctatgttgccgagattagagcagcatgcacttttatgcatgcttagacaaattaataaagttaattaattaattatggcgtctgagtgtgtgggcttgttcggtacagtgcttgcctgagccgccggagccccagtacggcggcggcgtcgtccggaacgccgacttcagcgctggcctccatggctggtcggccttcgggtacggcagcctcgccgagggctcgtcgccggcggggaacaggtacgccgtggcgacgaaccggacgcggccgtaccagagcgtcagccagaaggtcctcctccagaacgacacgcactacaccctctcaggtctggtggtcaagaaatcgaacgtgtgaaattaatgtgtagccgtcacgtctcactttgtggttttccatgtgcatgcaatttgggactgagacgtcgcgtactacgtgcgtgtgcggtgcagcgtggttgcaggtgagcgacggtgtcgccgacgtgcgggtggtcgtcaaggccgccggcgacttcatccacgccggcggcgtcgccgccaagtccggctgctggtccatgctcaagggcggcctcaccaccgtctccggcggccgcgccgagatctacttcgaggtaactaattaatcactttcactccgagttgatttaattctttgcaaatactacggagtacatgcgaacgtgacgcgtgcttgcgtgcagagcaacgcgacggcggacatatgggtggacagcgtgtcgctgaagccgttcaccaaggaggagtggagcaaccaccgcgacgcgtcggcgagcacggcgaggaggaagacggtgaggctccaggcgacggactccgccgggaacccgctgccgggcgccgccgtgtcgctggagaacgtccgcaacggcttccccctcggcgccgccatgagcggcgagatcctgcgcaacccgtcgtaccagcggtggttcgcgtcgcggttcacggtgaccacgttcgagaacgagatgaagtggtacagcacggagccggcgccggggagggaggactactcggtgccggacgcgatgctggagttcgccaggagccacggcatcgcggtgcgcgggcacaacgtgttctgggacgacccgaaccagcagccgcggtgggtgcaggggctcccctacccgcagctgctggcggcggcgtcgcggcggatccggtcggtggtggcgaggtacgccgggaagctcatcgcgtgggacgtggtgaacgagaacctgcacttctccttcttcgagcgccgcttcgggtgggacgcttccacggcgttctacgcggcggcgcggatgctggacaccgggtcgacgctcatgttcatgaacgagtacaacacgctggagcagccgggcgacatggcggcgctgccggcgaggtacgtgcagcggctgaagcagatcatcggcgggtacccgcagaacggcgccggcatggccatcggcctcgagggccacttcaccgcgccggtcaacatcccctacatgcgcgccgccctggacaccctcgcgcaggccggcgtccccgtgtggctcaccgaggtcgacgtcggcggcggcgcgtcgcaggcgtactacctggaggagatcctccgggaggcgtacgcgcacccggcggtgcagggcgtcatcctgtgggcggcgtggcggccgcagggctgctacgtcatgtgcctcaccgacaacgacttcaacaacctgccgcagggcgacgtcgtcgaccgcctcatcaccgagtggagcacggcgccgcgcgccggcacgacggacgccgagggcttcttccaggccgagctcgcgcacggcgagtacaaggtcaccgtcacccacccgtcgctcaacacctccgtgtcgcagagcgtcaaggttgaaatgggatcagggagccactacttcatccaggtctaagctctagctcatcactcatcagctagacagctacccgatgatttcattcagggctttggaaatgatcatactggtcattcatgcccgttagctgtatctcttcatagtatcaagatgcatgtgtagtcgaaattctgcagcttaaatagcctaatagtacccatattagccattcatgattcatgtaccaattttactctgaaaaattgcagctgaattgaaatggagctacacaaaagggaaaaatatagcctaatagtacccatattagccattatgctaaacttttggagtctcttgtactcatttccagttattctttctttctcgctgaaggatttcagcaggtttgctgtagcttggacggccgatccttttcccatggccattagcgtatgattgtttttctatcgagatgacatcatctccggtcatgattctgacttctgttacatttaatcaccaacaaagagtatactatttcaaattgaatcatgatcctataaaaaaaatagaaaaatgatgtcatccggaagcaaacaagcgaagtcacgagcagaacacggacaaaacaaaaggcacagcacacccaaacttccaaactgagttgccatgtcgcgttcaatccacacaccacaactacgggagacatgacgtaaacacaatatatactggagataatctagtgatttttatattaaaatccattacaatcaatatttcttttagcttgcataggcatgctagtgtaatctaccatagaatgaactgtagtgtagcaatcgaagttcacgtgatactgtaagggcattgacattgaaacaggaagctgacaccttctgattcagaatatgaaaaagaaaagcacaaacaacaacctatattctggtacagcacctaactaagcaagaagccagatagataacaaagggactagtatttgatggtaccaattttatgaggtcaacaagttgtcaccaagcttcaacaaagccaaacttgccgagcaccgctgtcgtttcctgccttgaactgcatttgaataatgtgtaaaacatcccatcagtacattgtgtaaaaaaacagacccatctctcgattttccaagggattcaaacggagttttgaataattggcatcactgttattgctcttaccttccatctctcaatatcttgtagactcctggtgttattaggtccacaattgttgaaccagcacgcccagaagggaggattccaccatcaaagacatatgaacaatgtggccacagatcctcaaaatctttgacgttgacactactaggatgcccgcttaagttggcgcttgtaagtgcaagcgcacttccagcaccacgggaaatggctcgaatgaaatcaaaatctggcacacgaactccaatgctttccaaaccaggattaagagatctctccaatatactgttgttacctaaatgtaaatgaatgaagagttttattagacacattatgctgcttaagaaaggtgcaagatagaagttttgaagcataggctggtgtccacacctcgttttaaaacaactgtgacaggcccaggaagtagactatcaagcaggccatgaggtaggtgatccacaacagcaaaccgtgatatgtctgggacatcagcaacacagattgcaagaggccgtgtctgtacgcgtcctttgatctcatatatacgattaactgcttctgcagagctgtcatgaagattgagagacccattttaaaaataaccaatggatgaatgcagccaaccagtcagagaatctccaaaaaagtaaacctagcttaaaatgaacaaagtcacgaaacattgcttccaaatctaaatgaaagtgagattcaatagtaactaatgaaagtttctgaactgtttgtgaatattttttgtacatgactaatttagatatgagcacacaaactcctcataactagaatctggatttactgatcagagtttcttttcaggggttggccttgttagacatctactcacatcattgcagaaggtgttaaattggagttaacatgagaacaataggacaacaaagcaaatgagaagaataaaattcttggcacaaaatgtacttttagtaaaactaaccatgcatcacaagcaaagccataaatcgtatcggtgggcaccgcaatcacttgccccctgttaattgagtcaattgctttcatgacatgatcatttgttgctggaaggatgtgttctgccgtggcttctattcggtgtgtcttgtcatctgacacccttaccgagcaggataccacagacttcgtctcatgttgagatgataatctgttgaccttaacaaaactgagaaaaacaagtgtgtcagtgcagtaatctgaataaacattttaaccaaagaaatacacagttctcccatgtgccaaaagagatttccatacagtatgaaattttacatagcaattaacaagtgtgctgaacaagataatatatacatcaagtctcaaggaaccatgtcaaattgagagcatcactcaattgcattaacatatatatgaaaaatttgggagaaccacggatggaatttgtgtataaaccccaaagttcctcattactattgcaccacagtccttagcaaaccaagaaagccccaaatttgttgaagaaaaataaaaaatcttatgtgcagatacaatttacagtaagtagcattgtgaagtcggtactctgattatagcaaattcaatcatcaaaacatcctagatgttcacttcttaccattagtattaaaagacaattcgcggggattatcccacatgaaaaggtattatacaagataattcaattaaatatacaaacactatctccttttgaatgaattggatgaaaaacaagagtacaaacacaagtcgtttgggcgaagtaaataagtagtagccagtaattcaacgtccgtggaacaatgtcaagattctagaattagaattactagcatgagaagtgcaaattctagcctttttcacaaataaataaaagatgtttgaacaaacgaaagcttagtatatttctagggagcgagcaaacaagaacccagagtaacgaagaggggatacctccgagccaggggttgcctggcgggagcaccgaccagggggagcctctcccccgctgccctcgcgcacgccttcatctccctcctcctcctcctcctcctctcccccgccgccggccaccgcgaaagattacgagccgcggagcgcgacgccgaggcggccggagcaaaatttctcccggagagagaggactagtcaaaccactaaacaaaaagacggttttactgtatatcatccgagcccgacgcggggaaagggtctctgcctcagtgtctcacagacaggtgggccccaccccgctcctgccttctaggaggggctgttccgcgaggaggcgtaaagtggaggggctcttttgcaaaaagataacggaattgctatccttccgtcgatagaaaatactacatccccaaatcttcgggattttggatcactgaatgtgcttcgtgattcgtgctcagttgtttcttttccaactccggcgtcctcctcttcttctccggcaccggcgacagggaagacagctgcgcgggacagctcgccgccactggcttgaggaaaaggagaggagagggagggggagggggactcgccggcaccgttgacagttgacacctttcggccagccggcgaggccggggtggcggcacggtggggcgtcggcggcgcaggaagcgcgcggtgtcgagactcgagaggaggagcgctcgagcgctttgtgcggcggcagggaggaaaaaggaaaagtggtttagggttttgtggattttgcacgaatctcaaaccaattcaatggtctaaaatttgcaagatattaggaggggttttctatcaaagattaaaaaataaactcccccttcgcttctcgctagggtttaagccggcggcggcggcgaggttgtgcagatggcggaggcggccgtgaggtgcctccgggacgggcgcctcgacggggagcacgctccggcacttgccgtggcgagtaatatccagtgcggcccgctcgccgccggcgccatgctccacctcgcggccgccgtggcctccaacgccgccgcggggaaggcgcaggcgaggtattattgttgggcttcttcgatggtttgctgctttagctcggggtggtatgggcgatgacgtgagttggctccgttgcgacttgttgtggcgcaggggactggtgatcgtggcgttcgatcggagcccggaggtgtatctcgacttcatgcggcgccgcggccttgatccaaatgctttgaatcgatggtaatggtcttaacatttcagagcttacaatttgaacacaactgccacttaacaattatgatcttaactgcaaaaccagagctttgcgtatctgaagaaatttattatgctagtgcgacctctttggcaaatctaaaatttaaataggctaagttggcacctcacactcacagccacctatagggaaatgcttgagtcaacagtattcactcatattgtcaacatagcttattgatggtagaacctacataaatactgagtgctcagtaagttttagaatctttttacattgttccaacagtgtacggatattggattgctattcagacccaattggatggaatcagaagattagaagtcagcagcaacaagaaagtggtgcagatctctgctcagcgaacaaagagaatgttacaattttcagaaatgtgaaggatcttgataaattgatgtgctccactattgatcttggaagaggtagaagctttttgactagctacttgtctctctttgtgatcttaaagcttatgctgttgctatgaataccagggtttgcaggagaaggcaaaatctatttttcaattgctgttgactcagtaagtaccttctcggagacgtctctatcttatagtttacttggagtttggatctcccatcaataaaattttaccccatatgttgcaattatgccaaagcttgcttcatgtttttctagacatgttcctcttataatgctgtatcaattgttgtcaagctgttctaatttggttgctgtggctggtgagtttattgaatcttgagctactggattagaaatgttccatctcaacaacaaaaaaaattgtttgttggactgtcttgcttagatctggaaataaagttaagcttgcacttttccagaaaccaagtttagtgttttctgtattgtattgtagctattgttcagcaagctgtcatttcagtacgtttggatggtatctgaaagccaaagcatgatctcacttttctccccatctgtataacaccaatatttcacacacaagtcacaagctttccaccatttgtgtcttaccatatgataagttgacattgattactctttgaaacaaaatcatctttactttaattctgaagttactttcactttcgtgatactgttttagcttttgttaatgttaacagcaagatcgtgtatgatatttcagattagttctatgttaaggcgtgcttcagtgtcatcaatttcaagcttcctcagtaatcttcggagccatggtatttactttctttccttctatttgcgtattcatggcagttggaagttggaactcaatgccaatcatttgtattaatgatgttttgcttgtacgtaacaatgatgtgttgttattcacttgatccttgaagtataaatttgtgttctcatattgcagatcaaatatcatcaatattttggctaatacattctgatctccatgaacccaaattttcccgagcctttgaatgtctctctaccatggttgcttcattagagccagctgtggttgattctgtttatgaggaagaaattccagggaatatttctttcctggaggaaaattattctaaagcaaagttttatttacgcctaaaacggcggaatggacgggtcaagcaccttgtaaggttttgacttcaatgttcaaatcattctgaatttcacgtcatgaagagtgtacactgataaatattattcctacattttcagtacgaggagttacatgttgagggaaatgatgttagatttgtttctgctccttctgtaagtacagaagtgagccaaagtctgttgcctaaggttgggctatacatttcttactcaagttaaaatactcttctgtcttcactgccaactaatctagtcttctcaacattgactgtattgcaacatgtggatttaacaggttcagttcaatcttgagctgtcagagaaggagtgcagtgacaaggcaaatgttgttcttccttttgaacatcaaggtacttaccttaccggaagttatttgccaaaagttagcttatgtttcaggtctccttgtcagctgcattctgactgcatgagctacatggatgatatatctgcaactaaattcttttaacaccctaatctcaggaaagggtgagcctatccatatatacgacggacggagatctctcccagaggctcaacaagatagcaatttaactgcatccgctctcctggatgaagtaaaatttcctaaatctgcagctccaaagggtgaaattcattactttcgtgattctgatgatgagcaacctgactccgatgaagacccagatgacgatttggatatttgagttccacccatggtgtgagcaccttatctgcatacagaatgccttgatcgtacttgcgaggtaaccgatagccccgatcagaacttataatcatgagtagtattagtatttgttacacctctgttttctgttctttacactgatggtagtgtttttgtgacaagataatagaatgatagtccgtccgtgctacacactaccttgtactgttagtgcatgcattcagttatccccaaaatgtttaaaaagtgtttacatatgcaaaacagcaacaaactacaatttcttggggaaactaaaatggaagcaggcgaccttttttttccctttattaaaggatggtagacaaggaaagtttttatgagaactatgtaccgtgctgattaaattctctcatcacagagtccttacaagttacaaatgaaatgtaagcattggatctacgtatatatataaaaaagttactagaatcactaaaaaaaatggaaggaaatgaagtgacaatgcaattagcctagaactagaaaaaatagcaacattgtgaccaaggaaacgactgctgatccagtgggcagcaaagtctagggcgctcctacaattcaaactaaatcatatcatattaattagtacgtaccggatctgagctcgattttggcctctgccttggagtcgaggtcgagggtcatgcagttctccttgaactccttgtgcttgacggtggcattgtactcgccgtggaagatctccacctcgaggacgcccttggagtcggtcttgccggtgtggccggccgtccactccttgaggagcttgtcgatggcgtcgccgacggggaggttcttgaagctgttgtctgtgaagcacatgacgtagcatcccttggcgtgccacgccccccagagcacgatgcccttgacggccgggtgcgcgaacccttcgcgcatcacctcatccaggtactccacctggttcttgcagggcttgacgtccacctcggtgagccagatgggcaccttggcctgcgccagcgtgtcgatggagccacgcatgtaggggatgttcggcgcggcgaagtggctctcgaggccgatgccgtacttgaggtcggcgttgcccgggaactcgcggatctgcttgagcttggccacgtacttggtcggcagcggcgccgcgtcgttgggctcctcgatggtgttgaactcgttcatgaagaggatgggcttgctgtcgagcttggccacgtccctgaagatctccgccgacgcgtccttgccgagcttgccctcgaagaagttgaagtggaggttctcgttgacgacgtcccagtggatcaccttgccggcgtagcgggtgacgatgtccttgagccgcttcgccatggcctccttgagctccggcacgcccagcttctccacccagtccatctgcttgtcctggtcgtcccagaacacgttgtggccgcgcagcgtgatgttgtgcttctccgcgagctccaccatcttgtccgaaaccttgtagtcctcctcgttctggtggaactccgtgctgtaccacttcatctcgttctccagggtcgcgtaccggaaccgcgccgcgaaccacttctcgtactccggcatgtccaggatctccttggtcatcgcgttccccagcgggaaccccttccccacccgctccaggctcacgtccgcttccggcaccggcttgccgtcggggcccaccaccgtgatcttcaccttcttcatcctctcctgtgtcaattgccaattaattccaccatcagtcaatgttactcttctccagctctctgattaattcttcagcatcagcagcaacgacatgatgcaatcgagttcatggtgcatatatatgcaccttcttgacggactccgcgcgatggcccttccattcgtcgaagctgaagggctgcagcgccatcccttccgccatcacctccgccgtcacgttggtctgcatgcacacaaaatacgctgttcattcccgttcattcctctatccgacttaaacagctagctgctcccttcgtcccaaaatataattgattttcggcagatgtgatatatcttaatactataaatctgaataagctctctcatcagatttacagtatagaatgtgtcacatccaacaaaaacctcttatattttagaacggagggagtatgatctactctcgtcgcgtggctgatgacctcgaagaagatgtcgcccttgccgtcgtcgtaggaggtggcgccgcccttgagcatggtccagcagccgcacttggccgcgatcatgccggcggtgttgaacttgccgtcgggggtcaccagcacggccctgatgtcgccttcccccttggagagctgcagccacactgcgtatgcatgcgcacgacgatcaagatcagagcgaaagagatcatcggtctaggagtcggctagccggcggccgttaccggacaaggcgtagtggtggtccttcttgaggtcgaccttgagggcggagcccttcaccggagcggcgctcttgctattctccgacagaagcttcttgccgctggcataccccttagcctcggtctccttcaggataccgccgccgtacagaggcttctccggctccttcacgcactgcacgcaaatatttgcacttcaagaatcgatctcgtcctttctcattgcatatcatagtgtacataagtgaggacgaagaatgtaacccggcaaaaagaggacgaagaatgtatgtgtcacttgcctcaatgtttgctgagtagtcatatggaacactttgagatctgaccaagcatcctgcattcgttgacaagagaggcgattaggcattagcatcttgatcttgatcatatatatatatacgcaggcgtatacggatttgacaacggcaaaaaaaattaaatgctaactgaagttctctgaaactgaaacggctggaagtctgaaacatgtttctagtcacatggccaagtgccaagtctgtgtgattacgacaactgatggatttcaataaaacagtaatttaaacagtagcacatcacattgtttgcaattgaaaggaaaatgcaaattgaagcgatctaattgaaagacccctaaccttcgaagaggataatggccaagaaaaagaccaacttccctgtgaaaaccttcatatatatttctctatcactgactacgattaatccgtgacataatgttgacatttctgcttatatagctatgggatgagagaacatcggagatttaacagtctataaataggaggaagacagtttcacatgtagggaggtaattaatccacaatgtttagtgccttaaaaatacattcagtttagaggatcaccattgatttccctagctttagctgcactccaactagtggttctgctttgtacttgatactccatagaaaccactagagtttaacagtttaatcgttggctttagcaacaaaaaaaaaattataggtaaggactcttatatcaagtatccttagctctttaaaagctaatgttagaaaataaactatgataataaaaactcaaattaactctagtttcgaaatttaaattttggctgataagccgattggaaaacgatggtgcggcaaaaatggactctcttaagttttaggatgagcctaaaatccatttagcatttctcgtcgtctttctatacgatgatgggaaacaagaacatgcagggtagactagtctcaatcaagagaagtatgtatataaagaagaacaaatggaatttcttcttccttttaatatgaacatccaatcaatcgcctctccaggaatgataaatcaatccatgggcgcatatgaaatcacacacaacaatcatgcacatggatacgtatacattgagctaataaattgagctaatagctagctagacgtgtatggtgaactcgttgtcggactccctgtcgacgctgaggctctgcgccacggtggagttcgccgccgggtgggtgacggtgaccttgtagtccccgtggaacagctcggtctcgtagtagccgtcggcgtcggcgacgccgacgtgggagcgcgtcttccactcccagatgagcttgtcgacgacgtcgccggcggggaggttcttgaagttgttgtcggtgaggcacatgacgtagcatccctgcgggtgccacgccgtccagaggatgatgccgtgcaccgccgggtgggcgtacacctcccggaggatctgctcgaggtggcgcgcctggtcgggccccggcgcgacgtcgatctcggtgagccagatgggcgcgttggcctgcgccatggtgtcgagcgcggcgcggatgtaagggatgttgggttgcgcgctgaagtggccctcgaggccgatgcccatccgggcggcgttgccgttccccgggaacgccttgatctgccacagcttgcggaggtacttgccggggagcaccgtcaggtcgcccggctgctccagcgtgttgaactcgttcatggacatgagcgcgccgccgtccatctggtgcgccttgcggtagaacgccgccgacgcctcccacccgaaccggccctcgaagaagtcgaagtggaggttctcgttcaccacgtcccacgcgatcacctgcccggagtaccgcgacatcaccgacttgatccgcttctccgtggcgcggcggagctgctcgccggagagcgccttcacccaccccatctgcgtgctcgggtcgtcccagaagatgttgtgcccgcgcaccgcgatgccgtggctcttggcgaaccggagcatcgcgtcgggcaccgagtagtcctcccgccccgggatcgcctccgtgctgtaccacttcatctcgttctcgaacgtggtcaccgtgaaccgcgacgtgaaccaccgctggtaccccgggttggtcaggatctccttgctcatcgccgaccccagagggaagccgttgcggacgtgctcgatgtgcatccgcgcgccggcgaccgggttgcctgcggcgtccctcgcctggagccgcaccgtcttcttcctcgccttcttgatggccgccccgtggtgcgcgctccactcctccctcgagaacggctgcagcgacacgttgtccacccatatgtccaccgtcgcgttgctctgccatggcatcacaccattgcatccccgtctcgtcagaaacagagtaatcttgaattcttgattgctatggcgatgagatcgatcgattcgtttacctcgaagtagagttcagcctgcccggcggcggcggcggtgagcccgcccttgagaatggaccagcacccggacctcgcctcgacgccgccggagtggatgaagtcgccgccggccgtcttcacaacggctctcacgtcggcgatcccgtcactaacctgcaaccaagctgcacacgagaccgagcacaaagcttccatgagctaccggaaacaacacggcgaaggaagaacaagacggcggtggttcttgtcgccggacggacctgagagggtgtagtgcgtgtcgtcctggaggagcaccttctggctgacgctctggtacggccgcgtccggttcgttgccacggcgtacctgttccccgccggcgacgagcccacggcgaggctgccgtacccgaaggccgaccagccctggagtccggcgctgaagtcgccgttgcggatgatgccgccaccgtagtgagcgtccatcggctcaggcaagcactgcagtccatagcttcattgttcagctaaacaaattttaccgaaggtaacaaaatagtaatagttgttcactgtggggaaactattctaatctctcgaggggatgttccctcgtttgcttaaaaaccatctaaacggttatgaaaaattctgaaaaaatttgacaacattcatacaacgcatatatgcaactctacaaaatcttaagtccaaactcaactcacacgtcgagatataaaaaagacaaattcagcgtatgaatagtagcgtactgtttatatctaaatttgtcttttttgtttctcgatgtgtagatcgaatttgaacatgaattttggtggactagtaggtatcattatactctatattgttaattttttttcagaatttttcacaattatttgcatcgaatttgaaagaaaaaggtatatgaggggatatcccctcgagggattagaatccactcccgttcactgtgataaaggaaatttgtacagtaatcaagattaacgaaatacactgttcataaatcatttgcacaagaaaatgtaaaaacttcagagaaatgttacagaagcagtggtggtttacactttacagcgtggtaataaccgtcaaaactaccaaaggatcctgtcaagatcacagtaaaaggtaatactaccaaaaggttatgtacggttcagacttcagaactgtacctatcaagatattagtagcagtaaccgtcgaccaaactagcatgagaacggtatggacatgccagattttgtttggtacggtatcacccaggccaaagccaaaacctacacatatttggtcttccacttgggtgcggtaactaattctgaccacaagctgaacctatcacaacaaaattctttgacctgccttcaaaagtcccaagtgacggcacctatatgtctaaccctgcagctaacataagactacccaaagaaaaaagttcagaaaagacaatggttaaagctaattactcgggaacagtacaaagctacttgtttggaagcatttgactttcctatcctggccgggcagtttcactgtgcagggtgatgagacagtcagaacagaggacaacacagacaacatcttcaccaaccaactaatcaagtaccaggagaaaagttagcatcagcgcatgatttgcccaatacagcgtgtggcggacaatggggtacacacgccctcctgctcgccgttcgccggaaaaaagctacccctgcaaactccggcacgctttgaccggctccatgatcaagctgctcctggtgctcataacgattctttccaataaaaaagatcgtgttcacaacaagcacagataggtgcgtgattgggtcgggtgcgttgcacgatgggttctcagttaggctaactgcagcatgtacagttcaaagacgggagttttgttaggctcgaattgaagtggtaaagaagaccgatttggaagtttggattggatggtgaagggttgaaacgatcgagccagaccgatagatggacgtgtgtggtgaggttctccaagttcggtgtacgaggaactaacttttggtttttttctgtggcaactggctcggttttgggaggcttttgaagaggctttcggttcttggtgtgctcctcacagattttttttttcttttgttaagtgaggtatcttgcagctgaaacatgcaagatttcatctccctcatgcttgtttggtctgtttccaccatctaccagatgatcaatggttaattaaacttcagtcatattcttgctcctaattgtagcttcgttcacattagcactaaacatgtcagggaggccctgcctacgcaaacccaacatgcagaaggtctcgatggtgactggtgagtggggtgaggccggcaaagatcacacaaaggcaactgcaacaacaagaaggaaaaaaatattccggcatatgtatgcatggcccgcatagcgcgcccacacttgtgtcacctgtcagtaacaaatcggctcgcccaactaacgacggccggtgttagctgcacatactacgcttgcatgatcaaaaggcaggtcgatcgaattagtgcaatctgatctctgctggctcagccaactagggaagcaactaagcaatcttaatcatagtattaatttgttgcactggtctgagcagatcgaggttgtgtgcaagcagcagtcaacagcagctggtggtaccatgttccagtggggtccaataactatgtgaccaacagaggttctgcatgacgcatgagctgtgggagagtgcgacgcaaagaacgaccatgctcacattggtaccatgaagcatggatttgacgatgataatggtgagagagaacgagagagagaggctgcatacctcagagcttgacgagtagtcgtaagcaagcggtcgcgccatgccagaagccgcctcagcagctggtgaaatgaaagaaacgcgagcttctttaacttaactatcctaagaacaagattgcaagaacatgcaaagaaggagagatcgagctccatgaccatgaatctgctacgtacccttcaccacgccggcgacgagccacgccaacaagaacacagcgcttgccctcctcctcatggctgaatcccgcccggctccctcccctgcccctcctccggcaagaaaaaaacccacgatgtttcgcacaagcgagagggaaagagagagaggtgcagcgagcgcgcgagagatgttgtaagctaagctaggcaggcgcgccaactgcaccgtcgtctgtgcatgccacggcgtctgcgtgggctcccacatttataggcgaggcagagagaactaccggtgtttgcctgtggctacatgctcccgcccgcgtcgcgtctcgcgttgcttgttggttgatgttggaacggaaaacgactcgatggcctcacccacgatgggatcgatcgatcgctgacgcgagcgcggctgcaatgccgtgccgtacgtgcatatggggttgcgacggcgggcgggcgggcgcggcagtttcgctgcggctgcgagagcgggcgagccatatgccagtggctgcgcactaacgaactcactctgactcgcttctgcggttcgctcgcctttttgaccatccacggctcgaccgagttcaacggacgcgcgctgtgtgtctactgtctctgtctagctccacttatctcgaccgcggccatccatgcggtcgacttggtgcaaagctagtagtgttcggttcaacgttcggtatactagggacgaagaacatgggagtgttaattaaacggtttgctaaaaatatgacggcacaattttcattcaatttcggtcactttttttcttcatatttgattgttctccattctatatgtatgcttctggtatctctcgtatatgctcttccaagcatataataaactaatacatccatcttaaaatgtaaaaaacttgagttagacacgtgtattaaggaaatatgtggagttaaataggaaaaggttgtgattgattgaaaataaaatgtaggtggagaaattaaattggacaaaattgtgattgattgagaatataatatagataaaaaagttataatattttagaataaattttaaatgctaaagttgtattttcaaatagatggagtacttttaatcctaacctttatgtatacataatttattagaaaagttacaatgtaaatatcatttacaatataattataatataaatgtaagtattttacaatataagaatggtttaactatttcttagaaatgtggtgtaataaatatactccctaattaatttgtttgaaagaggggtaattttaatcggaaaaatcaattgcaaaaggaaaaacacatcagaagaagaagaaaaaaacacatcgtaaacgtacaagcacataaaaaacctaatgtgctattggatgttttaaagagttacttccttgtttattgtcggtaagttttccaaactgctaagtttgatttgaaaataaggtacgataggttatgtttatcttgttttttataagatggtctatatatatgattggcataagggatgaaatggttgtattttttgataaatgagagggtgtggctcatatgtccatgagagaaagtgggttggattggtatattaattttgaggtatgaagctgacccgaatctaaagagaatatttattttatgggccatttcatttcatgtgtccttaactaaacatcccgaggaatatattcgctccaacctgattgatcccatccctccaaccaaacatgagcttaacgtctttttaacgtcttttgtgaaaacttcatacatcaaagttagttttctaaatttgtaataattactattcaattagttatgctctaatgactcatattgttttgcgtgtaagcgataagcctcagcccatccctccatctcgaacggagccttgtcacaggtgagatccgacggcatggggtgtgctgtaaatggacttctcccacaactcgaggctaaagagggcgccccggtggttaacaaacggccgggccggttgccgatgtgcgcaagcgctcatcatgcaaagctcccgtcgtgtggcacgcgatgccacgagacgaggacgaggccacgaggggcgttgcgcgatgacgcgcggctgctggctctcgcgcgcgtacgttggtgttccgtgggggcagctgcaacgacgtacggctggcccaggcctcggctacgtgccacggtgccagttgccacacagtagccgatctggttgataaacaaccatttgcgttccgagattagttcggcttagctccaatcaccgagttgatccggttgattaagccttttttgcgtcccgtgaacaaactgcctttgctatactaaataaatgatgagcagtggccgtatggacacacatgatagcttcagtgccactcttttgaaacggtgcgaaattttgagaaattttcacctttgtatagctactagtgtttgacactagttcagttggggcgaacaggggcaacatcagaacagagtacaatggccacgttaatgaccgagggtaatgtgtggggtgttcgatctccgacgtccatatcaccgtacgaaaccgcgcctgaagagagagagagagagagagatcaccaaaatcatcctgcggatcgtgccatgacgcgcgcgtggatacctgcgcttttgtcaacgcaacagcgacgtccccctccccgtccccggcatcccaccgatccagcagcgcacgccgccgcatcgatcgcccaataatctcctctgcttcacttcactcctacgcctctcatctcatctccttgccaatatgcaaatccctcagctcgcaacccgtacgcgcggttcacacttcacatgcaggtctgctccacgaaacacgcgaagaagaaaaagaaaagaagaggatttcctcgccgtttgtgccgtggaggcttttcgcgaccggattagtttctctctctctctctctctctctctctctctctctctctctctgtttttttttcttttttccgtgtcgtgttcgtgcgggcgagcgagcgagcgagcgggtgcgcccgtgccgttgcgaaatcttggacgaatgcacgcgtgagtcgctgaaaatggttgattggttgcaaacgccgcgcacgtaagggagactacacatggcggtgagctattggttggcttctgtggctaccagactgctgctgggattcgtggccatggattcgttcctcgtctgcagcccagacctgccgttaagttcggtacaggcgttgtcgcgttgaacggagggaagcagtttacagaaagtttctacgcgtagtagtgctcgagtcgaagtctagttgagtccgaccgactcgagatgtaagtcgaagaattcgacaagcttgggttcgaccgtcaggccgtgaaaaaaaaaacgatcgaaaaccgcaagatttcaaagtttagatgtgtgatgaaagcagatcccgagtaaaactgtaaatagtattcgaaaattcaaatttgaaacagcaaattcgaccaaaacctgatcaaaatttggtgaaaaaattataccaacatgggttgggaattcggacctggtgctaaatcgaaaagatgaacctggccggatgtacttccttcgccccataaaaaactaatctaataccggatatgaaatattctagtactacgaatcttcgtattactcccttcatctcaaaataagcaaaaccatgagtttttgtgtccaactttgatcgtccgtcttatttgaaatttttttataattagtatttttattgttagtagattataaaacatgaatagtattttatgtgtgatttatgttttttagtattttttttaaaaaataaataagacgggtgattaaaattggacatggaaacttatggttgcgcttattttaagacggagagagtatgtcacgttcattctagattcgttttttatgtaactgaggggtagcttggaataatatagctgacttgacaggattaattagaaacagtgacattgtaggattaattgtctcgtccacgggtgttaactacatgtacacagtgacggagcctccgccggtgacccaggcagcttggaataatagctaacttgacaggattaattagaaacagtgacattgcatgattaattgtctcgtccacgggtgtttactacatgtatgcagtgacggagcctccgccggtgaccccaggcaatggtatgggctcgtcgcaatgaacacgctgtaaaatttgttatattatagaattgaatacaaaattttcgtagtaaataattgttgtaattccgttgtgggctctctcaaaattttacttaacatttggcgtgatttgcgattgatccggcaaaaatttcttctgctggatgaacatggtcacgtgcgtgcatgctttaattactcgactgttagtgcggatttaacgtaaaaatgttaggtcaattggtttgaatcgttctttgtttctctctttctttttgtccttttattaattcgtttttggtttgctactttgacttggacgtatggcaggcagtgatcaacggcgtagaacacagctccagagctagctccttagttgacttgatatttcctgccttgtttaatcacagccgctatatgtttacgttatatatactgccattggtgtataccaacataagaggtagtagaattcaaaggaaataaaagagttagaatggtttgcttgtttgtttctgttagttaggtaatttggctggacttggtgtaatgtgatttctgccccaaccctttatcactagtcactgaaacattttttttcatcagctgaacctttcttcctgatagggaaaggtggttagaaccccagaaattcagagaatgtatgcccaagactacagacaatcaaacttcagagagaatccgacgtcactgtggctgaatggggagcccactaatcactgggataagcaaagaaaggcattgcaacttggctagggatcatacactgtccaaatgaatgtaacagctctccaagcccggtcaaaccataatcagatgctggtcggctacattggcacctgatgtgagacgttcatttcctgattgctttgcggctcgttgtctcagactgtgagtgctctttctgctttgatgctcatgattgcaactagagttcatgataattcatcacacagagagtttgtacacttgaaaaatagcagcagcaagatcaaaagaagatagccaaatgctcgaaatatcttatgaatatgacagtcactgagacactgactaccatattggtgtaaaaaaagacttccatttactctgttcccatacgatcagcatctggaaggtctttgaaacgataacttgaaggaaactgtgccacaattttttccttggaagtttaaacagtgagagcttaaactgcacaatttattccaaataattgggatccagtatcaaattatacattactaagaataaatacatctcacacatttttaaccggaatgtgcatgcggagtcaacaaattacagctatgctagaacagtacacaactacacaagagcgagtaacccatgatgataggccacatgtattgattgcaaattgatgcatcttattctggatcaaatggatcacactagtgtccacgagtggaggacactcaggaatcaaatcaatcttcacaaatatatgctaagcttgcaaatatccgttctcttcaaggtagcacagaacatgctgggccattgctttgggtgaaggacattccccatctaccatcttaattactatctgtggaaggccagaaaaaaatctattcagctatgttcaacaagcagataactttgcattttacatgtgggtaatgtcattcaatgtaatagataaatgatgaccctagttctttttgtctaaagtaaatgatcaaatcagaattcagattcatttatgtttggcaacatgtatgtcagattcaaaaaataaattaataagaaactccgacacttgtttagttgttttatccagctttaatcaaaccagccaaagcagagaaatcggaattgtgtatcccatcacaagtctgagatcaaaactaaatatattttttcctcatgccatcaattaaagcaagctacaatatgtgcatcaataaatgataacactactttttggttaaatattgccaattcttccgtgaatgaggttgctggatctaatagtgatagatatgtacacatataaacattaggaaggactataaatgaataaatgttcatagtcttatttctatggcaggagcatacaatgtaaatagttatagctaacagcggaatgatgatagtcagcactcggcagtaaagcactttttcagtagtgaataccctacacttagacttttagtttaccgtagtccgtatggaatggtaaggtgtggcccagtatgaatgcaaggcatgatctgcaagctcacctcactattcactggtgattcatatggatcatcaattccagtgaagcctgtttgtcaaaaaggaaaatttcaaaataaaaataccattaggcgttcaatccgtacgctcttttagtatactgaatgaactaaatataaaagttaattgtcccacaatgactcaaaaggtatcctgtacctttaatctttccagagcgtgcaagcttgtatagacctttaggatcacgagcttcacaaatttctagtggcaaatccataaatacctacaacgcttgtttctgttagatgcttaacagtaacgagatgataaaagaaacataacagaagcatacttcaataaatctagactctggaagcagcacacggcacgcatcacggtctctcctatatggagatatcaaactagcaatgcatatgattccagcatctgcgaatagctttgccacttctcctgcataagaatttaagttgtagtgaaaccatttctaacaaatggacctgttgtttttgagaacttaccaactcttcgtatattttctgcacggtcttctgccttgaagcttagatctcgatttaggccatgccttaggttgtcaccatcaaggacataagtaaggtggccgctgcaatgcaactcccgattcagtgcacatgcaagagtgcttttccctgaaatatgaaaaggtggtaagatcctcatgataacttccatgtatacagataattacacagctactggagattcaagagatccttagttctggtatgatactatgaactgaaatgtgcctcaggctcatacagagttatactttcaacgtggatgaaggtggtaatgaagcatgcaaatatgtgataaattctagtctaaatggagaaaattacattttgtgtgatccatgatcaactagatgtcagctacctacagagcatctactgaactaaatttgagcatattgagtattgactcaactggatttacaaaaatcctctcccgccgcctagcccctcttctagattccctggtcgcaccaaatcaaagcgcgttcatcaagaaacgatgcattcaagacaattttatgcttgtccgtcagtctgcaaagaaactccaccaaaagaagcggtcgtctcttctcctcaaattagacattgcacaagcatttgactcgatttcctggcctttcatcttggaggtgctggagcacaggggcttcggtggaagatggagagcttgggtcgcattgctgttccgcaccgcaacaactcgaattctaattaatggtgccccgggagagctggtgcaacacaggcgaggagtccggcagggtgacccgatttcaccgatgatcttcatcttagcgatggactttctgacattgctctttcatcaagccgaagacaccggtctgctgaatgggttggaaattcctcatcgtatctccttatatgccgatgacgtggtcgttttcatcaaacctgagattgagatagcggcagcaactgagatcttgaacatctttggtgaagcctccgggctgcgaacgaacttcgccaagtgctcagctatgcccattcaatgcacggatgagcaaatcgccttaatacaactggtgctaccctgtgctattgcgcccttcccgtgcaaatatctgggtctgcccttatccatcttcaagctgaagaaagaggacctgcagcctcttgttgataagattgcccgacggctgcccacatggaaatccaatcagatgccgccgatcggtcgtgtaaccatggccaatgctgttttgagcgccataccaatctatctactggtcgcaattgatgcacccaagtgggtgatcaaaggtattgataaggtacggcgtggttttctttgggcgggcaaggcgcaagcgaatggtggatgctgccaagtagcctggaccaaagtatgctcccccaaggattatgggggtcttggagtgccgaacttggagctcatgggcattgtactacgttcccgctggacgtggatgcaaaggatttctctggccaagccttggcagggattagcaatcccctgcacacagaaagagcgtaacttcgtcgccgcctccaccgtctgtcagttaggtaacaggtgaacaatcctttttttgggaggacagttggttacaaggaggaaacatccgagctattgcgccctcgatctacgagcatgcctctgctcgcatccaaaagtgccggatggtggctgaagcgctgattaaccgtagatggatcagagacataagcggcgcgcttaggactcaggcaatacttgaatacctcaagctttggtcgttgattcagtcagttgtttgttcatcctcagaaccagactcactctcctggaagtgggaaagctcaggcaagtacacctcaaaatctgcctaccgagctttgttctttggacgaattgcctttgaatccacaccgatctggaattcgttggcgccacctcgctattgtttcttcctctggctggtcactttgaacagatgttggacagccgaccgactgcggagtcggggattgccacatcccgactgttgcattctctgtgatcagcaggaagagagcattgatcatatcttagtcggttttccggaatcaaggcagctatggtggtgggctttgagagcaatcgggcaccccaactgcctaccggtgaatgaagcttcctttcaccaatggatgtgtgacagcagaatggtgttaagtgagtcacatcgtcgaggcttcgatacggtggtgacattggtagcgtggacaatctagaaggaacggaatggtcggatcttcaatcagcagcacagatcatgggtagatgtggcgagagggatggctgacgaggcttctctttggcgtaaagcaaacccggcgatccctgcgctgcaattcaggagggagtttggtcgccaaacctagcgcgagagatagatataggattaattgtcaatgtcctgtatcagtcccatgttgtttttcctttcaaatgtaaataacttttatttctcttaacggaaaaaatgcgctccttgcgtattcccgaaaaaagtattgactcaactactaatcatcatatggatctataatgatcgatgttcatttcaacctttatgtggttaatcacgaccaattatgttatctgatggaaggaaacgaactacacattgatcaagactaaacattccaatttaaatgataaaatcatatttctctagcacagagctaacaaatcaagtggagttattgaaaaaatagtagccaaaaaacatatcttacaacgtagaaaagcaattattattaaactttatcagggaagtaaaaggggaccaggctgtaaatcaagggagttctgaactgaaaataacctgagccgctgagtcctgtgatccaaatgacacatcctttttgccccaacaagttctgcctctcagattgtccaattgggcaattgtgccacagtatattggttgatttcccaatggttgacactagaggcttctctttaactgcaatgggaaccaagacatggttagtggcttagcgcaactctgttcctgttgttgaacaaacatatttgcatatagtacaaacaacatgaaaaaggataatctatataaaatataagggagagattatctttgacaccttttccttcacattattacttgtataatacaaaaaggtaatatctactctgattaaatgcacatgaattccagagttctcaatgctcccgaaagaacactgaaaagtactactatgattttctcataacattctcttcttgttgctaatcatatcatccatcaaccagacaagtatgtgttctctttatcataacttcttaagagggttcgcaaattgtgtactcacgttcaaagtatatttgaaaacatcaccaacgtcattccattgccccgtcaccaacttagtatgtaaataaactactcccaaagtcccaatatagtagaagattctacctatgatggtaaaaaaaaaaaaaaagaaaagctctaacttctccaccatgtagcaaaaacatccaatattctctcagattcgtcacaaaaaaaaaagaagcaaaaccattcaacattgtgccaaaatagagtattccatcaaacttcaaccagcaattcaccacccaaaggccccatacacagcaaaaaggacaaaaagaaagagcatcaggcataaaaaccatatgcccaaacacatcacggtcaagtgtcccatttgttgaattctgttacagcacgtatttgttctcaccaaaaagtcgtgatcactaaatatgtggaggtcaccaacagaagcagcatccaagcagcgggaacaaaccaatgcattatctaccacgccattcccctcgagagattctggacccatcgagacgccgacccacggccaactaaccaccgagctggaagtaggagaggagtagaccgacgacgacgacgaacctgggctgcgggagccgtccccggcgagctgctgctgctgctccatccctctcccggccgggccgcctccgcccaatgccgccaccacacgcgacggggccctcctcccggtcgccgcggccgccgccgccgagggtgccgggggccgcgctcgcagaagcggggaggggatcgcgtgcgagggcatgggtcacgagcggggcattgcagggggggaggaggaggcggcggcgggatcccgtcggtggcggctgcggagtgcggaggcagagccgcagaggcgctgcgttgcgggagagcggaggtgggagggagggaaggattgttgttgattggagagggagggcgacgtcacccgcgtggggatgaattcgatgagctgccgtgtcggtctgccttgccagttgccactgtgagtctgcgaggggcgaggctaggggtggccggccatttatgcatttgacacgctgtggcaatttttagtgccacatcagcgagctcgatgttaaggtggtataggtcgcagggctgggaggagaatgatctatctcaaaacatatatagtgcagaaatactacgtaacgatatacggtttcaataggaaatatcagatccgatatctatcataccattttgatgttaatatggttactagatatctgatatctacgaagtatcatgttttgataccttagatattagattcagtacttacaatatcatactaatgttacgctgacacaaacacacattagctatttacacattagctattttgtttgaacattatactgttatgtagtctctcttaaatatatatagctattttaatctaaattcacaaacaaaaaataaccatatttttaaaacgaagagagtatattattatcatgatcggaatcgatgatcagtgacatccatcgcagtcgagagactttgttagcttattagccacaaatataatttcaattttaaaacttaattttagaattgtctttaggttttcttttatcgtagaatgctttttttgtttttaaatagttaatagcacaagtataaagactatctacaaatattctttttgaaaggaatttagaaattaaattcggttgcttcattcttttcttttatgacttagcaatcgagactcgaacgatcggagcctcaggagggcaaaagcttaaaagatgggtttaaatttgtacagaaaaatttactccatttcgaaaggtgtaaatctcaaacttgcaccgtaatgatcatgttggctgcactttgaaagaatacatgtccattgtccaaccatttcgacacaacaacagtaagtttgcgggttgttttttctggcaaattagcgtcacaattggctttcgcaataaataaacgaagcactcaatcaaccaatccttatcacctaattatttatttgtcatatcaaaacaataattatttatttagtagtcccctgattttccatattgaattttatttgattgggacccctcctctgctgggaaaatgacttttagtaaggaagaaaaccgacgatattttagaaagagacttttcaggatacgtgagcagaagaaatgagcttcaaacaggtaaatcccagatttatcaaatcaatgaacacggcaagaaaaaactcacgtaccttgtgcaaggaatatcaatatagactactggtggcatggcacctcagtagtacatagaaagtgagctttaagctaagaaagagaggaaaacagcatacatctaacaatgactagatgctttcatcaacagaagtagcggataaaatcatgtaaaacacccattggctcctgcccacagagcagcaaaactttaaaagattgaagtaacaggtctgcggaacaaattattggccattgctttgcaaaacaaccaaagaattcgaaatttaacagccatcaaccacagacgatgttatcagggcctgagtgcaagcgctagaccaaacttggggggtctgtccaaggccttggtgtcgaattcaccagagattgtcaaaaccgacttgggtttaacctcatgctggagaagagcagcaagctttccagtgttgttgagccttgccttcacagctgtctcggggtcaaccttgtacaggccaccaacagtgagagtgttctcatttgttgagagcctgcgggttaattcagcaacaacagaggatttctgcttatcatcaaggtgatatacacctgacactttaacggtgtcacctttgtccgccctgcacatgtttgtgtaatgtatcagtactaacattacaacccaggtcatgacaagttacaatgaagcatgtacttacagaacgattgcagcatgataatctggcttggttacacctatcgcagcactgtacttggtaaattttcctgtagcagtgtcaaacccagcttctgcaccaaaggcaagtccttgagcaccagctgttccagaaaattcaaccacaggagatggcttcatgccaacagcagtggcaaaacttgcattctcatggaagtattgcatctccacctgtcattgaaaactcagctatggatcgttttcaatttaaaaacataacttgacacgataaaattacctttccagaattgtagtcaggcagcttgacacttgtcacaagctttgtggatggaaggacatcaaacacagtcaaagtagtagagatctgcagaaatcatatatttgtgttacagctagacagatgttatggagaggaaaaaatataaatctgagtattccatatcacgaacattagattctgtgtccactttgacatcgacgagagtactcttgtacttgtaaactgagctgacatcaagagtataaagcccccctttcttcacagctgtggaagtgaggccctgacaaataaaggacaaaatacatgagaaccacagcatgcaagtttataaagggcaaacaagcatacataataagttaatattactgaaaagatagggcagtattatcatagcaagtaagatcattatacatgtgacaaaattttgcaacaatggtcattgtgtatgttgaccattcattgtatgaaaatggtggatgggcacatgggggcaaaaaattatatgagaagtaatttacacagcaccatatgcaaaggagttaaatgcaatgcttgtcgtagcttcaagcccacaacaagtaatagcatcatacatgcatgtatgtatggaatgtaactcatctatattccaaaatcaaatatgaaattcattttttccagttaacagtgtctatttcaatgcacccagataaaattataggatgtatagtttctatcaggagagaagggactatggttggcaggtttttacaatatttaccctatcaccaccaatttgcattgatatattcttaacagccttaattacttgaaaataaaaggaagaactggagaagtaaacctttttcaattcaacaagcatttcatactgaacagaatatgcatgtgtgatagcacaatccagctagtcaactgttgcataaacagaatgaatatatagctaccttattttttgggggaggaatttatttagataggcttaaagaatggaaactcagtaatatcacatctcatgagagtggaaggataggcttaaagaatggaaactcagtaatatcacatctcatgagagcggaaggatcttggtagtataacatggtaagcacaacatgacctaaaataataaatccagatcctcatagcagccatatgcttgaaaagaaatgctagcgcaaatgaacactagaaggacaactgcagttacataatttgttatttgttacattgatacatccaatgaaagcatctagtgattgcaatttataacccatcctagaagaagcctgcaactacaaccagaatccttcaaaacggcaatataagaaatgaagttctaaaataaaagaagaaaagcaaacgcattgtgcagaactgttatattcaaccttgaatatcagaatatatcaactagcaagtagaaacacttcttatgttttactatatgtctatatcataccagaagagtgtttgtactggtccactgatacagatgagtttggcaacaatggtaagtggaaatgaggaataaccaaacaaaaattgctgtggcggaaacaaatcatgataacattttacacattcaatgtttccaagagtactggttggcaatgatacaggtggctaaccataacttcaactctctagtttctccaaatcgtagctacaacttatgtttctcctattactccaatcacagcctacacactcctacagaaatactaaaagttctaacgacactgccaccaagatgtcatattacagatcaagcatttatacttcgtaactgttcatcatagacaaacccccaatgatatctctattgcttcagacacatgcagaatcttcattgagtcaggaggggagcagcagcgcctcgaacaccggtgctgactacactacctcctgtagcagaattgaactttatacgatctagctcccccaattaattccctcaaatatacaagtcactgaattgctctacaaaatgaacgatttcccatttcctatcaggctatcacgcagctaacgggcattagcactacatccattcacatgaaaaaacagcaaacacgccgaggaattgcagccacggaaagacctgacaaacccgaaacctaaatagcagcaattaaacaggccatgagcccatgactacagcacgcatcctacccgtcaacaaatcaagactacgcacaaccacaaccacgactagatggcaaagctcgcgggtcaaccacgaacaagcgcaacacggaactcagcgccagatcacacgagcgcgatcggatcggatggggaacccttaccactccggaggagctgacggtggagacggtcagcttctggtcataggtgtagtccttggtgagcagatctgcagatcaccaaaccccaacaacaacgagaaacgaaaacaaacgaattagggaacggaaagcgagcgagcgagcgagagagaggatgagatgggaggaggggtaagatgcgggttacccttggccctcttgccaatgtcggagaagaggccgggtcccttcatggccatggcggcggcggcggcttggggaagggggggaggggggaggcggccgccgaagaggagggagagagaaaggagaggtcagagaggttccgccactagtagaagggaatggtggggcgccacgagaaatactagcacgggcagttgcaacctggagtaaccccaacactgcagtcacggcacatgccgccgccgccggtatttcccgggcgacgaattcgacgttccagatttgtttccaagagacgagcaacagttgcaatgccgaacatctggcagagcacgtacgaatcgcaaagacgcaggaagcggcacagctcatgtgcctgagaatgtcttttttttatttcttttaaaccctttcaccttttaattttaaaataaacccttccaaaaacatactcactccatttacttttgatagtcatatttccaaatctgaaaattttatttttgataggcatatttcaatccaacaacctatcctcttaataactttcttggatttaatgcatgactatccattcttacacacatgattggctacatgggcattgagaaatgtaaatattaataaatcgtttgtttacgaggaatgactagtagcatgtttaaatggatgataagtagaattacttatcattggtctgtgtgccaagatgaaatatgactatcaaaagtagatggagggagtaatttcaaatacgaactttttgccacgccaattaatttagtgtggcaaaataacaccgcagtcgatagaaggataatttcaaataagaactttttgccacaccagttaatttagtgtggcaaaataacaccgcagttgttagaaggttcgtatttagaaataagtttataatggattgttcttaaaattaaaaatttataaggttaaacagtaacaaaaatttatgcctgagagcttcttcacgccctcacccaacatgatccccacctacttgccagctccacgcaacagacacgctgtgcgcatgtgccatcacacttccagcaacaccaggtcgcaatacccaccgacaaagcggcgcagttaaccgaagtaaccaaactcaagcagcaaagaaaattctggcgcgtccagttacagtcagatatgcaaggcaaagcgatttttcacagttcattgcaaggatgggttgctgagataacattaccccatctacaataacagggtttgttgcgcagactttcgcgtagatagttgcctatacacaaaagctggggccttttgccaatgtgtagcaaacaaaattgtgcctcccaaatatgaagggaaacacaccacaccggccaaaatcaactttccatattttaaacctgcattgaaactataatgctagttacaggtatcttgtgaggatttcatctttgatgaggtcagatcctgatgtcttcaatgtctgagagaagggtggcaccacccgctgatctttcatcggggaggctaaccactagctggccacaggcgccagctatgtcttgacccatttgctggcgaatagtggttctgatgttgtaaattcctcttaggatcttctggaacttcttcacattatgttcgctgctagtcttgaaattgtttgatgagccaatgggattgaatggtatcagattaacaacctgttagtgatcaagagaggaagcaatcaagagagaattgattcaaaggttccaatatgaggatataacacatattatgaagacaataacaggcaaaccaactgaagatgttaatatatgaaaagtcaaaccactaaaaggaaattctccaaacaaatacaccgtgacccaacagaaagaccatgggtcataaatcataatacaagtgggcagaaattagaatatcaaacaattgaacatccagggtaagtataccgcaaagatgatcaggaaggttttccaaccatttaaaagaatcattaataagataatcaggatgaaatgaagcagaaagaacagaaagtttcttaccgctttaaacatttcaagtaatttaccaagctggtgggcatgctgctcctgatcgttaactccatcaagcatgatgtactcaataaagatggtctgcttgctgtgatcgaacattcaggtgtttattgaaactcaaagctatcggttcttatatttggcactgatggtgatatttagtaatcttattcttacctctcattttgatatgattgcagtgcattcattagctttactaaaggaaaggcccgggcagcaggcattatatgacagcgtatgtcttggtcaggagcgtgcaaggacacagctagatttatattgggaagatcattattgaacttattgatggaatggataatcccaacctgcagtacacaatattaagattcaaagtcacaattactgctgtttcagtcctaacaaaagttcaatctttcagctgcatcaatcccaaggaaaattcaattgctaaactaaatattagcaggatttacaacttaatggatcatatagggacatgcatcataatcacaacgatttactaatgtcaaaacacgagcataaaactgtaaaagatcaagtaaatcagcagcaaagctttcaccagacagaatgataagaaccatgctatactgaaaagtaaatctgaggagtaaatactagaaaggactcaataataggtgggtggaaatatatttttgattcctaagaaatgtatgataatagaaacctgatagaacatctgaaattcattattcatttagaaaggcattgtacaatattaaaacaggatatccttagaatatccaaaagccaactgcaatacttgcaaagttggtgaaactcttttccgtattttccaaaatgtgtttagcatggcacaggagcaagtactaggttgttcagaaggttaaattgaacttttaaaaggttaaatgcaaacacaagatagccttccaacagccatctcaagaacaattattccacatgcaaaatgaggtacttgtgcagttatactcacagtagatacagtaattctcttaggtgaaagctggaatggagagcctatcaagacttggatagcttcaaccaaagcagtatagttgtttaatggctcccccattccctgcatataaagcagaactataaggtaaaactcctctgcaaggtaccaataagcaattcttaaaaacacaaattcaaaattgttatctgctaatttctgtcaaatggaatggcatgactatagaactgggagaacagttcattaataagaacaatttaaactcacaaatatgcaccaaaacaagctgatgtaccatgcattcatgcagtgtggtggttttctaatttctcagatgggaagccatctaagcatctaacccatgtaatggaatacaatacatatcctttctaccttaatgaagtaaagtgggaaaactcacacagcaagcccgtttttcctatggaagacataaaatctagcaaaaacagtacagaataaatatatatatacataggcaatacttcataagcatagcatggcttgccttgccatggcctgtatgaaatccagtgggcagtacaaataaaaccaagcaaacaactgaatgaacagtgtgaggccactaggtctggatgatgaaaacatgatggcactcattgttgcctttttgcacatccagtggactgtgcacgatttccttttgaaaagaaaattcaggcaaattccaacagcttgaaattttatattaccatgaaaacaacattccgaatctgagaataacgggatgcatgaaccaactgctccacaatttctcctgaagacagattgcttttgaagcccatcgttcctgtagcacagaatctacagcccatcttgcatcctacctgtgttaattttagatgcaaggtcagtgtctatcaagtaagccaccagcttcccaaggataacttacgttgtcacaaatatagttgcccacaggacgacaggtcatcagaagaaatattggcaatacatgaagacattaaagaatgattttcacaaaacaacttgccacccaatgtgcaaggcagatatatctacctgtgaggagacacagagggttgagcgcacgccaccaggccgaggcttcccgtcatacttccccaatcgcgtgtcataccgcatgatcactgcttctacagattccccattctaggtcatgaaattgaagaggaataagttgatattagcagaaaaggatcaacgaaaaaaaaatcagacaacagcagtaacaagacaacaaccaaacggaagggcaactgacagttgacaacttgacatgcatttacatgtttgttatcagacaaaagagtaaccaagttcaagtcaaactggagctgcaaaatatactcagagtttaatttatggttggattaaaatttgaaaataacctacctaatacaggacacgaactcattaggtcataacccttacattgaatcttccaagctttgcatcgagagcgcaatgataacctaggaaactataaatggcttcccaagggagagataaaagtgaaaacacatgctagaccaaatccttcgtttctaatgtacagcttacttgagatactcatttaaattcagtccctaaaagagtggcgtgccaattgtgcaagtatgcgtgaggccttctgttcatatccacatgcattcaaatggatttaaaatcaatagagcggacgtttcggaaatacccagagcaaactgcccacatacatcgatgctattaggtgataagtgctagcaggttaacagcggtaaaaaaattacaaaccctaaaacatcttgcagacttctcctgatcccataatcaccattagtactgcatgttcaaaccaccgaaatgtgcaatctacaaaatcccccaagtttgagcatacagcacgaaagtggcacaatctaattcaattcaccttgagtcggataaggagcttggtagtggtgcggtccttggactccgcggcggtggtgagcgtcgacgtggtcggctggaacttctgccgaaggagcgcgtacgcggccgccgggagcgacgggacggcgtccaggtcgccgcacctggggttctgcaacacatacctgcacgcgaagaggaaatcaccccttcagaccaagacgaggtttctatctctcggatgacaaaaaaaaatcgagaggcacagagacggcgagcgcgtagggttcgaggggggcggcggaagggcgcgtacttccagatgagagggatgaagtgaggggagatgccggccgccgcgaactccgcgcggatgtaggcggcgtcgaacacggagcggcgcggcggaggcggcggcggcgacgacgaagaagacgacgacgacgacgccattgggattcgggaggagtggagtggggggaggggatgcggcgggggggttggaacttggaaggctggggcggacgatgcgctgcctccagcagcgtgggttttgggggtttcttgcagttggaaatgcttcgaaatgaaatgctgcccagtaataatatgggctgccaactgaacagctgttgatagttgataagagataaaataaaaaagataaaagataagagtagcggactacagatttatagccagctacagcacagactctaaaacacaatatgtatatgataagtgggataatatattttttttgcggggaaagtaggataatatattaatagtgtagtatgtatttgtagataattattatatgaattgactataatttagagttagtcgttatctatactattaaatttgctcttagtgaagcggagaattaaaaacctgaatataagaagcagtgtaatatataaaaaaaagtatcgactgattgctacatttgcagcgtaaattataatttatttcttcattttattatatttgttgcgttcaactttaatttttttttatcaattaattatatatttgtgcattataatgggccatacaattgaaaataggttaacgcctgaaacatggataaagcataaagcggagtttttttttctgaattgctaaccacttttccttttctttttctttaccgaattttctttttttaggagcagagcaatagctgcttctcttttctcttttcttgtgcgctgcgcgtgaggaagatggagtgggaaggaggacgactattcttctatgttatgagacaaaacacattcaactttaaaaatcacaaatatttaaatataccatgtaatcgaaagatgtgttattgtgggatagatatattcatattaaccaatgctgacaaatatttagaaacatttcctaaaagagacacatgttttgtattacaaaattttaagtattacaactctcaatatcgcatgttaatttatcagccactaaaatttaaattatacaacttaatttatacaattgagtttaagtagttttatttgtcggtctatttttgtgcattgggttttaaactacaaataatatatagagtgaattgcacccacggtacaacaacttagcaggtgggtgcgatatagtgtaagaacttgagaattaaacgtccgagtacaacaacttgacaagtagttgtgttctactacaagaacataacattttttttgagaatttaacaatttattattttggtgcatcaacttggtaagtatatgctagatgagtttttttttacgatgtcaatataccattagatagtaatcttatggatattaccttataatattaaaattaatttttatgaattatattgcacatagtagcacaatttatatccaattacctttaagattttttttttgttttcttcaccttctcaaatatcaatcgaaatataataatttctacatccagtttaattattttaaaatatgataacttgttttaaaatatataacaattaccccattaattattttaactttttttgtttacatttctacaacttatcatatctaccaatcagagttacttgttgggttagtatagaggtgcatgtaaccaatgtgaatccttttgatcatggtggcattttccattcaaatgaacatcgaagctatttgtatgacaagttgaaagccacctttcgctgaagagataagctaatgttttgtataccaaccaaacacactaaagataaagattaaatgtttacgtaaaacgatgtggtattaatatatgattaatttagttttaattattacaaatttaaaaaacagatcaatttaatattttagagcaacttttatatagaaagttttcacacgaaaccgtttagtattcaaaattttatccaacttttgttggagaaaagaacatacctaacacgttgcaaagagaaagaaatggcgaatatgcatatgtatatacgtgggcgcatgtaccatttcaatcgcccagattgcttcaaagtccataaatgatagagagatatctatgtcagactcacagggcatatgtaactaactctatggattttactttttggctcaacaccctgctctcgacgtttgctcgggacgggaggctatgaaatagttgaaagcagatgcaacattaaagaaagtaaatccagtagccttaagtcataccgaacactatgtcctaatagtaagggatttctttcaacccggtggtaagccggtggtacccggagaaaacgttgcccgaaggaagggactaaacccatctgttcaagtagtagccaagtagtaccgaaggagtatctccgagttaaggagtaccaaatacgagaatttccaccttgttgaagatatggtggtgctacccgaagacttaaatgaatagccatcgctgttaagaacaaccgagatccaatgagaatttgcgatcgagctttaagcagtgttttagatgaaaatgaggtactattgagagaattgtcgagcttggctgatcataacactcccaaaagtagtggaaatgacactaaccctagcccgaaggaaccgtagaaaaataaactacgataagtatcgagagtagaagtcgagaacaactgtgtggagtagaagctgggatagaaagggttggaattctcagcaatcagtggttgatctgatcagtaaacttttggtgagttcattggtatcgggtggtccatttcatcctctttcggcaaaggaagttggactttagttagctaaaaaaacaataccagcagcctgtctgtgccctttgagtctatagccgccaaatctaaagattccttaagttgtcgtacggcttctttttcttcttttgtcaatgatcggtgacaatgaatgctatgaatgttcgcttccactaatgtcgtctaagaattgtgaggtgcccatagcttcccggaaagaagaagagtcattgtcgtttcctgaccgatatgaatgcacatatttaccctcgcctcggggaataccaccagtagagtctgcagaaggtgtcgtttaggagagatgctgggctctagatatgcgagggagatacccaccctcggtcatgacctgagttgaagaaggaatctattttcttggaagcaacaaaagaactccg

SEQ ID NO: 9522 - DNA, 836 bp, Oryza sativa
acctccgcccccaccgccccgaggcagcggattgtcacatgcgccgaggtcccggtcaaggaggttgccctgggcgacggcccatccaagaccacacggatcggtggtcttctggatggcaaataggaagacgcgctcgtctccttcctgcgggcaaacgctgacgtcttcgcatggagaccagcggatatgcccggggtccccagggaggtgattgagcaccgtctcgccgtgcggccgggcgcaaggccggtccggcagaaagtgcggcggcaggccccggaacgtcaagccttcatccgcgaggaggtggcgagacttctggaggccggattcatccgtgaagtcatccatccggagtggctggcgaacccggtggtcgttcccaaggcgaacggcaagcttcggatgtgcatcgactacaccgaccttaacaaggcatgtcctaaggatccttaccccctgcctcgcatagatcagatcgtcgactccactgcggggtgcgaccttttgtgttttctagatgcatactctggttaccatcagattcgcatggctagggaggatgaggagaaaactgcgttcattacccccgtaggaacctattgttatacatcaatgcccttcgggttaaagaatgcaggtcctacttttcaacgtactactcgaatttctttgggtagccaaataggacgtaatgttgaggcttatgttgatgacttggttgtaaaaacgcgcaaccaagaaactttactttcagatctagcggaaactttgagaacctccgctccgcccgcataaagctgagggggatccactagtggagattcggccgc

SEQ ID NO: 9523 - DNA, 801 bp, Oryza sativa
gcggccgctctccactagtggatccccccaggattttattggccgacagctctcaatgacgcagtcgatctggtccggcgatgcagagcgtgtcagttccacgccaagcaaatccatcagccggcccaggccctgcagatcataccactgtcatggccatttgctgtctgggggcttgatatcctgggaccgttcaaacgggccccgggcgggtttgagtatctgtatgttgcgatcgacaagttcactaagtggcccgaggcttatccggttgtcaagatcgataagcactctgctctcaaattcattaagggcatcacggcccgttttggagtacctaaccgtattattacggataatggcacccaattcactagtgaactcttcggcgactactgcgaagacatgggcatcaagctctgcttcgcctcacctgcccaccccagaagcaatggccaagtggagcgcgccaatgcagaaatcctcaaaggccttaaaaccaagaccttcaatattctcaagaagcacggcgattcatggatcgaggagttgccagcggtgctctgggcaaaccgaaccacaccaagccgagcgaccggggaaacgcctttcttcctcgtctacggcgcagaagcggttctcccatccgagctcaccctgaggtctcctcgggccaccatgtactgcgaggctgatcaagatcagcttcgcagagatgacctctactacttagaagacgagggcgggcgcgcgggcccttcgagccgcgcgctaccagcagagcttgcggcgctaccatca

SEQ ID NO: 9524 - DNA, 6768 bp, Oryza sativa
ggcagacaaattgtctagctcatctgtgcaacttacagatataacgaatggcttctctgagctttttgctatgaaggatacctcagagatcacatgtgtgaagaaggcctcctacctaacctcatctgtaatgaaaaattttgtggttccgaagctagagaaggtgattgatgaagagaggaaagtgacacactcttcattgatggatgagacagaaaaggctattcttgatcctcttaaggtcaaagtgaagttgaaggctgaaaatgttgacatatgctatcctcctgtatttcaaagtggagggaagtttgacctcaagccaggtgcctcaagcaatgatgattatctttactatgactctgcaagtgttatcatatgtgcaattggggccagatatggaaattattgctccaatatggccagaacatttctgatagatgctactcctacacagatcaaggcgtatgaaactcttatgaaagctcatgaagctgctctagaagcattgaagccagggaatcggatgagtgcggtttatcaggctgcagttgacgttattgagaagaatgcccctgaactacttcgtaatctaacgaagtctgctggtacaggaattggtcttgaattccgagagtctggcttaaacttgaatcccaagaatgaccgtatcataaaagcaggaatggttttcaatgtctcccttggtttgcataatcttcaagcagaaaaaaagagtgagaagacaaaacaatactctcttttgttggctgatacatgtttagtgccattggagaacttaacagcatcatgctccaagcttgttaaggatgttgcttattcgtttaatgacgaggatgaagttcttcctgtcaaaaaggtggaggttaatgcaaaggaggcattgccaccaacaaaggccacacttaggtcagacaaccaggagatgtccaaggaagagctccggagacaacaccaggctgaacttgctcgtcaaaagaatgaagagactgctagaaggcttgctggggttggctctggttctggtgatgggcgtggtccctcaaggtcatcaaatgagcttgttgcatataagaatgttaatgatgttccatatgcaagagagttggtcatacaagtagatcagaagaatgaagctgtcctcttacctatttatggcagcatggttcctttccatgtttctactgttaagagtgtcacaagtcaccaagacaaccgcacttgcactatccgcatcttcttcaatgtgcctggcatgccattctcaaacgatagcaatctgaagtcgcaaggggctatctacttgaaggagatcacgttccgctcgaaagatccacgacatagcagtgaagttgttcagcaaatcaaaacgttgaggcggcaagttgcttcaagggagtcagagagagctgaaagagccacccttgttactcaggagaaactccagttgacaagcaacagaaacaagccagtgagactttctgatgtgtggataaggcctgcatttggtggacgtgggcggaagcttacaggaactcttgagtcccatgtcaatggttttagatattctacttcaagggctgatgagcgtgtggatatcatgtatgggaatgtaaagcatgccttcttccagccagcagaaaaagaaatgattacactccttcatttccatttgcacaatcatattatggttggaaacaagaagacaaaggatgttcaattttatgttgaggtgatggatgttgttcagactcttggtgggaataggagatcagctcttgatcctgatgaaattgaagaagagcagcgtgagagggaccgaaagaatagaataaacatggatttccagaactttgtgaacaaggttaatgatcactggtcgcagccacaattcaaggggctggatcttgagtttgatgtccctcttagagagcttggattccatggtgttccatataaagcttcagctttcatcattccaacttcgacttgtttggttgaactaatagagacacccttcctggtggtgaccctgagtgagatagagattgttaatttggagagggtgggctttgggacaaagaactttgacatggctatcgtgttcaaggatttcaagaaggatgttcttcgcattgattccataccatcaacatcacttgatgcaataaaggagtggcttgacacgactgacctcaagtactatgagagcaggctgaaccttaactggcgtcctattctgaaaactatcatcgatgatcctcagaaattcattgatgacggtggctgggaattcttgaatatggaagcaagtgattcagaaacagaggaaacagaggaatctgatcagggctacgagccttctgatgctgagcctgagtctgaatcagaagatgaagattctgacagcgagtccttggtggaatcagatgaggatgatgaggacgattctgaagaagactctgaggaagagaagggtaagacctgggaggagctggaacgggaggcaagcaatgcagacagggagaatggtgcggagtcggacagcgaagaagagaggaggcggcgcaaggtgaagaccttcagcaagtcccgtccaccaccggagcgcagcagcttcaagggaggaccctcaaagaagccgaagttcaggtaaatctaacggtgcttcgccaggcctggctgcttcctgaatgcgcgccctttttgaggggcatggtgtgcttggctgtaagcagaagcgctcctagctgtttctctagatcattacgacactttgtttccgtagtagcgtactgcagttagctgaaagggcggtcggactttggtgaactccatagttgatgaaatgaactgtaaagactcttgccatctaggggaaacccaagttgattcattagttgtatcctcattgatgtaatgttttgtttcctgggtagaatgttgacctccagaatgtataatatttatgttggcggacgtatcttgtgcagatggcaatgctgcagcctcagttgtgtatttctgtcagttgcgtcttatagctccgttccgttctctcgacaaacgggtgctatgttaggttctgtcagtgctctgaaatgtaatgtgtttcctaaaatacggtgtagtttctgtgggacaatattaccatcttcaatgcgacaacggtgcatgcaggaatgtaaatggatcgggcaattgaattttatgctatcacatgtagcaaataaattatcaggaaggtttttatgggggtagtactgggactgctcacatccctagatgcagattacggacaaatgcacttgtctgcctgttgagattacagattacaacttttttttttcattcggaggctcaaaactgttacgacgagttgatcttgatgtcaaatcttcttcccggacaaccagtggctatagaacgcaagcgtctccttgggcttgtactccgggacagtgtgtccagctccctgaaacgtcggcacatgttgttaacatcatcaaatagtacagcttcaaaagctaaccacaagcgaaaatagatgtgttcattccaatggattgtttgtttagacagttgtggtttagcctgaacttgctaatgcatgactgaaaaccgtccagtgtttgctaaagaaaaaaaaaaaaacacatgttgagtgagcaacatccttttggtacagaacatgcagcttatctactggaaaagaaatctggtcacttacctttatggtgaggaaagtgagattgtgttcataaccttgtgtatatctgcaatggcaatatcgctctagtgaggaaaacttgtcaagacattctctcttaatttcttgcttcctcaagtaaaaaaatgtaaacagaagtcttatctacaatctgcacatatacttctaaaattctaggtagaaaagtatgagttaagctgaactgagctaatatctagatgtgacataactcctgaaaaggtatatgaagaactgatgattcctatgaagaaaggatgagaacatacccagcgacttgccctccaaagtaccatggtcgccaatgatcaattactcggtatcccatggatctaacccatgcttccgttccgacatagggaatacagagatcatgatctccactacaaaaaacagaatgatcagtagttggttctcattttatttttttcaaagacaagcacaaatttgaattttaggcctcttcagggtttcccaaaccgacggtaaccgcgcggttaccgcggttattgggcttaccgcggggtacggtaatataaataccgcggtaacctccttaaattcaaataaatttaaaaaataatttgaatttttgataaattttgcacggttttgtacggtttttcacggttaccgcgcggtaaccttacttaccgtcggagcgcggtaaccccggcccgagcggtttaggaaaccctgggcctcttaggctgaagcaaggttcagaaaccgttgataatccctaacccatataagttggattccaaacaacccaacttggtactccaattattttcaatccaaatgagcaataattgtagtactatttgttatttgtagctaaaaattctggcattctgcaccaaggttattaataggaatttaatttaatttaatgtgtagctttttttataggaatttagcactttaaatcactcaattttcaaattacaatcttaatggtctgttgcatacctgtaaataagtgcgcgatatcccatggctgtgaacttcttgtggtacttcaccatgctgtctccagtatcatggtagtactctattcttgcagtatacagttcccatgacccaattaagcttttctgatgtgccattttaacaaggtagttccccacaaagagaagaaagtgaggtgtaaattttaagataaattcaaaatgaaacctttggttcctcgtctatcataccggttccgcgtgaatggcagctcttacatcttcatcatccagccatgcattagcaagttcgtcgctctacaagtacatggaaatgttgatttgttaaacacatgaaacaaaatgttttatctgttgacgaaattaggcacccgaattctaataatttggaacgaaacacagctaaatgtttgatctacaaaatcaaaatgatgaaatttgagacatattaaactaccactccaatttacacaccgtgcaggggagtgatctaccaccaagttcaggccacatcgtcatgcgtccacgagtcacaggagcacggagaggccaagagcggccagccattcgctttctcactggaaatcgcttctctgtctcacctagctttctaaaacttgatggcaagctgctgttcttgaactctaattcttgaatttcagggtgatggtagcagggagcaaggatgttgtacttgttcaggtccttgagttcctgcagttgccagtaatggagcgtttaccaaatttgtaggattgtgctacattgttttgtttacatgtgctggcacagggaagttacccaatgcactctgtctatcttttcttggcacagattattaactttgccccaaaatgtaccatggcatgcagtacttgcatcctgcaagaaagcaactcaaatcattttttagctttgttaactttcatcagatttttttctgtgttgtctatctcctctgacattaccagtgagcacaaccctcgtttaacatattcttttagacagaagtatttagacagattcttttactgttttgaggtgaaagagcacaagagcggaggcattgatttcttgacctcaaacaattcggttgagatgagacccatcccatgtgcaaacggcacaaacgaattgaaatcatagtcctgatcagttgctccattgccaattagatatccctgaaaaataacctttaaattgtgagcccaaagacaattttcgcatgcatgtagagttgttgtatgacgtcatctcccgacaaatgaaaatgggaggaccttaaaattgattcttggcttcagatccttttctatccctgtcaggacataaacaacataagtaggaaacttttgataataatagtttctatatatattttttactgacaaactcaaccttttacaacttcatcagctagtgttggaatgtagatccctgcaaatgactctcccgacatgtagaacggatttgactggaactcagggtataactcaaaccactgcaacaatgcatagaatcaacataaaaattttccgaagtgatattgatattattgcaaccacagtagggagtaggtaccttcagaaggaaggtgtgtgcatcagccgctgtttttaggtcacctgtcgtgtaatctgatttattcaacgagtacgacatcccaacaccagcaggggagtcgaggtacaccacgttggaaacctatttagtgccatatttaatcactcacttgatgttgtatagatattttttgagccaaaaaagagttgatagaacgttaagagtgacttaggtactgctcttttcttcaactccatctcattttctgttaaaacggttttcaaactgttaaatggtgcgctttttgcaaaaaaaagattatatatagaagttagttaaaaatatcaaataaatcattttttaagtttataatagttactccctccgtccaaaaaaacccaacctcatactaggatgggacacatcctagtacaacgaatctggacgtactatgatgtgtcc

SEQ ID NO: 9525 - DNA, 7391 bp, Oryza sativa
ccatcctattactaggttgagtttttttggacggagggagtaatacttaatgcgttgaaaatcaacctccaatagcatcatcaacaatgccaatagcatcatcaacaatgcccttattctatccctaatcctaattttttgggttttggtaaaaaaaatgcctctaacagataacctatcctgatcctaatttgttggaaaccccatccccgcatccttcgctctcttcatttgagggagagcgacaccgcacctccaaccctaatctctctttcccgcgaggttttctctttgtgcgcgaggagggagatcgcgcacgtgtaggagcgatcttttttttttggtgtgcggggtctgtgcaaaaataaatacttcggttggtagtttaacataagagcccactcttagttttttagtttttggaatacttcactcaattaaatttaggctttcttttggagagaggagttttctcaggactatacacattctgtcggtgatgctctcagctacctaatttcttcttttcttaagcttagcacaccaaagctcagtgacaacaaccagacacatgagacatcctatgaaatatgcaaaaataaacacccctgctacgtgacaactaattgtgacacaaatagcggaacaaagcatctgaagaaactagatcagttactactagttgttttatctttgtaaagagtaaaaggtactaaaaattagcacaaagaccacaaaggtgcacacctaatcccccggggattacggagaagaggtttcagaaacagagattaaggagcagagcagtgcagagctatcaccttggaccagctgtaggggttgagctccagatttgggaggccacccggatcgctgccacgctcgaaattgaaggggcctgcgctgaatatgcaaattaatccaatggattggatggaatggaatggagcacttgaatcctaatcaatggcgattaaatcgatggtgaacaaggagattggagcgcaccgttctcgtagacgaagccgtcgaggctggagcatcccgggccgccgttgagccagagcacgacggggtcggccgccgcgtcgcgctccgacgtcaccaggtagtagaacagccgcctcccgctcccctcgtccaccgtcacgtacctgcgacgaacaccacggcgcgtcgtcggtcagatgataagagaagagaagagcggcggcgcgcgacacgagacgcacccggagtagtgcttggaggggaaggcgccatggaagcccgggaggctggcgactaggtggccgtcgggggccgcgacggcgacggcgatggcgatggcgatggcggctgcggcggagagcagcagcagcggcggcggcgcggcggcggcggcggcggcggtgcgaggcatcggaaaggatgatgattaggcgaggcgacgatgggtccttgttttctctttgttggaggttggtggggggtgttaaaactggagtataaaacattggcgccagcgaacagtggagccgcacgtgtcaggtgagggggtggggcccactggagtatcccgctgacatcggcactgagtttgtctccaaataatgtggccggactagggatgaaaacgggttagaatcggtatattattttattatttttttcgaaaacgagcagaaacggtcggggaatttccatatttacgatgaattcatctatttagtgccaacttcgataccatgctgacagaaataaaaaaaacaaaattttgaaaacggtaacatcggtaaaaataatattattatattagttttgcgaaaacggtatcgatacggtcgggaaatttccatactgttttcacccctaggctggactggcaggcgccaccccgttttaacccctatatgcagtactgtcccctgagagcagctataataacaaattataagccagatataaacatatgtcgaggagataaaacagtagagacaagagttgcgtcgcagtgtggggctattaaattgattgttcatgatttggagctagtagttagctatactattaaactggctctgattttgagtagatgatacggagccatggaggtccacgcccaatgcaaagtctgtgtggctggctggttgtctggagctgtggtagagaggatttaatttcgacgagtaaattgtaagttgagctaattatttttatcgaagtttttatagtggagtatgatcactctctatttcatgtttttaattaaagttaggaatatttacctaccgtttgtattttggaccggttgtccgcatgtcagcaaggattagaaggaagaagcttgggagagatgggggctgagctcatcttttccggcacaggtaatgtgttgttcatgtcccgtttaatgccagtagatcaagcaaaggcattaagagaggagcaaggtagccccgatcgagctaaggagaagtagtagctgaaagtgtccttgtggagcaatggtagagcttaagctctaggtaaagggaagggccaaagccgatgttgatggtgtggtggtgatggggaatcagagttggatgcaaatccaccgctgtactgcacctgcagtacgtgtcactggcatgtgggtcccacctattccgggcccatatgtcattggcacttaccgcacatgcattacaggagaggatcccaactcatcagagttaggctgtcttggatactccaacaagagttagggtgtgcttagttcacgttaaaattggaagtttggttgaaattggaacgatgtgacggaaaagttggaagtttgtgtgtgtaggaaagttttgatgtgacggaaaagttggaagtgtgaagaaaaaatttagaactaaactcgggcttagatgaaattttggatactcgtggcacgtttttcaaactgctaaactatgccgtgcgaaaactttctatatgaaagttgctctaaaatatcatattaattcattttcaagtttgtaataattaaaactcaactcaattaaccacacgttattatcacatcgttttacgtgaaacacttaatttttatctttatcttcatcttcaggagattcaaacaccaccttagagaaaaataaacattggatagatggtttttcagacaaagacttcgattaaaaaaaatctggcctagccagcaatttacttaattttattttgatgaaaataatgttattattgattaacactggaatgttttttttttcggggaggaatgtatttttctatggctatgattttgttgctatcattatcttaaaaaaatgattttgttgctatacgagaaattaataataagaaaacacttttggagatcatgttaagtttaaccgtgctttacatttataatcggtgggggcaaggaggggtactgcagttaaggcttggcctttggatggatggattttgggtgccaaaaaaccatggaggggttgccgggttaggtgtgggtcaatgattgatctgatcggatcccatcccactaaaaaaattattttcatgtagcacgtgagaaataaattaagtgtacttaggtgcaccatttaattttaatatttaatagtaactccgttgttgacatcgtaaaatatttgcagtcgatcctcgtagttttaaaacttctgttgatgtaaaaataccaggatttaaaatgtgaaaaatcatattaagtagatttgccttaaaaaataactcttccatatgtttttataaaaataagctatgacaaatacataaaaacaacaatattttcttctataaaaataagaaaatgcagtgttagtatgtctaagattattttgtttttttatttaacaaatagcatccaattagtagagtctccagcaagacgatgctacttaggaggatgttatcaccggatccaagaagagatcatcgaagggttctcatcatggaaatagagactaaggtatgaaattaaaatacacagtttttgtgctttcccctctctttgttaaggaaacagatcccctgactttgtgtagtctacagttataccactgacatgtagaccctactttgatatggcccacatattagtggcacaactccaaactgcacaaagttagagaagtctcatccctttgttacattttctattttcctctgttccaatttcttttggggcacataatcatataatcctgttctcctttcagaacatacacattgctacagccatagccatcaccatcctgagattcatgatgaatgcaacaagatatatatgttcagaaatcacatgcaagaccaaatggcacagtgtcgttttccattgataaggtaccgtaagttggacggtttcttaaacattcttctggctcttttgtcaaaaaccacaataatatgataaaaagacttggacaaaaagtttaacaaagcctacagttccatagaaacttaatctgaaacagaaataatagaacaaaaatgatacttgacatataaatcttcgctattattatgaacaaaatgtaataataccacagcactagactgaatttctttagacttgcactaagctgatttgatactttacagaataactgaaacagaggtcctagaaccactaattgcagtgcagaataaaccaagcaaccactccccaacaagcaaagtaaactggctccgtcttcccatgcagaagaatcattgcaagtataataagctgcacaaatcttgggcaaaatggttatcctaatccatagacaagtacggattttatgctttcccttgcaacttaagtaggctatcgcagatttttcgagacaccatcaaggacaggccactcatcacctgttaccaatgcagtaacgagatcggtaagagccctagtgcttgatttgatggtcaagaaagattaccaccacccagttctatggcattggccaaatctttgattcctgaaccggggggtttatttctagcatctgtattcaagaacaggcagacaacagcgcagtcatcaatttttgatgtggggaaccgtgttctccatgcacgttgagccgattcaacaacaaatcgtgccgctgaggcttctgacttggcttggctgacaatgctaacaacttctgagttggaaagtacatcccacacctacagttaataaaagaaacaaaacaatcatatatcaaaaataatcttccaaccaaaagtaaaatttacttctgtgaacaagcaagatatatgttcaagtaaaatttgtgctcaatggctcaccccatcagttgccaacacaacaaattcatccttttcagtgatgcggtggtaggaaacatcaggcatagaaattagaccataatcctttagacaaaagtctccaaatgctcttgccatggccaaccctggcatgttgtacttcggaagccaaacacgagcaacatctggctcatctggcagagagaatattctgccacttcgttccctaattcgtgcagcttcacctgaaaacatgttttgcttcatttaggggagtaaaagcaggaaacaactatccgatgtgtacatttgtagtcatgcatgccatttagtaatgtagacacaaaatcttgatattacttatcaaacataaactatcattattattattattttaaaataattcacagaaacaagcctttacaacagatactgaagtgtgccaacaatctcagctatgcaggaaaaatatcggaattgatcatttcagaaaaaaagactaatgattttcattatatcaacaattatttgtagaaaactacaattattttttcgaagtcccaataatttcctttaaaaacgcttttcgatgatagttaccgaacgccggcaggcatggcaatgttatcagatccaaagcacccagtcacacctacttgaccttgggtcaccagtcagaccacattatattgaacaggaaaataccagcatgttgggtttgaacggtaaaaaaaacataactaaatcctatgcaggatgttaatagtttaaaacaatagagctgttatctcatttggtacattcgtgtctatgttaacctgtaggtgttggtttgaacctttctgcatgtcctttttatatttagcgcgaagtttggccaggtaaatgttcaacttcctatgccatgtgaaatccggtcaggtcaatctgatttgcctgggttcaaggttctactcagctatcctcatttaaatcaacatacatagtctctccttttgtgacattgcattactatttttgctcaacacatgtgcactgtactaattagttcacaaagttcttcagggagtgatgttgaactgaacttttatatcatactgggatacactatgtaaatagaatgccaaacttgctgcatgatgcaaaaatctgtcattctctaatcaagccagtccttgtagaccagatgtgacgtggcagatcaaatttgtcaccttgtggtttcaatgttaaaagaggtttacttgtaagatctttattatttccaatttgaattttgaatatttagttcccaaaagtgttaaaacagtatttaagaaccaaattcttcggatgcatcaaattgttaaagccctgacattctgaaagaggaaaatggcagtgcaaatcatgttgagtttccacacacaaaataacaggtatataaatgaagcatgtaccatataaaaatactttttactgcaatatcaaaaggtttctttcatcttgccaattgccatacctccaaagaaaaaataaatcacagtttcgaacagacaacaggtatcagtaaatcaaaggcgtgggacagacaactatgaactatcacatcccagataaataaacttattgcactgtgaaactaaataaactaatgaaagatgcattttatattgacacattgtgaaatcatttcagctggctcaccaatttttggttttcagttcagcaatttacaaatgcatctagtgtagaagcactgaaatattaaacttttccttacatttgagggaataagctagagatttttcctatgtaattttgcagtatcctaaaccttctaacaaggaagtttttactctagcacagataggatgactgcaaacctcagccacctcaaactctaaccagcttaacaaaaaaactagcccgacattctaacttgttcagaatatcatttccacatgttcatcttatatcaagtagtttcatgaaaaacatatatagttataatggtgtataaatctattttaagtgtttgacgcactacaataactctgtaccagaacttgttacagaacaatagtgcttctagaattctttgtatcaaaataatcagcagtacccacgatttcaattgtactggaggaaaaaaa

SEQ ID NO: 9526 - DNA, 32053 bp, Oryza sativa
agatagatagatagatagacttccaacttttccatcacatcaaaacttttctacaaacataaactttcaactttttccttcaaacttttaattttaatcaaacttctaattttagtgtggaactaaacacacccttatatcttccggtcgtcgactcctcgtccatagatactaccacatagcccagaggcactatgaccgatcaataatcacacatataccagccaataaagttaggcgttcgcgtgactctgaccttcttaatatggtatgaaaatttataaagttttcaccataacaaaataagtataaataatcatcttcactactacttgaaccaccgccttctcaaccatctctagtgttgtgtgaccatcttatctggacttgagatgtaacacagattaataaccttacattgcaatagcggtggtttagagtactgatagggtgattttccacgactttctaagattatataaaactcatgtatatgtggtatggtaatatcattgtcctatttccgcactggatttaatttaaaaatatcatttttttctcctcgttatagtactaattagaacttctttcaagtatattattcttattgcgtaagtcatgataatataagctaggtgtattttaaacatactccctccgtttcataatgtaagactttctaccattgtccacatatatagatgttaatgaatctagaaacatacatatatctagattcattaatatctaaataaatgtggacaatgctaaaaagtcttacattgtgaaacggaggaagtagtaatttctcaagtctcatctatagataaataagacaccttaaaatatgttttacaatgcaaccatttcaaagtagtgacctactactctgtcaaaaaaaaaaaaccgaattcctagctacaaatctggacacacgcaaattaattaaggattggtctttttttttttgacagaatggtaccaaattaattaagggcttatatataaaacaaattcaaattgtaaaactgtcatcatgcgtctgcctcttccttcaactaacctatgtctgttgctagtttatctcgtgtagaccctagaagtaccatgaagatatgctagcacctttttttttattttgctttatgtctttatcaaacggtatgttttgtttcatcgtagaatccgacggctaataatatttacttttcagtacttcagatatctggtcaattaattgtctattacacacatcgcatacgtatgatttgataatttgcttcgagatacctggattgaaagcaatgtttttaatgaaaatagcagatgcagcgacgatcagcacgtgcctccaagtcatacactgtgaccagatgtcaaactcgaagtttacaaccaaattaaaatgccaagcatacatatgtttttgttaacgagtttacaaccaaattaaaatcaagtccaagtccagccggtaacatggtactaccatactcttaaaaaaatagcatgcatggtaattaagtccatcacatcttaaatctttgaaaagataatcacaaaacatcatccaatagataatagatgttgcatcaataagaaaacaaaacagataataaatcccagtcattggaaaaaagagggtgttcttgagtttttcagtgtctccttcatatgtgggagagagatatagagtaaagaagacacccatcagaaataaagaaaaaaataaatgtttgtatgattgagagagatgataaaaacatttctttcttaaaaaaacataaattttatatatttttcactaacattcttcagtgacataataccagtaatagattattcttaaacataaaaaaaggataatgatagtcatgcgaatgcacgacgtcttgcactagtatatatggtcaataatttcagtaaatcgaaatgtgaacaggagcgattcaagtccttggttattgttgtagggctgcacaagcagctataggctatagctgccccggcgtgaatggaacactctggcaatattactgggtgcttgaataggctgttgatcgaccttcccgtctatctcactgggtgctaatgcaggcctgcagggtacttattttttacaaaatttattcccttggcgaaggtggatgttcctgatgcctaccaagcttaaaatgctgcccagtccaaaaggaaaagcaaatatgacagtggcaatgttcatagtagttaacccttgtctggttgttatatatttatcctttccaccaatttttggtcataaattagaggtgcaatgccatccctgtgtgttttttaatgagacctttcacagtccttgaagggaggcggtaccatatttgaccgttgatctggcgcgatctaacagatgatattgcttggtaccacgtcctcacatgtggaggtaccgattgagcatgtggtagtgggaggggtagaattgtactttcgaatcaatcctttctcccgatccaagcattcagcgaactctcttcgtccctccatctccacattcgaacgtcgtgccccccttccgtcttgcgctcgaacttggatggccgctgtctcctccactcccgcttgaatgccgaaactgccggccaccatcatctccgctcttcctcatcctttgatgctctccccctacggccctgccccatgtggatgtcgttgggccagatccaaccgctgaggttggggtgccagatttggttaaggatgcgcttccgcgagcttgcaaagacgctgattggagacctcttgccaccctctcggcgctagtacgtcagagggggagaccatgtggatatggttggtcgacagtgacggagatctctcagatggcggagatcagcgaatatattacaaatgattttctgtttatttcgcacgtcttggatgtggttggtcgatagcgtcggagatctctcagacggcggaggtcagcaaacatattgcaaatgattttctgtttatttcgcacacaaggcgttcggcggaaaacaaaatgctggcctcccaaattatagattataaatggaaagcgtccttccctgcaacgctccggcgctctctacttgtattattatactacaagtagaattcttgctctttcttcctcttcctaccgttctgccacttgaatctccggcgggagctgccgtgaactccggtgtgttctgctggtgtccctcccgaacctgagcaccacctctgccacagcaactgcaccgtctaagcatgcctccataaccccatttcctcatcctagtaggggcgatgcaaaagatgcagcatcgggtacaaagacgaagagagatagaaaccatgcaattagaacgttattatatgcatgtagtacagaagttgtcatctcataattaactctctgccccattgtaatacacacctagcaaaagtgaagggaaaaagagtgtattagtgtgtttctttaaataggagagtgtgttttttttatctcctgttagttttatctttttgtccttttacctttactgcaggattcttaacctgtaacattattgtagtacataaggagaaacatatttgccaaccactattttagggactctcgtaattatatatatgatgttatttttagtgtgaaagcctcctaaatatttggaaatgactaaatggggacgttttatattgtacttgagcaagacagctcgcaaatggattaagccccttctgtaattcatcagttaatgtgatgcatgattgctgattctgaacaaagacagtgtcaatgaaaacaattgaagtgttagcaattggtaacttgtgaggaattaatctgaatcgtcaaaaaactatgccaagatggtccctaagctttacagccttacgaaagcgattactctggaacggtttcagagagaaactatgatggagatcgacaatttctttggtcaaattaagattccaataaaatatcaaactaagaataggcttccatggcgcaaatataatatatataaacatcgtaaaaggatgcacaaccttcccagcatataatctctaataccgatttttgggtccagactcttgttttccattgggccacgtggcgccctacaaatttggttagggctcactgaaaaactgccacgtgtgatgcgtgaagtatccggactgaaagagatcgggaaaaaaaaacgtaaacatttgcctgcgtgtgtgtgcggggtgggctttgcatctagctaggctgtgcaaccttgggcctgggcctgtccctggcgccccacggcctttctgtaatatgtaatatgtaccgcagtccgcagtactggtgaatggcctcttcacgcagcgctaagcacgttcgttcaaaagaaaagggaagaaaaacagcgtgaagaactgaagtgtacagagccagtatagaacaaaataatagtaataaaaagaaaaggagaaaaaaaagaaaataataggattatgcaatcaactacaattactcggaatgaggaaaagtcacttcatgttagcatcatgtgtttctagaaaattagaaaaaaatagtgaaattaaatggaaaaaaaatatagcagcaataaggattgcgttaggacaatctaaagtctctagataaatacaatctagaatgtttacttcaaacaaggaaaattaatacctaaatttctatagaatggaaagaataaaaagtgaaattagatgaacagatatgtattctctgttaaccgacaagttcagcactactttcctattaattcggagcattttgtttttcttttataatcctcacattatactttttctagatactaggaatccatttattttggaacatgggtaagtaaagacaataattttgctatattttttgtttgtgaaactcaatatagttatagatgcttatatgtacgcgcgtatattactcactcctataaatatacacacgggcaccttttaggactgggccgttaggcatatatttgaactgattgataggttgcctatcattgaaacaacaaatagtcgtaaaatgtaagaactcgtactaagtctatgacctaaacctgtataggcacggaacctaaccagctgagctgcattagaataagtctatgacctaaacctgtataggcatggaacctaaccagctgagctgcattagaataactggatatatgaaatcaagataagtatgtttactatgtcgatgtcccttgctctaaataaaaccagcataaacaaaaaggtaacataagacacatttattttagatatgtatttcggacttattatacaaagagcaatgctacatgtactaaatttttttcttgctaaacttttactaacaatcatttcaaccgtttgatttaagtacatgcacaaccttcccagcatatatactaccctagttcattgctccaaacaggcacagatatagtacaatatatacatacatgtatattaattttgagtagtcgtaatgacctgcgtagcaccccaacatattgagttcaaatctacgtaggagtgaattttagattgggttatttgaagtagtaagttctaacttaaatggctgcatatggctgtatatatccggttacatgtatatgctgggtaaaaaaatactcttccgaaaatataaattcatcagttcttacttcgagtatgtacactgaatcatgtcaattaatttgaggtctatctttgttgtaaaaagcaactatgcagcgcagcaacaaaatgtgcaactagctagtacacggcagagttgcacaaagcagctggagtagactgcgacttctttcccgccggtgccgttggagctttaaatttcgaaattctttcccgggggaccgaaattaccaaaattttggaaatgttgaattttttttagctgaaattatttgaaattttctgtcttaatgaattttaattaaatttgaccaaaatcagaaaaatttacaaaaaaaaaaaaaccgaaaatttcgggcgagatgtgagctttccggtaggggacaaaattaccgaaatttcaaaacgaaattgcaaaccctgcccttaagtcgacattctcattggcggagtggtgaaaccacggaactttgtaaactatcagaagaaaactgacagatttcgtggcgtcactgcagcacaacaattcctgggacctcccagtccaaacatagatatatagaatgtatggtaggatggatgcaatgaccgagtgaatcataagtggaaatgcttcacttccaacaaatatatactccctccgtttcaaaatatttgacactgttaactttttagcatatatttgaccgttcgttttatttaaaaaaaattgtgaaatatataaaactatatgtgtacatgaaaatatatttaacaatgaattaaatgatataaaaagaataaataattatttaaattttttgaataagacaaatcgttaaatacgtactcaaaagttaactttgtcaaacattttgaaacggactgagtagaagctagcaacatgcatagcatatctcagccattaataatctctggctgccttaaaactatagccaattcttttcgtagctagaaaccatccacttaaaacgtactagagtacacatgtggtaacacaagttgttgtcttataactttttgccccattgaagcacacttgtgataaaatgaagggaaaagagtgtatcagtgttgtttaattagagaagtgtgtgtttgtttatctgcctcttaattagttttcccagggaaaatcattacaatgcaagcagcaaaaaaatcacgtcatgcaggggagggcccacgattttgaggttgcgtataagcgtactcaaagtagaaaggggtaaaagaaatttatctttgacagtttgtatgttgtttcacgaatcacagaattaggccataaaagttgtgtgaattggaccctcataggagaggaagccaagcctagaaagacaggtttatttactaattatatatatttttaacttttttataaacatacatataacaaaaaaaattgggtctccatttgaatacccgtgaatctaattgggccgctctgagcaccgtgaatggaattactaaacaaaatggaattaataaggctgcgttcttttgcaatggttcccaactccatcctcttttccgcgtgcacgcttttcaattatatggtttgttttctacaaaaaaaattctattggaaagttgcttttaaaaatcatattaattcacttttcaagttagttttagctaatacttaattttttttacggttaaacagcaggagaggctcctactacgctatattaaaaaaggggggaaattatgtacaagagctaatacttaattaatcatgtgctaatgtgcttttccattttctatgctggaagggaaggttcccaatcagcacaaacgaacacaacctaaatggctgttgattgagaattgtgggatttgtgtcacaatcaaaccttgggatttgtgtcacaatttgtgctccgacaatcccaactcgttctcctctagctctagagaatcttcggcacccggcgccggcatgttgagttagggtttaggatcccgggttggggtggaggtaggaatggaggcaagggagagggaagaggcttagagggatggttgtgagaggcagcgttcctataggcggtgagcagctagagccatggggatggagcaaggcgactggccagcaatggtgcgtggcggggaaaaaccagagctttgtggttaggacataggaaagatggtgggatgtgccgtagagcaaaaaagggaactggtgattgatccgggcgacccttggttccaaatatataatgtgtattttctctaaaacataagggaacaagggtaggatggctagagctaaccactctcaacgcatagatcccggtttgagtccccatgccacaagccttttctatgatttttgtaaaccaaaatcagtagtacggggctaaaggcaatggaatgggccttaatttggcccatttatctcctctgcctggttcgaccaaaggggtttaatgcccggtccgaccaaggtgttttaatgccgggtccgaccaagacggtttaatgctccgtttagtctaaaccttattgcacggtttagtctaaactcggctggttcaatctgggtcgaatgcatgtctgatctttaagcgtaaccgaactatggaaacttctggttccgtacttttccaatcgaactgacgacccggtctgtttttttcaactatgggacaggggcactcaccatcgctggataagaaaagagaaaggggaggggagggggggactatgggatggggacacttgccgctgctggatagggaaagagaagggggagtgggagcgaggccggtcaggataggtagcccggtccggttttttccactatcagacgggggcacttgctgccgttggatagggaaagagaagggggaggggagggaggccggtcaggagggcctcctcatcagcttccaacgagacaacgaggttgggcggcaccgctggagatgctcgccttccgtcgccgtcgccgccacacacagctgctggagccgccgcgtgccgccgcccgaggaccagaactgccaccggagccaccgccggaacaactgccgccatccagggagggaggaggagagggtgctgtctggtggatctggagggaggaggaggaacgagaggataaggatgggtagatggataaggagtgatgggtggcgattttttaatgggctatgatatttttaagtgcgcatgatttttttgacgggctctacggtaggttaagaggcctgccagctaaattaggcttatttttgcaagcggattttttaacctaccaccagcaaaaacggattttcgctggcggttctaaactcaccgccagcggaaaaaaatagggtaccgtcatgaaaaatcatttttcttgtagtgatgtaatttaatcaaacttagaagtatatgtatatatgataaatgtaacttacatatataataaaagtaatttacaacatatatatttcttttcatcagaatatattcatgtaagatcttgttataaagatttaattacaaagaataaaatggtataatcggactgtagatgggatatgtaatttgaaagaaaaagtatatttgaagtttaactattaaactatatttccttgctgttgcatgcttgtatacttaccacataggaagagatactagttatgaaaatagttgggtctctggtttaggctatcaagagaccaaaagcagtacagttgccacccgaaactgctaatgtacgggtgatcacccgcactcccctccccctgtactcctccctcttccccccttcctcctcccctttctctttcaactacagtacaccacaaaatttttttaaaaaaacaaaagttagaaaaatttatgtatagaaatactatatataaaaaaattgaattcaaattcaaatttgaatcgggtatgtaaacttttgacttataaactttggatctataaattttacatgtatagaaatactatatatagaaaatatttgaattcaaattcaaaattgaatcagatataattcaaattcaaatttgaattgggtatgtaaacttttgacttataaactttaggtatataaactttacatgtatagaaatactatatatagaaaatatttgaattcaaattcaaatttgaatcagatataattcaaattgaaatttgaattgggtatgtaaacttttgacttataaactttaggtctataaactttaggtgtataaactttagatgtatagaaatactatatatagaaaatatttgaattcaaattcaaatttgaatcaaatataattcaaattcaaatttgaaacgggtatataaactctaggtgtataactttagatgtatagaaatactatatataaaaaatatttgaattcaaattcaaatttgaatcgacttttggtctctaaactttagatgtgtaaacttgaggtgtataaactttagttgcataaatttaccaaaataagaaagtaatacggtgccagaaaaggaaaccaagtggagggggtgaatctgagagtcttttagccctatgccattaagaaagttggaggttacgcgtgtgccacaaaaaagttttgagtcacctgtatgccatgacacaaactttcgtttacccgtgtgccattccatccaccttctgttagagaatgagctctgacatgtgggatccacgtatgaaaatgactaaattgcccctgaagcattttcatctcactactcctctcacgtgcaatttctccagtgccctagcctagcacgccgccgccgccggtcgtcgccgtcgctggcacgccgccactgccacctcgcctcgccggcacgccgccgccaccgccagtcgtcgccgtcgccgccgccgcctcgcctcgtctatccaccgccgccgccgccgccggtcgtcgccgtcgtcgacacgccgcctcgcctcaccgtcaccggcacgccacctcgcctcgccgtcaccggcacgccgccgccgctgcctcgtcttgtctatccggcagcgtgcctctagtcgccgctgccgccaccgccggtcgtcgccgccgccgccgatttctcttccaaatgttccatccaaagtggctgaaatagagcaagggcaaaatagatctttcaaacctccgttagtctccgttagtgctgattccatccaaagtggcgcacaagtaaaagaaagtttgtgtcatgacaagtgactcaaaacttttttgtggcacacacgtaacctccaactttcttaatggcatagggataaaagactctgaatctgatcgctaccccatcgccaggacgatcgatcatccattagaagcccccgttggccctttaaataaaacgaacccacaagaaaaaaaacacaaaagtacatatgttctattttgcaaaaaaaaaaggataaaattgagacgctgagcaacaatagtggccccaggtgacagaccagagcagcagcccaacgtctgacattaatcgcggggtcgcaggccgcagcacccaacaaaccacgaggacgcttgcctgaccctctcggggactcctaatgggcgcgtgtgcgctggctgtccagctcgcgcagccgcgcacctcttctactggttatgttgattagttttaatgatatttattaatgctaatgataattatagtattagttttttaaaaaaaatacataaacaaatctttcaactcggacttgaaaacattcaagtcaaagatttgaaaattttaatttaagatttttttaaaatttccaactcggatttaaaaatttttaagtcaagatttaaaaacttttaacttagattaaaaagctttcaattcggatttgaaactttcaattcagacttgaaaactttcaactcagatttgaaactttcaattcagattcaaaaacattcaacaaggatttgaaaactttcaactcaaatttaaaaactttcaactgaagatttcaaacattcaactcaaattttttaaaaaaatcaagtcaagatttgaaaatttttaactcaaattttaaaactttcatcttaaaattcaaattttttatttaaattttaaacattcaacttgaatttaaaaaaattcaactcaaattcaaaactctcaactgatattgaaggtgaaagtatcagtttataaaatatcgcaaaaaaaaaatcacacgcgtgtgcgaaaaaaagaacgatttccaaaaaaaaaaaagaaaaaaacagagcgatttcaaaaaaaaacagagagagagagagagaaaaactagggaaattgcggaaagaaaaaaaggaaaaaaacttgtcgcggcatcagaaattacgattttgctaggaatttgtcgggtgatttttttgttgctatttcccgtttttgttgccgttggatctgcgccgagatttgtgccaggaatggggtggacgtggtcatacgtggatagggcctcgcgttggattccctggcccgattactttgcactgtgcaaatttcgatttccgcgcttgtccgtagccgttttttatttcccctcgctgatcccgctctctcctcgcatttctctctctcgctttccccttttcttctcttctcttctcgttttctccgcgaggcgagagagagatctcgtcggagtgagtgcttgctggagaggtttgtctcgtcggtataagtgctcgccggagaggactgtcttgtcggtgtgcatgctcaccggagaggttggtcgctggcgagatttagtgtttagatttttttttgttcgatttgattcagtccaggtccgattcaaattgtgttcgggttcaatctcggttttagttgttttcttgttcgatttgattcaatgtaggtccgatttgctcaccggagaggttggtcgctggcgagatttagtgtctagagtttttttttgttcgatttgattcagtctaggtccgattcaaattgtgttcgggttcaatctcggttttagttgtttttgttcgatttgattcagtgtaggtccgattcaaattttgttagggttcaatctcggctttagttgtttttgaatcgatgtaatatgatggaaagctcgccggagacgttggttgccgtagttttgtttagtttgtctcatcgtttttgtgtggcatccaatgttttttggtcggtgaaatcgtgatgctgctgctgcttcgccaagttgcgcttccaggtttggagatttgttcttcctgggctgtgggaagcgttcacggaatggatctaagattttgttgtttttgttgctgcagagcgttgcttttgagttggggaatggttgtttagcccgcggattcgggggttttaggggaagcttttgattttaggggtgctttttgcttagcaaatcctgtttctgtttttgtgcttgttgatgtgtgatttagtggcaaattctaggcgtgaagcaatttttcagaatcatgacatggctttttgttatgtttgtattagtgaatttttttactgaattactgaatttggtagccagcaaatacatgatgtgttcattactttgtaaagcttcacagtgattatattttttatgtcaatgtaaatggatctggatgttgtacttgtgctaaagtgaagtttctacatgattgtgttttttatgtatgatttttgttgtaaagtgaagtttgtattgtttgttcatttaactcatgtccaagttgatgtttatttattgttctttcagatgcctcgtgtccaaacatcaaggttgggtaaaaatcccattgaagttgattctgatggaggtgaagatttacatgttgattatgaagttggtaatgatgtaagttatattttaaatttttattattgtattatgctgtttaagtttacctttaatttggtattacattatttttctttttttttaggttgatgaaggtcctgaacatggtgaaattgatggtttattctctgttgtgctcaggaaaatggtatgtgaatttttttttgttgacttgtgttaatttaattttatattgtttaatgggttgctcaatttcatatttgtagattgttcaagaagtgaaaaagaatttggttgacacttcttctgtcaattttcacaatcccattgtatgtatcttttttttattagcatattttattatgcatggcattttatttgttctattttattgggtttcttattgcttataatcttgttttaacttatcaatgaaacggagaattaattcggtcaaaggaaatttagtactaatgaagtggatagttattttcagattggaattgttctgttttttttttgcaaaataaaattttatatttgttctgtttggtccatgtgtacaatgcggtactctgaatcttgctaccatgctattacagactactgttagttatgttgaagatgtgagtatttttcaggttgtagttgtgactatacaaatttgtatctattctctcaacacagttcagtgcagccaacgttgttgagttttttgttttttcttctctcgttgtttggcactaataccttctttgttttctttcacatatcctgcacctaagtatccttggtagctttgatgcatgcaacgtcatattcatgtttcccatgtaactaattcaatctagtattatgcaaacatagccaccataacacgtgttatggatatgtttttttttgtgtgtcattgtgtctaattttttctcaagtatatctgttttgatgtgtgatttgtgttagtttgcttggattagttttctcaagtgtttttttttgttctacacgcagcagcttttaatatgatatgagcttaaactttttttcggggctgtgcaaatttgtaaggttgcaaaataatagtctagtagtgatggtttcttcacttatagcttagttcaggtttccaaaattttaccgacaatttctactaaaattacagtacacttacatgctatatgcattgaatttacaattgtaattttaatttcaaatcactgtaatttctacttctagtgtttgattttgcatatgtatggcagcatggatagtgctattaagattgggtgctatctcaagtatatctgttttgatgtgtgattttgtgttagtttgcttggattagtttcctactagtaaggtttcagatatattatgattttaaatgttaggctatacagccgggaccaaattttatataattctggtcatgagtgtatatggttgcctcttagcctttataagggtaccccctcactccctacctccctatgatttttttttgattttattcatgctaatgtgctgatctggtatatggtaatgaaattattatttctttctcttttagcttttaaatattctaatttagtaaataagtttttaacacacttctacacttgtttttaaggataagaaatctaaagttcattcgaagactgagccctcatatagcagattctcaacaaaatatttctcaacagttctatcttctttatctcctgatcagcagcgtactattggtgactatggttttaattctatgctgatgtttgacaatgcttatgtcccaaacaaacaaatttgcttcttggattgcaaatcatgttgatgtgaagtcttctcaaattgttttgaaagataaagtcattgcaattaataaagaatgtgttcattatattttgggtctgcctattggtggtatggagttcccaactgattgtgatgctggaaagtcctttattctttcaaagtttggcaagagcgctcttccatctgtgagattctttggtgataagttcatccgaaaggaaactctctctgatgatgaagttattacttcatttttgattgttgcaatggcttgttttctttgtccaaactcttctttggtccctagcaccaagtatttgactgtgtttgagaatgttgatgagcttcggtcatatgattggtcaaaatttgtgtacgaatggatgatgacttccatcaaaaagatccaaaagtttaataccttgggtggatgctggtttctctgggcagtaagttattaaattttttttccattatctttgttccatattattattgttttttaattaatttttctttgctttttcatattttattttgctaggtgctttatctggattatgttgagtttggtgacaagaatattcctattggttttcctagaatttctcactggaagaataatatgattactttgtattctgaccttgacaaagttgatgaagaaaactttggccttaggcccattaaggatttcaatgatacaacttatttcaaggtacatgttcagttcaattagttttatttatttttacttgtgtttttcttttcataaattaattcttatcattcattcatctttacaacctaaaattttccttgttttaggttgtaccccctgaaaatagaattaatacattcagagataaattggagtctgctattggtactatgttacctgctttcattaaggagaaaatttgttcaatggttgttagtcattgttctgccaatcacattgttgacagtgagtcttgtgaagatattgctatcagcattatgctcttgctatgtgaacatgctggttctagagatggtggtgatcctgatgaaaacttaatttttgataatatcaaccctgggtttcagcctaactatgcaattgatgttgaaaatgaaatcccttgtgatgctcataacaatggaagtaagttttcttctatgttcttttaattttattatattttttaatttttcttctatttatatgttctttgatgttttattttttttaggtaccaataaatctgttgctagtaaagctaatgaaacaagttttcgccatacaccttctcatgataaggaattgggggtatgtgtctgcttcttatgattataatttatttttttagcttaagttttctaactttatgttcttgtttaggtaaatgatgattctgttattgtctctaaatctgttgttagattttccctttcaccaaactttgaaaaaggtacttggtgatgcattgttaattttttattttcttaagtttgcgttgctgttaattttttatttttgctcagatcaaggcttactaacccctgaagttggatatgctaataactccaattcacgatttggtttgtgatttttctttgctagattttatcttaaattttctatttcgaaaatttgtaaattctgttagttcttatcatagttattttgccagcttcaggtcctactgtatctgctgtagctgctgttaggaatgttgcaaataaaattaaatcaagattatctcaactcaacaatgatgacaaaagaggaccattgttccctgatttaattgattcttgtgaagatgaagctgttggttatgctaagtcactttcatgtcaaaaggaatatcttaaccctcgatatgtcacttcctcttcatcacaggtattccttttttattggcttgtgtcttttcttttttaaaaaattcttgaatagatgttgtgatgtcatgtttctgtatgctttattttttgattttctcttatttttttatttgttgtagcctggtatatcttttcactgtcttgacaattcacctattcaagtaattggtataaataataatgaaggaacaagcagaactcattgtattcagaatgtgaagaagaggcgttttgatgatgttactgtatgttcttattcttgttgactatatttatatattgtcctaagttacttttttttctataattatttttttttgctttttttttagaattctcctgatgtggaatatcttggtcattctatatttcctgattgctgcaaggtattgtgtacccaaactaataatttgtataatgccaagaacatgttgaaaagtaacaacctggatttgagttctaccggtggaaaattacctccccatggccctagaagagttttagttccttctcggaaattttcagatccttatgttctttctgttagacgccaatttccagtgtcagatcaagaaaagagacattacaatgcaatatgcaagttgtccgagagctctaaatggcataggtacagtttcctttacatatatttttatagtttttgcattatgcatgtttcttactttgcttttctttttatatcttttttttgtagttatgatgctgtagacattgataatgttagagcaaaattctcttcttttgggcaatctctcatgaaaggtggtattgtattgagctatgttatcaatgtgttttgccgtgttttgttcaacaacaatcatccttcaaactccaagagacactatttcttctcttctattggtgtaagtagttatttttcaaatttgtgcttttttctgttaatgttgatatgttacatattttttggtatgtttatttcactttattttttttcaggaactattgttaactgatctatcttgtgctgatttgagcaaggtgaaaagatcgtttcttggagcagctagtgctaggaagttgcacctttctgacatggtattttttttgttttcatgctcatgtaaattttccaaagttatgttgttaattctgaatgattttttgcagctatttttccccatcgaacaccttgaacattggttcctttttgttgttgatataaaggacagaatgttggtcctcttagattctttacatgaaaaaggtgatccctattttgaagacattgaatgcttactggtatgatattttaattttaaatgcgttttcattcagtttttttcttcttgttttttgtagttgattgattttttttattttgtattcagatcaataatttacagacattctgggattcttatgatggctcttcaattgattttactactttgaagaaagtttacccttgtgttccaaaacagagatcttggtatatttttttgtgtttaatcttttctgttcaaataattggagcattcaaaatacgttatttcaggaatgtgcagagtcacgcttgtattacattacttatttgttgatgtccaaattctcaatacttctttactttagccaatgttttctaattttctaaatgtcattaattgtcctctcattggggcattgtagaatgttcttgcttcatttgttaactagtgaaattaccatgtaattctgtgagctagatatttttttattctgtgtgtgctatgctcacacttttgctgtgtattttattttgtgatattactgtggtgagtagtttgtgtttacattttgtgatattactgtgctgcatatatttttatatttttcgcgtattgcatatattcttaggatgttagtaataacacttgcccaatttttaacatactaataataataataataataataataataataatacaagaaacaagaaaaaatgccattgtggtacaactaaaatcaacaatatcatgaacagtactacctaggttttatttctttcttttttgtaatttaaagagttgtttcaattttttttgtagctttgattctggaatttttgttatgaagtgtatggaattgtggtcatcaagggttgttctaccaaatgaattttcttcagatgatattgacaatattcggatgctgtatgcaaatcagttattcttccatccaacgaataaaatgctgcagactgaagttgaagaagttgtgctcaattggtttaatcctgtaagtgtgtttttatttttttttcctattcttgttttttgatacatttttagttatgaaaaaaatgtttttcattttttatttgtatgctcaatttgttggtgaaggctgaaatttttcagaaagatagttgctatgaaaattggtttaatcttgtaagtgtcttttattttttgccattcttgttttttggattctttcatagttttgaaaatattatttttgtttgttattgtaggatcaatttgctggtgaaggctaaatttgtgcagaagattagtcgctatataaaactgtagtgtgtgatagcatagtggaatgtataggatcatagtgaatgcatttttgcagtgccattacatattcctgtagtgaatacagatgttcacttacatcaaatacttttagtatgaatacacatatatagtgtgtgtagtgcagtaatacagtgaaaaacattaagatctaatactttcagtctcaaaatttgacatccttgttttctgtcttctaatttgatttgttctttttttgtccttccttgatctttaggtagcttgcttcctttgtcattttcttcatgtttcttcttcctagcgggcattgcttgcttctctattgtccctgcaatacaaaaatttatatccattagcttgattttttttgcttgcccatgtttgtaatattttacatattattcatttcttttacttcttgttgtagtcttctgtattttctttgtacttcttgcaattcgcatcagcgggcaattttctattgtgtgacttgttcttccacatcttgtacaatgtttttttggctgttcttttatcttctctaccatcccttttgttcttgctgattttttcccctttgtgttagctatgtcagggtcttgaatatcttcttgctcatttgttgtttctttttctgctttatcctcacttgtgttttccaccgtgttgctttcatcaattgatgcttgattttgagctgcatcttcaattatcaagtcaaggttgctatccagattatcaatctctcctagcaggtactcatatgtttccttactttttgatgcctttgatgtcatgttgcatattcttctagataatacattgaaccttagcacagaactgttctcatcatttgttgcaagttgcatgctcaccgttaattttctctcctttttcctccatctttcaattatgtacttatcaggaatcttgctcattttcagatacaacatcactttcaaaacatggctgcataggattccatctttggagaactttgcacatatgcacacgaagttttcttgtggtaagtctgtcatcacaacatatcttcttggtctgaattcttgttgtttcagatttggcgctgcatatacttcatatgcttttgcttgttgtatagctgccacttctagatttagtgttcccttcaattcatcttgaaacttatcaaatatcccatggttgtataggtctgctgcttgttcttctatcatgtcatttgaccaaaaagactttggcttcttgtttctggattcataatctttcccatactcagtgtcgaagatgatgtcattgattgtttcatattccagtagaaaagtcatgacactatgtgttgggccaactccccttttaaaccttgcatttgtgccctcactaagtgctgtgctatgtataaatgggcaaaaatctgttttggaatacaccggtataaaattcttccttgttctccacattatttccagatatttgatattttccaagttgtattgtgcaatcatttgcaaccataggctttcaaattcagctcttgtcaagctattgtgcacaatgtcattaaattctgcatagagatctttccttctcttgtctgaaaatgtatttcctgacctttctctacatttcttcaaaatgtggaacaaacaatttctatgtttgctgtttggaaatacttgacgtatagctgccctcattgccaagtcttgatctgttataattgtttctggatgttttcctcccatggctgttaggaacgtttcaaaaacccatttgaaagtttctgtagtttcatctcctaaaaatacacatgcaaaaatgcatatgtttccatggcctgtaacactgactgtgaatactgtgtactattcgcagtaatatttgttatttttttcacttgttatattgaatttgaattttatgtttgtggaaaaacatatttcatattattctatcatatctgtcatacaattttttttataatttttaggtgacatacataaaaggagggaacagggatgttcccttgagggataaatattcacttctggaatatcattccttccacgaaaagagcagttttcgtgaagcattgctcccagatgtcaaaaagttcattttcagtgaaagcaatttcctagccataaaaaaacgttgacagttaaaaaaaaccattttctagtactgttggctttctaggtctggctatgttgtaaacaatgcagcagctagtgctaccctaaacaaccttgttatagtctccgccagtaaaaccagcaaattagctgcttgtgtccaatacctgtgtttcaattctttggaatctctgggattcccaatgcctcccaaaccaaaaccgaaggtgtgggatgacggataccggtgtataaataggacgaccatgactgcaaagaattttcaaataacagtacgaccagtgaacgtttgacatgccagagattcattttatatcttgcacaatatttatgggtgcaagtccataagtccaaattaagttggctgaggaagcagaaatttatgaaaatatacaaaggcatagaattatgtctaacacgtgcttcagagttgttgcccggaggataggttgatacatctatttttgggacaagattgatacgtacaaagtaacaaccactgtctgagatagggttgtgttactactgcagaaaataacattagagtcggttcgtaactgacatcaatgcctgaaatgaacatatatatataaggcatgttactcatattttaaattactttcatgtgatactaatttcatatttattgaaaacataacatgggataaattaatagtcaaagtatatcattgaagaccgtataaaaaaatagacatttggacggatttagtatcatgtaaaaagaccatctactcataactcacgatgtggtaattaaatcaccgtgaataaaaggcatatgcccctggccctgcaaacgtagctactacccccgttccataataattgcatttctaccattcaaatttgtctttacccccgttccataataattgcatttctaccattcaaatttgtctcaaaaatattgtatttctaataatatgggaagcaacaaatggaatatgtacccaaacctttcttttaattaagtttacatatggaatgtgtattcctcaaccttgcttttaatcaagtatacatatggaatatgcatgtagttattaaatagggatattgttgtaaattgtgtttgttgttaatctatctctaattttctagaaatgcaattattatgggacggaggcagtagtgttcatataattaattggcaggtcctaacatgaaatgcatcattattggatagagcattagagcccctctgtgtcttcaacccagatcttcactaagggcatcagcagtgtgttcttcggcttgtgcagtctaaagataaataaaaagttggtttgatccatgtagtgtgtaaaaattgattttatgggacacacggagaaaaaattcaacctttttcggcgtcctcccgtgtgcgccaggccaaagtacgcaagcaagtattttatttaagggttgtttagattgatgtcatttcaaaccataccaatttttaagtaaaattattgaatctgtgcatctaaactctggcaaatatataagaattcctgccaaaatttggtaatattaccaaactgccaagattttagtatagccaaaatttggtaaggtttatttaggctataatctgaacaaacccttaatcacatgtggtcgaactctctcttttttcttttttaggactggtcgaattctcttcgaaagtcattttttaccgaacacaatctaatcgattctaacaatgtgcattgttcggtttctttcctctaaaatcgatgctagccccacactggagatgctctaccaaactagacacgggtagttcacagcatagagcagctcttgtagactgtacccggtacttttctgatcgattgtgtcactatatcgacatgttgttgatccctcctctgaagaggttagccagtacacctttcccaactttcagaggataaagggatgcattctcaagacctcccagtccaaggctagatagggcatttctagatagggcatttctaattgtttagttcacagtataaaacagagatatatgtaggaggatgcaaatcatgcatagtactctctgatatggtttctctctttggtaacaagatgcatgcatcgtctggtatgtatatactgtctagtactctttaatgttagagatttgctctggtccaacaaaaatatcttgaggtaccggtaactcacggtactaaatcgtttccgatcgttggatctaacaatgcacatcctgcccagctagattcaacgatcgaaaatgatttggtaccgtgagataccggtacctcgagatactttttgctgggccggacaaaatctcttaatattaacatcccttagcaactactccctccgtacctaagactggatgtaacacattctaatataatgaatctggagagaggtatgttcatatcagttcgctaataggatgtcagacatccaatactagttagttttttatgcgacgtatagagtacctaccatgtgatcgatcgatttcaattgcctagttattgcttgcaacaaagtctgaatcgttacacatatcataaacttgacctaaaaatctactatgcacaaacaagtactcttctccgttctgggatgtaccaaaatgaatctttatttggttggagtaggattgaataattgttttatatatgttgtgatattttcttcccttctttagagtttagagttggtatttctatttttccaggtggtatataccctaacgctgggggtatatatctcatatcgaattaacgttataataaggtgtatatcgcctgaatgaccctcgtggtctcgcctcctcagccgggacagcgatggggacggatctaggcaagaggtctgccctgaccccgcatatgccatccgccgagccactgtcactggcacgataacacctagcgatataaatggggaagaggagagaaaacgagcgggagaggagaaaatgagagggagagtgagtgaaggacaccatgggaaagggggagtccaccactatggagagcaagagttgggggcggcggcggacacgaagatggatggatggccgcaaagtgggtggcagcgaggagagagcgaaatgtctaccggtgtgggtggataaggatgaatgtgtctgttgacttggtgtggggataaatcagaatctcacccggctagctcgcctagctcaactcagattttataggtgtaatatgtttatagctgtagattttttaattaaccgatattataaatttataatatattaaatgtgtcttttttaaaaaatactaatagtatcgatgttggttttgtatagaaccggcacctatgattgttcaaaggtgactgtattatattttctcacctagcgaaggcgggaaaagataaatagctgccggatttaaataaatcaatatataagccgttccctattaagagttctgtgacgatatctcatgttaatatatatatcccgtcaattatttcaaatttttattatgagtgacaaggaaagatgaaaattgacctaagagagtaaagtgcataggagatccttaaacttgtagtgttgtgttatctagatccctaaactctcaaaatgcagattcaggttgtagaacttgtctaagtgtatcatttaggtcccaaatcgacatagcccctatagtatcctacatggcgctgatgctgatgtggcataccacgtggatgtgacgtgtccttttattttttttcttcttttctttttcttttttgttttcttctcattcttcttttttttcctttcttctgctcgggtcacggagaaaggagaataatgaaaaaaaagagaagaaggagaagaaaaagagaagaaaaaaagaaaaggaaaatttttaaatgtccgtgtggcatgccacatctgcaccacgtaggattttgaaggggttgtggtgatttgggatctagatgatacactttgacaagttctgagatttgaatatgcattttgagagtttaaggaatctaaataacacatccctacaagtttaaggaccgcccgtgcactttactctagacatagttacagagtgcatgtgtagtaattagtcttaaggtatctcttcttgttgcactcctctgactttattgaggtatatccgtatatgtgaaagttgcttttcagtaggctcaaaacaagatatcacatgccaaattatttgcttacactagaacggaaaccctcatctcaatcgggcggtaagccccatctcaatcgggcacagcgtccgtcacaggctagaagtcactgatgtgaagagttatctcaatcgggcaaatggccgtcacggatgaatctatctcaattgggccctaagtaaagcccgtcaccgatagctttgacccagacgaccagtcaaactatagcccgtcatagatgacctatctcaatagggccacaattagtgctcgtcacagatgactactaacctttatcgggcctaaactagagcccgtcacagatgatacttatctcaatcgggcctaaactagagcccgtcacagatacctactgacctcaatcgggcctaaactagagcccgtcacagatgactattgacctcaatcgggcctaaactagagtccgtcacagatgactactgacctcaatcggacgtaaactagagcccgtcacagatgactatcatctcaatcgggcatttagttatggcccgtcacagatgactataatccacaaaaaaaataaattttgttttttggctaacctcaggcctttgctagccatgcccgctgcagaaatgacagaaacaaacacagatatccaatatccccagctccccagcatcacccattcatatacatatgcattcacatacacagacatcaatatattttacacaaccacacattcacagccatctcatatttcacatccattcacatatttcacatccattcaaatatttatcatatttcacctgcaaaaccaaattaattggatcaaatatttatttagcaagtcttaacataaacatatgaaatatatacataaatataagcatcacagttacatcatcacagttgcataataagtgttcatcattgcctaaacataaaagttcaacattgttcatcattttagtttaagcctaaacattcctttggggttaattatttcgcagaggataaagctggctatctcctcgcgaacctcctcaaagctggtaggcagagacttggttattgtgccctacattgtcataattctagattagttgatcgatcatatataagtactaaaatgtagttagtctatcagaattgagaccaccgacctcaaactcagccaaagtcttcaccttttctctgtacagaaggcgcatgttgtggcacacatggaatccacactggtcacctatttgttgcttcaccgggaagtcttttttgtggatgagggtgtcatgtcctgtcttcctgaggcctcctctttgcacgtattgggcccacgcttcatctatcgctagttgaattagggtccaatcatatgcgttcttatcaattctggagtttaggtagtaacatgtactccacttaggtgttattaccagaaggatccaatgggcactgcagcattaatatagtgaaagttaattaagtactgaaggaatgtgtcatgctgttgtgtatatttagataacacacttactattgattataggcgcacataatgtactccttgtctcggcgggaccacaaggtgtcgtagatgtagttgaccattccttgacggtcattctggagatttgtgacagtgaccacttgtggatcaaggaaggcaacttctggtgcattcttctgacaccattgccaacttaacctacacacaggataaacgatcttgtaagctagttaatccgattgttattaccagattgagttgggcgacaatacttacaaggagtagcacttaaggaggcttgtgtcaaccgctcggagcctgtagaggtcgaatagatccttgaagtcgacgacgatataatctgttggaccaaggaatggctttccatcgtgctctccaaggatatcggtagctttattcggcttcctggcattagatttctccatgtagtatgcgtgaaggtccttgcaagcggtgcccattgcggcaagcacgtcatctccaaccaatggcatgcctagttggaactcctgtggagcgacatatttcttcttgatctctttgcccttagtctcttcctggcccttgcccagatctagctttcttggagctagaagcgaggactgcacctttcctccccttcctctcccctttgcttcgggtttatcgagagtaattctctaaggggaagagtgtgccttcctgctcttcttcatcggtgggggttcatgaatcgccttgctgtcggccttcgttcggtcctccccaaaatccgtgtcgtactgcaactgcacatcgtaagattgtgcatgacaatcttgagcaggaggggctgaaggagcagaggcgggtctctttggtggacaaccgcctggtgcagtggttggcctcgctgtaaccctgatctcaatgaggtccttgggccattggatgaaggtaccatgggcatttcctagtgagaggacctcgtcgttcagtggatactttggtaggaatagctcatattccggcttcactgagtcgacttgtacttttgcacagtcgcccctgagttgcgctccatgcactcttgtctctagggtcggcttgtacgcaagtccctcggctgctggaaccgtgtaggtcggcatcaccctaactgtgagggtgcagctcgttggttcctgcgatagattaatcaatttttttagaatattatatatcatatggactcgttaagtctttcatgcattatggacgaaacttttactgttatgtggtcgacggcgctgtcgaccgatgttggattttccgccacatcagttgatgcgcaactgctgcgtttttgggtgggacttcctaactcttcatgcgcagcagcagcagcggcctgggtgttctgttgctcttctcggatctcttgcctaatcttggccctcatcgactcgagctttttgtcgaattcagatgtcagctcagctcttatcgacgcccggatcttggcttcaaggcgtgcatctttctccgccttgttggaagaccgcttcttgtactgccacgcgtagtctggtaatccatacttctagggaacagaagacccaacgccccgtgtccgtccatggtattccttgttgcccaacgctttcgtgaggaggtcgtcctcgcgtctttgagagcaggcctcttgtgaggcttgttgctcggcaaccaactccttctgcattacaatttagtggggttaaataaactgcatgatcggaaccaatgcaaacatctagtttgactagacacttactatagcttcgtacactcattgatcttctggatttggcatgaagattgtgccatcatccttcttctggtacctggccctggcccagttcctagccggagggtgtgggatatcaccaaacacgagcggcgtgttcgattcctccgcttcttcatcctcacgctgccattcctcttccttaccggcatatccggcggtgccaagccgatgcagatgctggttcttggtctggagcaagcgatatgcctcgctactagctctggactcggaggtcgacttctttgcatggaattcctcccagacctgttccgggatccaaggaaatttctctcttggatctggattcgccgggttgtagacgaactcgctgactagcttagtcttgaagttcttccaagcgttgcccataaccttgaaagcagcccgcctgagatggtccgcatgctccgcaggataatcgaagctctccttgaacgttagccaagcaatgtccttctctgcggccgacacgtgcttgatgtcatcttgcagaatactgaacttctgcctccctatgaccgatagacctaaatcggctcaatattttccttggagatgtcggcaaccctacggcgtccaccgctgttatgcggaaccgttccttagggattttgttccctgtcctaggagtacgtgcccttgaggacccactagttgtcgtcgatattggttcaccttgctgagacatcgtctacttttttctaaataacgaaaatatactattcagtgcttcaatggctaagaatcgaaagttctaaaatctattagtcacataaataaactaaattacacatctcacagtaataaaatgaattgaatgtcacataaaaataaattaaacatttcatctattcatctattcatccacattcatctcgaatcatctattcatccacattcatctcgaatcatctattcatccacattcatctatccataaacattcatctattcaaacacattcatctaatcatgtattcatccacatgtaaaatgaattgaatatcacatataaataaattgaataattcatctattcatctattcatccgcattcctctctaataatctattcaaccacattcatctatccatacacatgcaagtattcaaacacattcgtctatccatacacatgcaagtattcaaacacattcatcaatcgaaccacattcatctattcatcattcatgcgcgatggaggactcacctgggggtcggcgtcgggcgtcgggcgtcgcaggctcggtggaggcggcgtcgggcgtcggaggttcggtggaggcggctgcctcggtggcggcggcctcagactcagcgagggaggagtcggcgaagggcggcggtgccgggctcggtggagggcgtcgccggggtcggtggaggccgcggtgtgctcggtggaggcggcgtcaggcgtcagagaggagtaggcgacgacgatgaggaaggatgtcgccgggctcggtgggggtcgtcggtgaggaggcggcggcggtccgaatggagggcggaggaggctcggtggcagcgaccgcgggctagtggcgacggtggcgggctcggcgatggaggacaacagcggcgctagggttctaaggaggcgggaaactatagcgggacttagaaaaattttcgatctgatctgagaaaccctagttatagtagagtgatgagtcatctcaaacgggcattgccgtagggcccgtcacagatgactcatcggtgacgggctccatcacggagattgagatgacattcaggcccgtcacggatgactcatctatgatgggccctaagataatgcccgatagagatagactaatctctatcgggcttaaactaaggcccgtcaccgatgactatttttctatttttcccatcaagtctttatatttgtgagtgcaatatatatagctgctatataataattcaatttattagtcataatacatttttggatagtaaatgatttcaaatcaaaatatggtcaacaacaaaattgtagagcttatcaagatctacaacttttattttggtcatttgtctatataactttgttcccaagagcttgaaattgattttgaaaatatgacaaattaaaacagcatttgtaaatagtaaatgatttcaaatgaaaaaggcaacaacaacaaagttgatcctctcatcaagattggcaacttttattttggtcatttgtctctataactttgtttctaacagcctgaaattgaatttgaatatatgacatatttaaacaacatttaaaaatagtaaatgatttcaaatggaaaagccataaacatcaaagttgtacaacttttatgttggtcacttcttcatccgacaaagtgatagtaccaatgtttacaaaattgacatatatgtgttgatgtttataaaccagatgagagaaatgtggtttttgtgaataatgtaactatcaccttgtcggatgaaaaagtaaccaaaataaaagttgtagatcttgatgagaggatcaactttgttgttgaccatatttccatttgaaatcatttagtatttacaaatgctgtttagatttgtcatattgtcaaaatcaattttaagctattgggaacaaagttatatagacaaatgaccaaaataaaaattgtatatcttgatgagaggatcaacttttttgttgaccatatttccatttgaaatcattta

SEQ ID NO: 9527 - DNA, 37632 bp, Oryza sativa
agtcatctgtgacgggccctacggcaaagcccgattgagatagattaatctctatcggccgtaaactaaggcccgtcaccgatgacttatcaagatctacaagttttattttgttcatttttctatataacttttttcccaacatcttgaaattgaatttgaatatatgacaaatataaacagcatttgtaaatactaaatgatttcaaatggaaatatggtcaacaataaagttgatcctctcatcaggatctacaacttttcttttggtcatttgtaagaaaacaaaattagccatattaatgactacacatatcaagtctttgcaataaaacaataaaacaaaatacttcattcattacaatagataagtacaaatgcatcggtcacaagattatgccttccgtatgatctgaacgagcatatgccacatgctcttggggatcatcgtcaaggtcaatgtgaggtcttacataaagattatggttgtattcttcttcatcgacgatgttgtcaactcctacaattcggcgctttccatccctcacgatgtgcatcttcttgtttgaagggtcttttatgtagaatatctgctcaacctgtttcgcaagtacaaatggttcatcggtgtatcccacctttgatagatctactaaagtgaaaccttccttgtcggctttgacaccagtccgtagattcacccaacggcagcggaacaaaggaaccttgaacttgacgtagttcagctcccagatctcctcaatgcggccgtagtatgtgtttgacccaacttgatcctggaatgcatctatacggacgccgctgttttgcactgtgcttttgtcatcttctttgacggtgtaaaatgtgtatccatttatatcgtatccttgccatgtgtctacggtccaagacggtcccatccccaacaattgtactgtctcatttgggacatccgtggacattgtcacacgattcttgaaccattcgttgaaccgagaattatgttctctgttaatccatgcataagatcgtcccaagttctcatctcggatttttgctaagtgctcctcaaagtatgggccaacttctgccatatgttggagtacagcgtaatgagcctgcgcgtacgatgcttgatcgggcctaattcttttccatccgattgtgccaacacctgacaaccttccctcgtgatgagatgcaggaactccgataggatcggcatcggacatgtaattgacacagaactcactcggtcgtgtaaccttcaataatgctcccctcgggtttagctctattacgaacgtacgacttcagaactcccttgtacctttcaaatggccacatttcccttagaaaaaccgggccacataaatttgtttgcttcaccagatgaatagggagatgaaccattatatcaaagaaagatagtgggaaaaacatctccaggtgatagagggtattcacaatatcggtctgcaacccatctagatcttctggatttataaccttctgtccaattgcattgaagaaggcgcatagacgttggatcgtgtgacgcaccttcggtggtagaatgcctctaatagcaactggcaagatttgtgtgattagcacgtggcaatcgtgagacttcattccaacaagttttagatcgtccaatttaacatacttacttatcctcgctgaatagcccgatggaactttaatatccttcaagcatgataacatcgcgatcttctcatccttcgacaatgtgtggcaggctggagggaggtacactctacctgtctctgcatctcgtatgggctggagtttcatgtcctgtagatcaaggcgcgtgttcaacccgtcctttgtcttcccgggaatattcaacatcaggccaaccaaactctcacacacattcttttctacatgcatgagatcaatgcaatgacggacatcacgatctttccagtagggtagccgccaaaatatggatttttttcttccacatacccttctcctttgtcttgctacgttttcttttcttcccaaactcattgcttatgtccttgaccatattgtggacctcatctccggacaaatctttgggagcaagctgaagttctctcttaccgttaaaaattttcttccttcttctaaatgcgtgacgtagcgggagccacctccgatgacccatgtataccatctttcgtgatctcttcagccaccggcttcgtgtatgttccttgcaattggagcatgccttctttccttttatagtttgtccggaaagattaccgagtgcagggtagtcattaatggtgtagaacaatagaactcttagcttgaagttctcctgaccatatgcatcccaagtttccacaccttctttataaagaatctccagatcgtcgataacaggctctaggaatacatcgatatcattgccgggttgcctcggaccttggattaacaagcacaacataatatattttcgtttaaagcataaccatgatgcgaggttatagttcgcaataagaactggcctagtgctgtgagtactactcatgtcaccgaaaggattcatgccatccgtacacagacatatcctcatatttctagggtcggcagcaaagtctttgtgtttttgatcgatattcctccattcaatcgaatccgctgggtgtctaagcataccgtcattccttctctccgtggcgtgccaacgttctgacttcgcttcgttcgggttggcaaagattctcgtgaaacgatcaatgataggtagataccacacaacctttgccggaccacccctctttgacttatttccttcgtcagcacttttctttcgcttgtatcgagaagccttgcagacaggacaagcatccaagtccgcatattgcttgtggtacaatatgcagtcatttggacaagcgtgaattctacggacctctaaccccagtggacacagaacctgctttgcttcgtatgtcgtcgtgggtaatgtgttctcaacaggaagcatagccttcaaaattcctaaaagatttgtgaaactcttgtctgtccatccactacttgccttcagcttcattaggtccaaggtaactgacaacttagtgtgttttgctttgcatccagcgtacagaggcgtctcggaatcactgaccaacctgctgaacttcattccatctctctcattctgggctgggtcctcaacgtcacgtaacttgtcttgcagcagatcgtgatccacatcaaccatttcaccgcccaatggagaaggtataaacatgtcatgctcatcttcatcttcctgattatgcgcaccacttctgtctgctgctactccacttcctgattcttgctctccatgcttcacccaacatgtatagcccttcatgaatcctcgttgtaccaaataaccgtgtacgtcctctgcgctatcaaacatattctcattcttgcaatctacacatggacaacacatgtaatcactgtttcttcttttccgatcctcctccgcggcgttcataaaatttattacgccatttctgtactccgtagaatgacgtttcaaatttttcgcatacatccaacttcgatcgattgctacaaaataaaaaaaacaaattgcatgcacatcttataagatcagtattgcaaaagtaatacgtgatgaaatttctcaattaatgtttaatattactcacttgattgatccattttgatcacttttaggaattttctgtttttcttggaaaaaaagacaaaaaatcgccccctacagcctcccaccaaaatagtgaacagtgggatacagttacactaggtggtaggggtatttatactgtgcaataaatatctgtaatggccctaaaacaatcaaccgtgacgggcatacaagtaatctctatcgggtcttaataaaagcccgtcaaaaaagagtgtcatctgtgatgggcattaaacttatctcaatcgggcctctagttggagcccgtcacagatgaccctcatctatgacgggcttcgtttagggtccgattgagatatggaaccctcatcttaatcgggcctcaactatggcccgtcacatataagtgtgatccgtgacgggcttaagttttatgccgatataccatggctgtgcgaccatatctcaattgggcgaaacttcggcccgattgagattacttccttgtgacggctcgcaaattccagtcttgttatgggccgtcacagatggaaggatctgtactggtgttaattaatcaacctatttggccagttagggatcgacgttgcacagtgaaatttgtacggacagaaacatccattagcttttgattgtttgtcatcagttttcatctctgctcactgtcacacatgtacttcagagactagatgactaaaatagaatgctgaatgtacatatttatagcatgaaaacccttcggacaaaaagttactccttccgtcccaaaatataacaaccttgtattggatgggacacatcccagtacaacgaatctggacaggggtatgtctaaattcgttatattaggatgtgtcccattttatacaaggttactatattttgacatggagggagtacaagcatcagatggcatggcacgtatgtaacacaggcacaactatatataggtcacaaaacgtaagtccatgaaagagaggggtaaaaccgagttgcagactggttgtctgctctcggttgtgcctggcaaaaccacacccagattctactcaattctactcaaatcatttgcacaatattgagtttaacaatagaaaagctaaaatgtacgggaaaatcatttgcacattatgagttcaatttctagctttgtgactaactagcttggaaaaaaaatattttctgaaaaggtaaaatgtacgggaaaataatttgcacattatgagttcaataaaagaaaaggacgtcccgcaaaaaataaaagaaaaggacgagatcgatcagtgtctaagaaaagattaattggctaggtcgaaagatcgttgtatatacagtttgccctcggtcgtcagataccatatacaaatagggttgtggtttaaactagctatgtctggtaggcatcaggaacatcagcttgctaccccaggagcagagatgtaggtagcaagttaaatcctgctagcctgcatgatccgcaagggatgttctcaatttggaagcggcaattttgcggtatacaggaacacttccctaagcaagagtgtggtactgtggtatgtcatttagaaaaataaaaagttattgcttccagtttgttctaatcaaccaaactagtagcaaactgtgaaataattaacatatatcaggatttgctgaaagcacaatttaacatggatgatggatgacatttgcccacaagtcctctactgtgattccacatgtacgcttccaagtcagcccacgtgcacgattggggcgtgagccaaatctgacttggaaaatgcccaaatttggccagacctttcggtttgaaagggttgaaatggattgaagggtttgatagggaataatttcacaccacaataaattttgaaataaatcctctccaatccttctcggaacatagccttagccaaattgggggaagatcttagggtgggatcctgtgagaattaggagcccacgctgttttcggcgtaacaaataacgtgctggtccaacacaaattatgtacaaacaaactttataaattaaaaagttcatacataaaaggtgtgcataggaactacgcattcgtgtgtgtataaatttcaaacaaattcattagcgttttatctcagcaaaaagacaaaagttcatacatagacctttatacagaaaaaacttatagattcaaattttgttgggcataaactttcatgtgtacaaaaccattccgtgttattgcgcgatggtgctgtgtccatccaattagcacgatgaggccctgcatgttcttctgggtgtgcctatgaaaaatattaaactaaacgaggaaaagtaagagacggctaaaaatgagagagaaaaatcataaaattaaagcaagttggtgattcctgttctactttccgcaattacttgaataatgtagtccagtgaagaactcaatgtgctcgaacaaataggataggcattcatctgctattctttgcttgcaagtagtttatcaatgtatcataaaaaggtggtggactgaaattgtcacgttctattatcatattacgagcaaattgccggggagatagagtctgtgctgaaaatcaatttcagattagtaacttcggtagttgataattagctccagttcagcagcaattcataacgcacgtggaatacttcagatgataaagttggaaaacactgcactgcagcagatgtcgaaagaaaagtcacctacacggtgtgcaggatggaagaactatgggtgtgtttggttgcttgcataccctcatcctggcccatctcaaggaagagtgaagcgacgaggaagaggaagagtgaaggcccaggtggcgatggcgacagtcctccctcgacggcgttcagatctggcggattcgactgagctcgagcatgtcgcctccgcgcgcgtctggatctggcgaatccgaccgagctcgagcacgccgccctcgccggagaggatggtggtgccatcttaggtcagtcctttgcttctatctcaggtcatcgtcctcctcttccctttctgatttcgttgctactcttcctctccaaatcgtagattttgaattttgggggcaaatgaggagggggcggattgacccctgcttgccccttgcacgcgcggtgcaacgccttgcactcgcgggtgcaacccgctgcatccaccgggcctgcccgagataggaagctcgaatcgagcgtttctcctcaacctggctggggagccctttttgcatcagcggggccaggctaaaaatgctgcacaggcaaccaaacaacaggaagttgcatctactgatgcaggcaaagcctaatgcaggcaaccaaacacgccctatatatttgtgcagagctctgccttcttgtatggccaatcaccgaaacagagtcacgaaaatatcttggatatgactggcctgtgtaagcacaagagagaaataccggcaaggcccagtattctgcagattttttttatctattttagaccttttaaataaataatttaataatagacctcccaataaattattttaaaaaacaaacctcttcgccacgccaccagaactggcgtgggctaactaagttgtcctgtgacggtctaccgtgttgacagggtcaagcaggcatcgatatggcagcggggtgaggtggcgtgacactgtcatgccaggcttggtggcgtgccgatgctgagcttgccgttcttcgcggagcagcagacgaactatcagtacgaaatgatggactagggcatcgggatggagatcggcaacgaggcacgacgaggggaggtggaggctatgagaggcctcatagtgcaccgagctagcgtggatcctagttgcgccagctcggattttcgccgacgtggagcgagcgaccgcgccttagctaggtttctcggcacctaactgagcaacgcagaacctcgcgaggaccaaggcgcgcagcgaggagaagacgtgagacgcgcgcgctgtgggcggcgtagcctcgcgctcgcgtgcccctagtgcccaaaatccccgattcaccctcccaaaatcccctcccgccacagatcggattggaagagaaaaggcaagaaaatcttggggattagaagaaaagaacagatcggattcaacaagatgaaaaataaaacaaaagcaaaatcatcacaacaagattcaacaggtcggactcctcctgcaacaccacccccgcctgctctgattccgacgacgaggacaacgacgacaaggtggggactcgtcgctcccgccgccggtggaggactcgaggaggactcgctgccgccctccaagaacctgtacgggaggcgaggaggaggaccagctcaccggtgctccagatccagccgccgccgccaagaaccgcctgctgcccgccgccaagaaccgccacgccgcccccgccgctcccaccttcgggaaaggcacggtgacggaccgggaggaggcgtgacggcggactcggagaggagcggcgtgggaggtggtagtgggaggcgaggcctcgccgccgtccgctcccgcacttctctaagcacgcttcctcctcggcacgagtgagggaggagaagcagagcgtgggatatagagggaggggaaaggctcgccggtgcgtgcggtttattgcgatgaggcggcgccgtcgacgtgggaggcgaggaggcgcggcagcgtggcaggagaggaggaggcgcggcggtgcgggagagaggaggagccgaggaggcagtcgcgccgaggaggggaggggaaagggtggtgcgagtagtaggcgagggtagttgagagaaataaatgtggggtaacgcgcctggggtcacgcccactgtgggcttggtaccctttaccagtgtctctattcaattaagccacacaactagaggtgtttgcactgtgggatgagtgtctctgggccaactttttaggctagggatacgggccccatggcttgcactgtgagaggcctgatacgggagtccatggaggggcagaagaggagggaggtgcgggcatgtgcaggagagtggaaagggaaggttgtacgagtgacgctgtgaggtgggtcacgggtcaccaaccttgaccggttcatccacgaggagctgctgtcctgcaaggataaaacagtcacggtaaaatatgcatggcagcatttaatattgtacagtatttctagttggaacgcagatcaatattagaatattcaaccaagtaaccaagtagccatgtcatgtgttttacttagtactttctctgttttacaatgtaagtcattctaatattttccatattcatactgatcttaatgaatctatatagttttataatgtaaggcattctaacatttcccacattcatatgaatattaatgaatctagacatatatatatttatatagattcattaccatcaatatgaatgtgagaaatacaagaatgacttacattgtgaaacggagggagtatttcataagagcatcaagttcagaacttcagatataatgttggcgttttacatctcctctctgcagctacattatcggaagagaaatgcacactactcctactagaaaaaacgtttttccaggtgggcaaatttctttattccaaacagccaaacgttctgcctgcacctaaaggcctgtgaaaaaatattttttgcaggcggccttcggacccgtctgtgaaaatatttttgcaggtggactcttctttctcgcatgcagcagatccaaccgcctgcgaaaataatcccaatgagccaaaaaaaattccctgccaccaccccctacccgccgtcgccctaccagctctggccaggtctagggttagggttttaggagggagagggaggggagggaacccgcgctgccgccggtcgccgccactgcagggggccatcgccagagctggaagggagggagggaggaagttgcgtaccaccaatgccaccaccgctgtatcttgaagaaagggaggaagccgcgccgttgccgccactgccctaccccctccccctccgggcggatctaggaggtggggagggaggggagccgccgccgccaccgccctcccctctcttccctccagccgaatctgggagagggagggaaggtgagccgcctccacaccgccaccttcgccctgcgccaccaccatcgattgggtgaggagccacctccgtgccgccaatgtcacttggagaggagccacctccgcgccgcctcagcttccgccaccaccactgtcgcttcctccactgctgctaccatcatcgtgtctgcctccatgccgcgctgccgcctccgcgccacctccacgtcacgttgtagtcgctcggaactgggactgggagtgacgaagggagggtagggtagctgcctccacacctccttaatgccaggccaccgctgctctgatctgggactgggagtgagggagggagggagggaggggaggtgagacatggaggagatgaggagacgagggaggtgaggagatacttttcgcaggcagacctcttaagataccgcctgtaaaaatgaccacttcagaggtatgcctgcaaaaatagattttcgcaagcgaacgataatctcgccccacggttctcatttttccagacagccatttagctccaagaggcatgcccgcctaggaaaaaaatgccatcatgtgaaaaaatggtttttttagtagtggcacggggaaaacaatttgttttgcttcaacccctaattattaaaaagatatgtgctaattatatttattttttatctttaccgctgactagctggtaaatcatttaatcacaagagagaagagatgtcagaaaaattatttatcttagtggtgtccaatttgaactgatatattatttatctaagtgatttctgtattagcatgaggatagacaaacaaaataaaataaaaatggccgtaagcccctgactcaatttctttggcttgtcttaagctgccaactaatatttaggtccatattccgtctttggttttgtggaagaagagcgttgaagctccttcaagagcagaaaactttttgcatttattttgttttccaaagccccgaagttcaccgcaccgaaggttggaacaacaattactcccccatactatgtggtcttcctcatgacctaaattaccttcgaagtcgagttcaatggtccaagatggacacaataaaattcccaatgcttcccaaatctaagtgcgacgggtctggtgagaatactgcagggcttgtggccatcggtctatgaatgatatgctatgagtgcagggtagagacgcacagaatatgaaagcatatgcaagagcttatactacatgtgacaacgtgactattgtcagaatcttgaaattgcagcctaattagttaagctaccaccaggacaagctgaaataactactgtacatgatttggggatggtgcttgcccacggtcaagttacagaggtacatattttggatcatgtttagcaatgccacatttatctcatccaggttatttctttcataattaaattgatcagagatatgatgcccatcatttgaacctctctaaacatttctaccttcagctaaaataacatacttcatttcgcctcttatagaaaacggagtggatttgctgacatgtgttctctccattgatagtgtcttacttttataatatgaaataaagggagtaacatttttacgaagctaaaaaaattgtgtgtacaaagacagggaggggatctatccaataatgatgatttcctgttaggacttgccaattaattatctattatatggttaagcactttagtgtaggcatttaaacttccaacaaacactagctttgcggtaccaggtacatgcctttattcatggtgattaccacatcctgagcaatgaatagatggtttttacatgctagcacgttagagcaagcttacacagcaacataaagaaatgcaacgaacgtttcaatggttcggccattccaatagtcgcatattattgttggttactaattttacctctccactttaatttagaatactaaaatgatttatgtagccaactataaatagtaggcaaggaaatattcttgtctatggtcaaaacatataaataggtttctatgatttaccatatcgatataaaatgcctaaaatttatatgtactgcgatgtaatttctttatggatcaatgccgttcaatattcagcttaagttagtcctcctgaagtttaaatcctagcttcgtcactggtgatggtactgtgtgtactttcatcaaggccaaatgccaaaaagtcctatataatctatctattatatactaaaagtctattaaactttctacaaacgctctcatgctactatatggtgctctaaaaacgctctcaagctgccacatggcgttttaataaaatagagaaaatcttaaaaattttgagaaaaagaaaaaaagaatctagccctcgactttcattaaagtttgtggacccattagtttacaccgttagattagatccattataaatagtaatctatccctcctaatttaccatgtaatacttacccaaaaaatattggctggaataagccaagaaggcatacgcacttacagagttaacaaccacaaacgagaaaagaggaaatgatatacagcaaaaaagaaaaaaaaaacatactgcatatatattacttcacttcctctgttttttttataacggctaatgtcaaatatttagtgaaactatcgaaagaaaacaaagattttaaactgatttccaattatacttcctatggacttctttttattttctttatgatgatcaacgtcaaatatttagtgaaggtggtagtaagaaaaatatattacttcataaaagatgcacacccaaaaatagatcgataatataatagaaaatatcaaataaacctatcatttcacactacaattgttgagtatagataaattttatttgcatcaatgggcctacattgatagttcaagatgaaataatgagtaactaaaatattacttgggacatattgtcagaaacacaaataaaaaaagtattgtttaaaaatcacattttttctcaccaaacacagtcaggattttagccgttaatgactcaatctacgcttttgatttgtacatatttttttaagtacataagtaataaatttaagattgagttctaaagtgcttatcaaattggctctccctcatttatcttgagcatgttccgaactattaaactgtgcatgttttgcaaatactttttatactttttttaaaaaaaatctatttcatgtttgtaatattaaatacttaattaatcttacgttgatgacctacatcgtttttcgtgccctggataagctcaaccaatgagatcgaatgtagcctaagtaggagataaattagattatttactataaaatttaaaattaaagaatcaagtgaactacattattaaaaaatcattactttttttatgaaaaaaacaaataagttttttttgtctcctcgctatttcttagctattaaactaaaacagaaacaaacaataatattggatttttctagaaacacagcacgcgcataccctaccccttgagtatcaccaaaaggctgattcgacacattttgagatacgatgttaccatgggcgtctcgatgtcgatgggtacgtcacctaccactgaaacattttgagatacgatgtcaccataagcatatcgctgtcgacgggtacgtcacctaccactgaaagaataattagttgtaaatatgagcacccgtatcaagtataggacttgaaccaggtgggcaagttccaccacaagaaacctaaccaattgatccgctcactttacaataacgttggatattaaaacaaccataatttttaagttacattgttggaatacttctatgccttttaaaccggtgaactattagttatagctgttagatcaatcttatatataagttaagcatgtattcatggtacatgacatctccaaaatattactgcacaattgtattttatcattatcatatttaagttaggttgcatggagcctctcacccaccctacatgaaatgttcatagatgggtcgcctcacaaactacatcaatcgtattaggctatataaacccatatatttagtggagactcatgtcccactcaattcatcctttaatgaactattacaatagatatgcaattaaaaaaaacaccttactttactttcattgacacgttttctaaaataaaaagtctaccttattttcaaattgtaaagaagactataaataattgcttatagatattacttaagtatgatataatataaaactaatttagaaacttattaagcaattaatgccaatgaaaaaaatttacgaacaaatcgcgacagaagttctttgtttaatattttgctcttatacttatctcaaatttagtatacgatgcatgccggcgcgaatacgcgggctaccttcttcctagtttattaataatgaatataagtcagtctggcctccttgaactgtcaaaagaatagtgtgtagtttactatattaattatcataaccatatttctctagcaatctgcagttgtctgtaccaaatgctaaatataaatgcaaccttttactgtctttgcctctggatggatcatacgtcctttgagtagtaccgtgaattagtgttatgtatatgtttatttcttgcactgatccctaatctcagttacgaaccgacactgatgctattttctatggtagtgacagaatcctatcagacagtggtagttattactttgtacgtatcaaactagtaccaaaaccatattaatttatcaacctatacccttccggcaccaactttgttcgtagcacgtaggctgtgtttgttgtgggtggttgggaaaaaacctcctccgcacagaaaacggcgcggtctattagcgcgtgattaattatgtatttgctattttttttaaaatggatcattatgatttttttaagcaaccttcgtatagaaacttgttaaaaaaagtacaccgtttagcagtttgaaaaatatacacacggaatacgagggagagaggttgggaactaggagtaaagaacacaaaccttagacataattctatggctttgtatcgatcttttcatagacctgcaaccataaatattgtgcaagatatatataaaatgaatttgcaggaactccatcaagaaaacctcaggtctccgttcaataaaattccttgcagtcatggtcatcctctcctacaccagtaccggtcatccaacacattcggttttgcattgggaggcattgggaatcctagagatactaagcagtatttgttggtttagcttgcggaggctataacaaggttgattagggtagcactagctagctgctgcattgtttacaacatagctagacagagcaagctagccaacaactactagaaaatggatttttggctactgttccacgttttctcgtgatggctaggaaattgctttcaccaaaaatgaaactttgtaacagctaggatcgatccttcatggaaactgctcttttcgtacaaggaaggataatccagtcaacaaaaatgaaatgtaacacgaaaggtatttgctataaattttttgacatatacttatagataaagcattttcgtagacgtggagggtttttttccccagacggatatgaccctcggagctaaatggccgcctacgaaaatataaaccagggagcttgttgtccgcctgtaaaaatacttttttctaggcggaccaatcaagtcctcgtaagtggtccgcctgaaaaaaatatgatttttgcaagcagaattttacgtggtctgcctgcaaaaataatgccaacaaaaaaatatctaagtcctcgttcttaccatctcctccaccatccttatccttatctcctccactcatttccttctcctcctctctctctctctaccagcagagctgctccgcgctctagcctccacctttctccaccaccgcctcccctcttcgccgcgagtgccgccgccccacctcgccgccacggccacagcctccccttctcgccgcgtcgcgggccctccctcctcgccgcctcctccttctccaccaccgcctccgctgtctctgccaccgcctctgcagccgggctcccctcctcgacgcttccaccgcgccacctcgctcctccgccaccggccgtgatgcgcgatgacgacgacgatgatggcgacgcctatggatctgccattggcttggcccgggcgcgtggatccgccgctggctggtctcggggaggggaggggagctggtggcgacgaggaggagaggcggcggctcacctcctcgctctcccttcgtcgcaccgatgacgatggcgacgacggcgccgcgtgtggtaagcccggacagaggaagagaggcagcgacgcacgacgacggcctcaacgatgtcgccgccagctgttggggaggccagcggacggaggaggagagccatcggccagaggggaggccggcggcggtgccttttttttttatttgctgtgatgtttttcgcaggcgggtgaatctaccgtcaggcaggccattgggccgcctgcaaaaatcatttattttcgcaggcctttgcttctagacggttcgttcccccatgcatctttcccactgagttacttgtctcttttgtttacatgagttttacgcgcaaattgcagtctaatttttttttaagaattatacagtacaatgtagacattcacaacacatgcacactcacccctataaacatactagttatattgtaattacttactagttacattgtagttacattcgtactattaaagtaaataaaatctttgtgtgtgtgtctatatatatagtccccaccaaccgagcaagctaaccatgttgggtacgtaataaaatattatagttacaatgtagttatagtataattacaatatagttatactattatatttgtaactacaacataagtaaacaaattctaattataagcctgttatgaattttttggcagcccagtattgtgggttggtccatcagattgaggcccattagatagttaccgtggcagttactagtgagcagatcttatccaagggttaaaaaaaaacgtgatatatggactccaaaaatctgtcgatagacagctatgtagtcctttccaaccagctcttatgtagttttcatcaaatcatatctctcaatccccctcccactcctccactatatctcattcattagggccatcatgttttttttatccgtaatctcttaaaaattttaaaaatatcttatatttatggacagagtgagtacacaacacgaaatatcatgacaatgaataggtgtgagcgtgactacattggtgcatatatataccgatagtgtagtcgattgcagtgccaaataccaacatctgatacacgtctagcatatcaaagccttataccagtatatataccaccagtccaccacatcgtactgcaggtgagttccagcgttctgtctagctaggttgaacaaattaaaatattgagacaatacttctaatgttacagtaccaatatttttttcttccaattcaatagaaaacaggtagctctgctgtcccagaaaacttgaatatgccacccagtttgccaccatttggtcaggcttgtctgaattactgaatagaaaatggtagctatgctttacatcatgtgcgtgtgtgttatatatgcaaggttatattattctcattggtttggtaggcatcaggaacatctgctcgccatgcaggaagcagaaatgtaatttagcagaggattattgcgagttgtagtgatgcaaaggacagagctggaatggccttagtagcactcttcaaaatgtgccacctagaaagaaatagggcatatcgactgctccatctggatcagtatcatcgctatgaggcaggagtggaagccgagatccctatgtaagaatatgaagaaagatgacgatctgctaaaacctagagacgcgagcgtgatcaaactagttgttctagccagctgaggctatcagcttctaatcatgaccatgaattaacatcaaggcatgtattaaacttaattggaatcgatatcgtaattcttacttttgccttatttccagttccattttttttattttgcaggtatgtgttaaacttttaaagctttttttatattcacttaagctttttttatattcacttaagctttttttattttctgaaatttgtgacgcaaaggacctgtaattgacggttatatatgaccactcttatacattttcatttgaaaaatggctttctcacgtgaaactgtctgcgagtactttgacatgcaaaaattcccatttcaaataccacaatgttatatatgtgggagaaccattaaccatctccggctttgaattatcccaacgcgtactgaggcatatatatatatatatatatatatatatatatatatatatatatatatatatatatatatatatatatatattacacacacacactaattaatgttactggactcggtctgaaaagtgtatttacttcattttgttgatcaaacaacagaagcaaccgcgtcatgcatggaacatatggcaaattactatgatagcagcaatggtttttttaatactatcccaaatattgtcgcaccaagccaaatacattactaaaaactaattttgtagactgatgattaccaatttatacaagtctttaataaaccacctgtgacctaggcctgtaaaaattaatcaacaatttccttatgcatttagaaggaaccgcatgtgacaatcacattttcacagacatctctcttaacgaaatacctgtcaaaatgaattctagtgttagtttgtttctgataatcacaagtcatgcgagaaatgtatgcaagcagctatataggatttggaccataatatgtttactccatgcgtggtctccttgacatcttatctatgaaatacttcattactttgccatgtatgctattcttttgacttcacctctacatacatatttggcgttctaaataacatcaaataaaaatgtcattaactacaaatttcatatttagcgctataaatcagtgcctcctctcttgctctctatactttgcattgatgctgtcatattgagtaatttggtgatctatttgtgcatgcttatatcttgttgatcatcttctagctctagtttataagtagtgtgcaaagtactctatctataagttttattttctctttccataggttttattttttctgtacagggccggattgtcctatcattattagagtgtcaaacagggtttacgattctgataggcccttctgttttgggcactagcggaattcggaatttcacggaatccgatggaaaaccggtaaattccgaataaattttataaattaaaatttgaatacaaatttctgtagaacgagcagttctactctccaagggcctatgagttagtccgttcgttatgattcattctaacaatatatcaactattgcatcctggatggtttggttttttttgataactgaggtacttgcatcacccgtttttcatgtacgcatggcatgtgtggagcagcaaaggtctgtttgcaaatctaaatttgttgcacagaattccattcgtagacattttggtgtataaaagtttctagacttctagtgaaaagcgagaaaacaagttttccaaaggctaatgattatccttggtctgtattttggaggaagatatgctaaatatttgttatggaaatgattcattttataggattgctcgtatgaccaatgtgacacatctccttataacaatgaacaatttttatttcaactatcaaacattcaggcatatggagcatatgattgtgaacattgtgggcatctcaagtaagacgagctagttatcgttgccattcgtatcaaagataatcagctcccacccaagggttttcccttcaagactttactaatggcaagtccttgcagtggttttatttcatcttttgtcttagcttaaagttgcaacagtgaagtctgtacagtgtagctttcatatgcggctcgcaacgtttagccttctgcctttataaggataagtgaaaatttgagttttaaaaaaatttagagatgatttcaggttttcttcacttagccttcaggttataaggataagtaaaaattcgaattttgaaacataattttagagttgatttcaggttttctttgatgtagtttgttttcccgcattttttcaaaatcaataaaggacacgcatataaaagctttacatgtaaattatattttgtcattaataagatgtttcacttataataattataaatgaagagatgagacatacataactataaaaaggcagtctgcttccgtctttgctgcagcaagcaaaaaatatgtaaagctcccaagacgagaggccatatcatgaactgtagtcacctcagatttctcaccgccatttaggagtgggaagctttaggaattctagtatgtctttattgcagtatttgtcttggctccacatacaccaagaaaaaaaacaagtttgtaaactctagggttagcaacagcacagtgcggataggaaatgaaccgcgccctctcactccgttgcatgttcacccggctcagacccctgagtgaagaacggggttcaaccagtccctagcttttgcccttctaggactccgtaacccgaccaagtgctgttggtgatatgccctagaggcaatcatagagatgattgtatcacatactatgtttacatatttatccgagattgtttgcttgaaatagataactcattattggttaacgaatatgtgattctttcatgagactctttatgttgtacgttactatttttaaaggatccctgatcaaatatcatatgtggaacaaatatgtttaaatgatcagcacatgtattaattgatgatcatgtctcatggattatagtatcgagatacaaaattaataatgtggacacatgttggggaacatgttgttggatagacccaacatgagacattgcaagagctatatgcatgtgttgtgtcatcagtgatcacatttagcgttggtgttgaatccttagacctaagattatcatggttcccaacatgataaacgctactgcgtaattgggtagttataaaagtagttttcgggtatgctagaaacatgtagtgggatatgaataatgatgatgggatttgtccctcctatggagagatatctctaggccctatgatgttatagattatagaagtgcatggccatgccaaaggtgattgaggagtcaatcacaagttataaatctatcacaagttcgagtgaatgattgagctattagaggatagcacatatctagccttgagtttaatcgatatcgtgaggcaaaggggttcatacaagtatacactagaggttctgctaggggctgctgttgacacgtggaacgaaaaggtgttttcgggttacagccgagtgtgcatgaacctacagggtcacacgcttaacgggccggaataaggggattggatggagatccaatatgagcttaattcagatagggatccgaataggagtcctacgggccttggaggcccgagtcatggatcctatatattcgtgaggggtgtgacaggcagaggtattgtatcacgtgagaaaccctagccgccactctccttcccgagcaaaaccctagccgcacgcgggtgctagcatttctgcgcgtagtgttctgtccctatatgtgtggataccggtagaggcgctgctgctttgcggtgctgatcagcgtgtgtgtacgacatggagaacgcacgaggaggagaaggtcgagctggtgcgatcgactacttcctctacatcgacgcgcgctacatcgcgagggttccttcgacttcttagcactttcttccgctgctcagcgtgtcgactggtaatgatctatgatctaatgcttgcatggttcctgatttacgcgatagaaaactttgatttatgctgtcgtagcctacgcgtatccaaacacgtgcgtgtgttgagagatcaccgtagggctgtggctgacttaggttggcttatggggactaggattagtttatatattgatgtggaattgcctccagcgaatgagacttgtaattggagtatattttaagtggtaaccatatccagtgaacccatgggtctataaccttgtccccacctccgactccggccctacagggtgaactgcccaacacctgatcggggaaattgccactcctggtaaaacatggtcacaaatatctaatgcaacgtttggctgacaaaatcttggatataattgaagaattttgtgtttccttcgccagaaaccagtcaagctctttgagaaattctcagccatctcatctgccagcgaggacatgcatgcgcaacaaattctctaccatctcgttgacaaatcaacctgtgtgagacgccttcaaattggttctctacattcaactccgtgaagcagctagcatcttaatttttgagattgctgtcgtcgttgatcactacctcctgagatacacctgccatttgatagcaggaaaattgctcggttttgcaatgcacattgttagctttcccatttgatacttcagtgggtaccactctgttttgtcacaactctatcgaaaataccgaaatttgcccctctttaacctctcttcttcgcacccaacccttttccacgtccaaactccagccagcaaccgctgccatgtggaccgcaccaatgcagttggctggccaatgctacacctactctactaccacttgcatctagactctgctcgccatccctaacgtggccgagctcgagctcattccagtcgaaaaatccatcttgagcaattgtcgaccgaaacatgtgaaacttttaggtctccaatttaaatcataatttgaggtaaccttgttcattttgttcaaacaaaacaatcgctatgaaataatgcaaaatgaccgttgtgtaattcatgttatactatgaatgaaaaaattgagtggatggtcgagctggatgtagatgccgcagcagagtgggtgctgccaggcaatgatgggagtggcggcacctgctggacctcaacatgtggttatgctagttatgcctagccaaagttagggacagttaacttcggattggtgtcaaaataaacatttttaaaatttggcaataccaaaattttgataaattgacaacattatcaagatttggtaggattgactcaatataatttgaccaagatttcataggcattaccaatatttggtaacaataaactaaatataaccacatgattaccaattttactaaataatggtatgctgagaaagacccaaaaatgatagagaatcaatgttgaaacagggaaatttggtatttttgatagagttataccaaaagaagaggtaggattgacatttttacaaagccaacgaacctggtggcacacgagcttacgcttccgaacagcatagcgaacgaacaattttccatattgttgtcagtgcgcatgcttttcttttcctaacaaagaacggaggggaagacagaaggtgaaatatccttgacatggagatcagggtggcatagggtagctggtaccagatatatacaaaagttctcaacagagataagacatgtcagcaaatccaccctgtttatgagtctagctaggaagattatttgtaatagatggaatgatatctctgttagttttagcttaaggtagcagagtttagagaggtcaattaagtaatggagatctccatagagcgatttaattatgaatgaaatagctctgggtaagatgtgaatgtgcatttctatacatgactcgaacatgtatactctgaaatcttgtacagtggtttattttggcttgtgctgcaggtggtagcatagttaactaggctgcagtttgatgtttcatacagtagttgtcacttgcagtacatgctcttgcatgtgcttctgtaccagctcagaccatatatataactgacggagcaatggataggtcacgcccagaacccagatggccacaacccctgcactattctcacctcacaagtcatgcttagaattgggaagcattgggaatttcattatgtctaattctcactattgggctggaattttgaggcaattttgaccagaatctgcagcagcatgtacgagaaattatcatttcttacaactggcgaacttcggatggaaaaaagttaattaaatggaatattatttctttttttacgttacatgcttcagcgtttttcttccaaaaaaccacagacggaataggggcgtacacattggacgaaatcatcctgtttataatttgataacccataaaattgcccagaggccacgtccattttatctctaccacatattttttaaaaatagatgatgtcgttgattttcatattatgttcgatgattcatcttattaaaaaaatcggtgtaaatgtgctaaagtatatgagttatacactggtggagaaaccatctttggtcggtcggccaaattctacaatagtcccggttccaataaaaatcgggaataaaaatcatctttagtcccggtttaaaagttaaagggtactttttgatctttagtcccagttggtaacacaccaaccgggactaaagatcatttttagtcccggttaaacaagttgtcagggcgtgtcaggccccaattatttttagtcacggttgatataaacaaccgggactaaagatctatctttagtcccggttgtttataccaactgggactaaaatttaccccaagccacgcgatcttttatctcttcgcgcgtcgatctgtgtctccctcctcctctgtcttatccttagcttcttcccatccacttcttctcctcacttcttctcctcttcctccttctcctcctccccttcccctctcctctgtcttcctggcggcagaaaggggcggccggcgcggaggcccggcggcagcggttgcccgcgcggagggcccacggcggtaggcggcggagacgcgaatggcctcccccggcggcggcaggcggcgcctcgggccgcccggcatgggaattttttttctttatttcctttttaatgtgatgtgaatggctgtgatttgtgccatctgtgatttgtgcgatctgtgatttgtgtgatctatgatttgttcgatctgtgatttgtgaatgataatgggagatatgtgatatgtgaagtatctatgatttgctatttgttatttgtgatttgtgatgcgattgtgatttgttagttttataatgatttggaaatactgaacatgagaaaagaaaacaaaggaaaaaaatctttagtcccagttggttacatcaatatgtatctttagtcccggttgtaagggttacggataaggtataccctctatccttgaatatacgctatacatcgatatggtatatctgcgcgtatacggacgttctatgtatacgctaaggaaattcatcacggagtccacagatggaaagattcctacccggataggactgggtcgtcactgtatcgtgtagggtccgatgtctccgaatcctacttagaaaccacctgacctgcggtataaaagggacccccgggaggacctaaggcatcgaatctcatagccaggacaaccaccacagcctacgaagccggagcctacaggagccaagtcgctggtgatctagtcggaacaactcgactacgatctcgtcggtatcatcgagttccactgtgccctttgtaatctatgacttccatcatataatcccatatcaactggattagagctattacctaccaatgggcctgaactagtataatcactgttttttgtttgcttgatgtcgtactacgtagatactcgtaccagcgtaccccaataccctctatatccggtctgcgggtttcccccgtcgacagtgtcgtcttcccggtttataccacggtgccgatctcgactggtccatcaatgaccggaagcgagaacgccgtggctacaaccccggacgactccatgtcgaaggatcctcccgcagaagtggagaatggaacgtcgacgacatccaagcccgaggaggatcctggtgcggtcaaatcttgtccttccgatgagtgtcacaagccgataaggacaacttccgaggtgacaaggtcatggtgtcctattcacaaaaccagaaaacacaccttgcaagcttgcttggtttttctcaacgcacaagctgagatccgcgcctgcaaagagcgtggaattcagcgcacttcgccgagtcgtgatgtctatggttctattcataagacaaagaatcacgacctctcaagctgcaagattcttctcaacgccacgaatctctcctagagatgtgaacaaggaatgaggaacgatggtcatctcagaccgattcgttggggtgatcgacattgatccccacgagccatcagtcctacactcgctcaaggaccagggttcatcgttgacaagcacaccacgcgatgtgtttgctattgaagggaccagcgcgtctgcgcgcgccgatgcggaagcagagaatcaagtggttacaccggcccagcatattggggccatcaacgcaatactgagggaaaccccttatgatcccgttctgaacgatgatctcgcacggtagacagaacgactacgggaatcagtaaccaacctcaacaacgcatttgaggaggccgctgccgcggcacacccagaacaaccgccagctggcggtgcaaatggcgcaccactagaacagcaggcctcaccccgacaagccacccctccacaccacggcaccagcgatctccgtgaccatttaaatggccgccgagaagcacgacgcgcgcaagacaacgagaatcgttcccgacatcgtctctcttcacgacgtcgagagaacgaagagcgaggaggacacccgagcgagaaccgagaccatgataaccgccacaaccaccatgaacgcgatgatcgcgaacagcggatgccgggcgatactggtcccggacgccgccatgacgatgacgatgacggagatcggcgccggaacaacaatggtgtacgacgagaggattcccgagaacccgggcgtcatcctcggaatcgtacaccgaagccgagtgacccatcgtcgtcgtcatcatcctcttcatcctcatcatcagagagacatccgcgaaggacatacgatcgccgacaacccgccgcccccagcgccaggtgtagagctttcaaccgttcgctacgtgatgtccgacggcctgagagattccgactgggagcaatagagaaatacgatgggagtaccgacccagaagaattcctacaggtctactccacggtactctacgctgccggagcagacgacaacgcgttggcaaattatttgccgacggcattgaagggttctgcgcgttcatggctgatgcacctcccgccctactcgatttcttcgtgggcatatctgtggcagcagttcgtcgctaacttccaaggaacttacaagcgccactcgatcgaagacgatctacacgcgttgacatagaatccaggcgaatctttgagggactatgttcggcgctttaatgagtgcagaaatacaatccctgaaatcaccgacgcctctgtgattcgcgctttcaaaaccggtgtcagagatcactatactacccaggagttggcaacaaggtggatcacaactactcgaagattgttcgagatcgtcgatcgatgcattcacgcagacgacgcactgagacgcaagaacgacaagccgaaaacggggggagagaagaaaccagccaaggacacacctgaatcaagcaagaagaaaagtagcaagagtgggaaaaggaaagctcaagcggaagtcctcgcgtcagaatacgagcgccctcccaagcacccagacacacaaggcaacgtcacgaagagaatatggtgccctatacacaagtcagacagacattctctgaaggattgcctagtcttccaaaagtcgttggaaaagcaactggcattagagaagggcaagcgagtacgtgtagtcgagaaggccgctgaggcaaccactcaggactcggactcggcacacccagattccgatctgcatgtctcgcacatgttcggaggttccacggtgtactcctcaaagcgagaatacaagaaagtggagcgtgaagattgttcgacatggcagggggctgcacaaaagatgaagtggtccgaacagaagattgagttctcagatgaggaccatcctaaggctgctgtcatcccaggacgatatccgatcgtggtcgagcctactattcggaatatcaaagtcgcgcgagttctcatagatggcggcagctccatcaacctcctcttcgccagcaccttggacgcgatgggaatcccatgaagcgagttgactcccaccgatcaaccaggtgcacaaagactacaagtgctctagcccagagttatccaagtacctcgcggaggtcaggaagctggaaaaaagatttgatggaatcgaggtccgacatgtataccgcaaggacaatatcgaaccagacgatctggcgcggcgtgcgtccagacgggagccactagaacctagcacctttctggacgtcctgacaaagccatcggtgaaagagtcaaacgacgaaaataacacagtcgcctccgacatcagctcgggggctacataggtagaacgcgccgttgccgacatcgagaccacagacgactggcggatcccactcgttaaattcataagtagcgatgagttgcccgacgacgatgtagaagccgagaaaataacccgctaggccaaaatctactgtatgatcggcaatgatctatacaagaaggcgccaaacagggtacttctcaaatgcgtctcgtccgacgacggcaaacacctcctcgtcgacatgcacgaagggatctgtggatcacatgccgccggtcgtacattggtcagaaaagcctttcgacaaggatttttctagccaactaccctcaaagacgcttgtaacatggtacaatggtgtgaagcttgtcagtttcatagcaaacacacaaagctaccagcccaagcactgcaaaccatccctctcacttggccgttctcgtgctgggggctcgacatactcggaccattcccacgaggacagggtggctacaaattcctgttcgtggcgatcgacaagttcaccaaatggatcgaagcaacactcacaggggaaatcaaggccgacaacgccatcaaattcattaaagggatattttgcagatatggattgcctcaccgcatcataacggacaacggcacccagttcatcagtgccgacttccaggattactgcattggactgggagtcaagatctgcttcgcttcggtctctcaccctcagagcaatggacaggtcgagagggcaaacggcatagtactacaaggaatcaagacccgtgtctacgacagactcatgtcacatgacaagaagtgggtcgaagaactcccttctgtactttgggacgtgcgcatcacatcgacaacgtccaataaggagacacatttcttcctcgtgtacggctcagaggccatgctccccaccgagctacgatatcagagtacacgagtacagaagtactccgacgaggatcaggaggaacagcgaaatgacgatgtgaacctactcgaggaacatcaagaacgagttgtcgtcagagcagctagctaccaacaggcccttcgtcgataccacaagaagcgcatccgagcacgtacgctttcgatcgacgactacatcctccgacaggttcaaagccaagcagggcgaaacaagctctcacccaaatgggaaggaccgtacacgatcacgcaagccctacggccaggcgtattcaagattgcagacggcgatggtcgcgagttggcaaattcttggaacattgatcaattacgtaaattctatgtataaatcaatagcatccattcttgtaagacatcttacagcttcaataaagccttttttcaggaaaagattacaatcaaagtgttccttcccgatgatcccttaacccgatgacacctagcgttgaaacctatcctcatgtccctttacgccatcttgacaaggcctccaaggaacctaagggaacttcggcttgggacgcccagagccgataaggccttgtcggatcctgtagagacgaaagaccatgtaagatctggtcgtgtaagagttctcgccgtgcatattaaccaagccgtgtaatcggaaatcgggttttccaacttcacggctgggggctaggatcagtgcttgttcaaccaaggcaggtcaaaggtccaagagccatatcttccaagaagaattctccgatgacaaggctgggggctagggagagtgtatgactcaagtgactgatcgaagtcacaaagtgagaagacactcgtacacacagcatccagagtaagaaagcttagttagatagatttcctttctatttcacaagtacttcttacaatccgcaaaaaattccaaaatatattacactttttcctaagatatttgtcacagatatataaagactaccaggaaggccaatgccaatccatcgactggaagactttctccgccagcggcgccatcgacttcgctaggttgtctatctctgcgggagtcctccgagaacgagaaaacccttcgcggatgaactcgaggtgcagttgcggacgacgatctcgtatacaggccagcacgtgccctccgacataccggctcgatcgacggcactcctgctttaggcctcgtcgatacgcttgccgatgccttcgagctgagcgcaagccccattcagccacgagatgtatccggccgctgactcctcgggatcaccgcgaggtactcggagttccttgcagactatggccatggttttgcaacaactcctgaggtacgagttgaaccacacctcgcgacctcggagtgcttccacggcccgatgcttcttgacttccagcatagtcctctcgagttcggcgacctcaaacttcgtcctccagtactagatgcgacgatcacgatcggcaagcgcactctcaaggtctgctcggcatggaaacgactaagttaagctgttctcctctttcgagaacacagcaaattaagccaatccagacagaagagcaaaggggatggaaacaaaaagaaccaacctaaggaaggcgtcgccatgcccatttccacgggcagattctggtccacgtcgtcctgcggcacatatggctcgagcgcaagtgccggaacgattacaggcaactcaggctgcccgcgctgctggacatcctcgacatctacatctgtacaaacaacaacaaagtacccggaatcaaaatgctaaagaaaactaaggtgatgactgcacacacaaaggcagttggaaccgacaaaagttttacaaagcataattgattaaggagtacagccgaactgaagtcctactcttcaaaaagtgggagaacagactctcctagatcactgacttcttccatcacgtccttacgcgcgttgttagctgccccctgatccaagatcctctggaaatcgagttcagggtgcgacaaccttacgcacgcgaggaagtggcacgccccggtgtagatcccgttagacgtctcctccccgatcctggccgcatgcttggagcgaatcgcctccatcgccgtcgccagtttcgcgagcgaagtcgtcagcgagaactcgtcgggattcgccaggatggtgctcgtgacaccgcactccccggcgagctggtgtaggcctgtgtaggtaacccgcagcgaaccacggatctccgacaggttgttctcgagctccgacatgcgctactcgagcccctgcccttgtcgctcgttgccggccaccagctccctcatcttcttgaggtcctcgcgaacctctgccaggtcacgcgccagcttgttggcacgttcattcgccgacgacgccgccgccgccctcgcctccgcaatctcgcgacctatgccgcgagcgccggcctggaggatgcgccccatctcgacttggagctcctcccaggtgaggacgtcagcaggcgggcctcgagcaggcacaagatcgcctgcagggccgctgggcgtcgcctcacggctcctgggcatgactatgacatctgtcgaggccactgcaggagacgcactggagttccctccggacccatcttgcgccgctttcgcccgcgccgccttgcaaaaaattgccataatggctatcaagacaagctgccagaattcgatcaagtgaaggacctcaaatttgtccacttacttctcaccaagtgtcaccagcctctgccgtcacggaggcgggggagacgcatccgatgcctaagtaaaacgagtacggtgtgaggacaacatcttccgactacgcaataaatgaccaaaggggctcaccgatggagtgggcgccttccgatgattgccgagcacggaggagaacttcctccccttctccacatcaatgccacctaatggggaggggaggggggcggttggaagatctagcacctatgggccattactatccaacaccaataagattgtatgtagtagtgtgtaccctgacccatctattccttgttgatagcaacacctcatggatgccctgtcaatatatctatgtatatattataatagaaaatagttgtcaattttttttaattgtgtcctcgtactatcaacttggagtgaatatgtcagttttgtatgatttgactctcctccacatacaccagaggacaaatatctaatgccttgtttggttcacataattcttgatagaattaaactcagcatatatatggtcttgcatgtgcttccatagtgtgcttctgtaccatctcgtaccacatataatcaaattaagaagcaatggatggaactctctcataacccgatggccagaagcccagcactactgctacctcacgaatcgcgcttagggttaggaagtatcaggaattataacatgtccatttctgatcattttgacaacgatctggactggatagtacgtaggggggcattgttttttcaaaccaaagagttttttcaacctttggtatgctgaacttcggacttttggaaagaaaaagataaacacaaaagatttctgccatcgagatgtctagcttcaacgttgttcttcgatcgccaaatccaaagacggaatgtggacctacatattagcagaagcattggcagcttaagacaagccaaagaaatttcatttttattttatttctctatctgaatgccaactcttctctcttgtaattaattaattggcaattctcctgctaagttacagaaatcatttccacaaatatactggttcaaactgaacatcagtatgataaatatattttttttatgatgtcaacctcttctccatcataaataactgttcagcgtaagaaatatattcagacaagtatgtacttttaataattagggtttgatgggtattggaaaatgtcatgccagcgcccatagcatcagcgacaatacatgatgaagcccaacccaggcgatccatgcgagatcggcggcccacgagcaagtacgtgtcgaatgagtggacccggtagctgtcgaccgggccactgccagagagggagcgagatcttttggcacatcgctatataagatcggcagagtagagagaaaaggaatcgaacattgtagaaacaacaaaatcctcaattcaattcaaatctctctctctctgttctactgcttcttctgttctttctctgttcttcctcaattcctcttctcaattcacaaattcctcttcgatttcccacggattcgtcttcgtctcggcgtgaattccacaagtgccgtgacatttggtatcagagcagcgatcctggagaaaccaaggtacacttctcgtttgcaatcgcaggttgaggcaatggagaagcagaatctcgatttcggcaagttgctcggcgacatccaggagtcgctggtggcgttgaacaacaagcaggcggagatgcaggtggcggtggcgaagttggacgaaggggttagtggatggcgaccccaagttgaagccgcgatcaaggacttgcgcgctgaggtcgacgaacttcgacagcagcatgatgccgccagcaaggagaagcaagctccatcagcggcgctttcccctcgggtcccgttgacgggcgaggaaaggaaggtgccgttgttgccgactccgccaccatcgtctcactttggcgcggcggaaggcgggagcaaattggccgatggccacggcgttccactacatcaccggaggagggcatctagagtggttaccactctgatcccaactccgggcaagggtacgttcaatgtttctcctgtgcctttgcattcctgtgaaaattttggttcggggtttggggaaatggatggagaggttgaggaacgccattatagccatagagtgcctaagttagattttcccaaattcgatggtaccgacccacaggattggaggatgaagtgtgagcattatttcgatgtgaataacacgtatccggggttgtgggtgcgtgtggctatcatctacttttctgggagggctgcgtcttggttgagatccactaaagctcatgttcgatttcctaactgggaggatttctgtgctgcgctatctgataagtttgatagggatcaacatgaactgctgattcggcagatggatggaattagacagtcgggaacagtgtgggagtattacgaacagtttgatgaactcatgaataagttgcttgtgtatgatccagtagtgaatatgcattatctgacacaccgtttcactgagggattatataggaaaattcgtaatgttgttttacttcagagaccccgagacctcgagtctgctttggctgttgctttgttgcaggaggaggtgctggagacagctgatgaagtgactgggaaggaagttaagaagagtgaaggaaattctctgggacgttcagttgcaaatcttagaggggcatatcctttgcctactcctccaatgaggtctgggggcatcaacatgggcattaaatctgaagaaaagaaggagtctgaagtaagacgttcatcagggacgaatgagagattatcttctctgaaggctcaacgtcgtgctcaaggtctctgttacatatgtgcagagaaatggtctcccacacataagtgttcgaatactgtgcaactgcatgctgttcaagagttattcacagtgttgcatgaatcagtagaggacgggttgagcacaacagatcatgttgttgagcaaacattaatggcagtttcactacaggctgtacagggaactgaaactggtggttgtatgagaatgctagggcagatccaaggcaaagaaattttgattttagtcgactcaggcagctctgccagtttcatcagtaaaagggtggccagcagtcttatgggggttctagagcaacctgtgcatgtgcaagttatggtggctgggggagcaaagttacattgctgttctgagattctgaattgcgagtggaccattcaaggacatgtgttctttactaatctgaaagttctggaattgaacaactacgacatgattttgggcatggattggctgatgcagcacagtccaatgacagtggattggaccacaaaatctctgataattgcttatgcaggaactcagattcagttatatggtgtaaggtctgatactgaacaatgtgcccacataagttccaagcaacttagggaacttaatgacagaacagcagtgtccaacttagtccaattttgttcagttttcgccttggagtatcaagagcagattcctgaggtggtgcagacagtactgacagagttttcttcagtttttgatgaacccaaggggttaccaccaatcagacaatttgaccatactattcctttgctaccaggagctgggccagtcaatgtgagaccctatcgatacactcctatccaaaagaatgagattgaaagtcaagtgcaagagatgttgagtaaagggataattcaacccagttcaagtcctttttcatcaccagttttacttgttaaaaagaaggacggttcatggaggttttgtgtggattacagacatcttaatgccataacagtgaagaataagtaccctttgcctgtcatagatgaactattggatgagcttgcgggagctcaatggttttctaagttggacttgcgctccggatatcatcaaatcagaatgcatccagatgatgagcataaaactgcttttcaaactcatcacggtcactttgagttcagagtgcttccttttgggttaactagtgcaccggcaacttttcaaggagtcatgaacagtgtgcttgctaccttactcaggaggtgtgtgcttgtattcgtggatgacattttgatatatagcaaatctttagaagagcatgtgcagcatttgaaaacagtttttcagattttgcttaaacaccagttgaaggttaagaggaccaagtgttcttttgcacaacaagaactagcatatctgggacatataattcaacctaatggtgtttccacagatcctgagaagattcaagtaattcaacattggccagcacccacttctgtaaaggaattacgtagctttttaggcctctcaggatactacaggaaatttgtgcgcaattatggcattcttagtaaacctcttacaaatttgcttcgcaagggccagctctatatttggactgcggaaactgaggatgcttttcaagctctgaaacaagcgctcatcacagctctagtccttgcgatgccagatttccaaactccttttgtggttgagactgatgcatctgacaagggaattggtgcagtgttaatgcaaaataatcatcccctcgctttcttaagtcgagcccttggactgcgacatccgggactctctacttatgaaaaggaaagtttggccataatgcttgctgttgatcactggcggccatatttacagcatgacgaatttttcattcgaactgatcaccgcagtttggcttttcttactgaacagcgtctcaccactccatggcagcacaaggctcttaccaaactcttggggcttcgttataagattatttttaagaaagggattgacaacagcgcagccgatgcattatctcgttatccaggttctgatcgggtggaactttcagctttatcagttgcagttccagagtggatcaatgacattgtggctggttattcctctgatcccgatgcctgcagcaaggtacaaactctctgtatcaattctggagcagtaccaaatttttctttgcgcaatggggtgctttattttcagaacagactttgggtgggtcacaatgtagatgttcaacagagaattcttgctaatcttcacacagcggccgttgggggtcattcaggaatacaggtcacttatcagcgcgttaaacagctgtttgcttggcctcgtcttcgtgccactgttgttcagtatgtg

SEQ ID NO: 9528 - DNA, 50103 bp, Oryza sativa
catatccgggtttccgattccgatttcgattcaaaaaaaatatatgaaaacgaatatgatagagctagtttccaaccgtattcgatccgttttcatccctactagcaggccctggctaaccacactttggtgctttgagtgcagttttttagcctctgtaataacattttgcacaatgataaacctaaagtctatgccagttttgtatctgccatgaactaggtactgcagtttaagtgcttgtgcatatatattccccaggttatgtcagaatttcactgttgtaaactagttaattcattgggtctatgtctccaggacatgcttggcagagttatggggatattgtagccttaggctgtgtttgaggggaggagatataggagattgggaagatacgcaaaacgagatgagccattaacacatgattaattgactattaagtattttaaactttaaaaatggattaatatgattttttaaagcaactttcctatataatttttttgcaaaaaacgcaccgtttagtagttcgggaagcgtgcgcgtggaaaacgaagcaaaactcactcacaatcacccagatcacccaggaaagaacacagccttaattatttcgaaagctgcataccaagttgggatggtttttgatcttccacagaactttctcataaatcaatcgggttattaggacaaaaccctacgattcattttcagatgtttttttttacgtgtatacaggatcgagcactacaccaactgatcatttgtactttgataagaaaaaacatgataaatcccggagggattcatttgctatctttgccatagtcaagtctgtagtacatcttttcttgtgctggtgtgatgtaaaaatccatatcagtctagcacgatttatctggttcgatttcgagctgtgaagattgtccagacgttctagtcatatcttaataataccgagacgccaccttcataaaacacacaccataaataatattgggtttaatttgcctcacttctatattgcaccattgtctgtaatcgatctactccatcccacactcatgtgcaatacacaatctacgagatcccactcaccggcaaacaccgacgattgggagagcatttctcttaaactctctacttcaaagtcctgcactaggaaaaggatattgggaaaaaattaatatacttttaatgttaaatagggatccactaaaacaaacgataaaatctactaagacagacgtaaaacattaggtcgaactcttcttcggtgtaaagaaagtagttgtgtatagtcatcactgcaagcgaataaggtgtttgggaagtgctacgtgtggcttcccgctgtatattcacggtgacatgccttcatcatttctcggttgtgacaagtcatcgtcaacattttgtagcatgcgtggtcaaagcggcacccttaattatattccgtacatttgatttattcatgtgcgattttatctctaggttatgtgcatgagatggttttgctagtttacatgtttgatatcaacatttatatgttaaaatcaattaagcccacatatgcttatattttcttccacttatacagcctatatatatgatctattcatacattgcagttttctcatccttactacttcctccgttttatattataagactttctagcattgcccacattcatatatatgttaatgaatctagacatatatgtgtgcctatattcattaacatctatataaatgtgggctatactagaaagtgttataatctgaaagggaggtagtattatatatatgtactctctctaggactgggagacatgaggaaccctggatatacatatgttatcctttggttgtgttcttaccttcaagttcccaacccctctccctcgttttccgcgcgcacgcttttcaaactgctaaacggtgtgttttttttgtaaaatgtttctatatgaaagttgcttaaaaaatcaaattaatccatttttttaaaaaaatagctaatacttaattaatcatacaataatacatgcttcgtttcgcgtgccggggaggaggggttcctcccgaaagccacctttggctcagctattatggaggcagcagtcgtaaggacaagtgcagctcccctgctgctgttgctatcaggctgtgttatggtacttcgtgcccttgtacagctccaagtacccaatccggtttgcatagcccgagtccactagatagtacttccctgcagcggtaaacacctgtacgttacacgtgatggaggttagaaattgcaaacatagaataggtagcagtgtacctggaggtggatgagggaaaacatgattgtatgtactcattgcatcgttgaacaccctcatgtcatgcacaaaacccggccatccagcaagcacgaatgtaaatatcatgtcaaagtcacaacatgccatgacattctgcgttgtaatgtggtgtcgacatatgtgctgaaccaaatgatctttggaaacctgcataggaatgtgggttccatctatcgccccaatacagtcgttgaaataaggatagaacctaaggtacctcagtctcgaatgcaatgttgcaaactgtgggtcacgtggtttaattatatcagcagctagcttcaaaaggcttgccagaactttgtggaacatattgtgaactgttgctaatgatcgctcaaatctgtcctcaacttgcctaaccgactgtggagccccagccatccaaagaaacaatcctaacgcctcaatacttttagatttcatgctagacttgagctcaaatttgtcgaccaatagatcatgaagactatagaacatatcagaggtcattctaaacatgttgtaacaccgcttcctgtctgcatgcttcttctctacccattccaacgcactcattgttgtgctaacatctctatattctgactggttgtagtacttgtcaatgtgttttgcaagatgtaacgtaccgtacagaaacgcggtggatgcataatcgtccataaagtactccatcataactctgccgaactctttgtcggaatcttcatcctttgtatccacaggttggagccgcacatcctcctgtaataaaagtaaaataacaacggtaactttcaaacatcctcatattaagaaatgaatttggaaagacagccttactacaacttatatttaattgccaacattacgcatgacatagtttgcaacacaacagtagccaacataccataaatgacatagctaacagacatagcagcactaacagacatagcacctcatagcttccaaagcgtacataacccaaaagatataactaaggctgatacattaacatgttaagcaagcattaaaaggtctagttgtcgacccgtgcgaggtgctcaaggagggcctttcttccttcaggattggacagctcaaagacattgacggcatctcgatccttgagcatcttgaacatggcaacccacaagtgtggagtcgcctctgtgacccagcactccctactgagtgccatgatgcgctcagccttttcccccgcgcgagagtcatcatcatccctcctcttctcacgctgtgccgaatagctgtccattgctatcgctttctccttctgcagctcgtgtgcaccttcaattcgttcaccacggcgcggacggctgggctcttcaacttcttgcttggactagtagccctactctgcgtgcttggtgtgctcctcatgctgtgcgacctcttcgtcccaacactgatggggcttagggggtcgaagtcgtcatcgtcggattcttcgtcatcctcgctgtcctccacatccacaatggggttggccggctgggttgcgggctatgtaggaacaaatgaagtcgatccgttgacagccacccccatgaatatgcggtccatttcttcgagatagtcgggcatcccattcttcaacttcctaaattcagggtggtcctgcacaaaatgaatgcatcggtcagatgcataggaatgatcatgtgtaaaactgcgcaacgaaaaagtgaagtttttgtaccttagtgttgtcatcccaccacttgtctgaagcaaccatggtgccgtcaggtcttcggcccaaaccagtgtctgtacgcaacctcaatatgaaggtccacatatttttcaaacccctgtatctaaatccgaattgctcattgtcgtggaccaaatcagtggtggcataaaaaccctttctgatctccttccaacctgctttactcattcttccccttatgcagttgccattatctatttgcttgcaatacagctcgcaaaaaagtttggtgttctcatttgtccacgatgccctgtcgttgaaatcctagagggacaagtaaaccgggaaagcaatgaccttgcgacatatcaatcaatcggaattaaacaccgttatcacaatgaactcggcgctcactatgtcatgttattgcacaaaattgtaccacaatttttgtaatagctgtattactaaccaactaacataagagctgtaagcagtaatacatagaaattaaccatacgaactaactgtagctgtaatacatttcgcaagtattgtactagctgtacttgacaagttacaacaactgtagtacgtagcaactaatcagatgaaccacttgttaacctcaaatgaaatgggaatccacacattgcaacacctaaaaacgtccttacctctgtcagccggcaccgtgcaccgcgacccctacctcggcctcgaccctgagatgcggctcgagcttgaggctggatgggaggcacgaatacgcctccatggcctgaacctccaaatggcggtgccattggcgcttggaacccagctccaatcgcatgcggcccgtcaactcctgccgccgacatccgaccgccccgtcgcggcccagatccggaagctccttgagcacttggccggcccctcaacccgagcgtgcgatgcacggtacggggagggacgcctacgctaggagggcattgactgccatccccttcgccactgcgaagaaggtcttggtagccgtgcatggtcgaccacttgtcgccgtagttgaggtcgagagccccgaagttgaaccgggagggttctggctgctggaagaaccctcgccaaagccactcgagttgtaggacgtgcggccgccatcacgggagagatggagaggctgcgcgaggaagtcgtgcgtagggatgctggcgccgaatcgatgctcggccccgtaaaggaggatggtgctcccgccgccgtatccgccaaggttgttgccgtcattggcgtctccgtagccgtggccgctgtcgccgttgccgtacccgccgccatcatggctgtcgccgtagtcgcccccgttgttgctgtcgccctcgtacaaatccattgcacgctcccgtcgattccgctgcacgcaccgccacggatgtgatggatctggacgaggaacccttcgattcacccagggtagggttggattacagcggcggggaggacagatgcgacgccgatgagttcgagagagagtggacgcaggggagaagaaccttagggttagcgcgtgtgaagaggcgatggggaatggataggatcggcgggttcggcgcctcccaggggtataatgggccaccctaaccctaggctactgttgggccttaaatgtgcaatatggccgaatttcaggtgactacccgtttagttctaaagtccagactgcaccccttgtaccgagttttttggcactttggccctatctaaacacggcctcaatgtagcacgaggaagcaagagaggctcgagaaactaggttctagttatttgctggcatgtgctttgatgtgtccatcggaagccattgatgcttttccactatgaaggattctggttcatcgagggactgaatgtattcctttttttttcttatagcacattaggaatatgggacaattgatcgattgaacacttcattctccgcggtttcttttgtttgaaatcacaagtttctccatctacaaatgaaagagacataggttttgtagatatgcaggatttaatttgcaacatcagctcaatcatgtagacagggcatgatttcctcatatggcatgatgactacctgtgtacaaattgttagagtacatatatatggtacttagaaatgtattaggatagtattgatttgtgtaatttttttcttatatgtaatcttttcttatctctaccacgtatattttgtatatatcggtccctgagcttaatacgtacatgtgtaatatttcgtagtatttttctccgtttactattctacacaaatatattatttccataggccttttgttagatgtcatttagcgaactgtctcttgaaacgtcatttagccgtgtgtaagagggcttttacagggcatcgaagaaagtcttcaatgattttcgtggcagtgacagtccgaatcgcacaagaccagaggagctttgctctgctagttttcttttgttgcacacggctattttcgactcgacacctctgattcatggcagcgttcgtgctgcatacagttcgctcaagcgtcttgcctccttttctatcatgtggttacttttccagatgaatacagagacatttagagaccataggaaaaggtacgaattacccccccccccgaatctcaaaaccggacaaattacccccttggctcaacccagagtggttttgctcctacgtggcacatacatggcgccacgtggcaatccaataaataaaatattaaaaagctgtgggcccacttgtcatgtactcctacctcacccctctctctcttctctctctcatcagctagggggcacgacgggcgtgccgggagggcgagcggcgatggcgaacgcgaagcacggtgtcggcgaccgcgtccgtggcggcgacgcgtgagtcgcgcgagatggagcttttgcaggaggtggatggctgcagtgtggtggtggtggtggcccaggcagagaaggcagcaacggcggtggagtgcgggtggcggtgaggggagggagagacggggagcgacggcgagggagggggtggcgcgagcttgtaggggcaacagcagcggacgacgacgacgagacaaccttccccgccgagccgaggtcgtcctcgggcaccgccggggtgccgtgctcgccgagagaggggaagaggagagagaggtgcgggaggacctccgccgcctgccgcggtcgattccttcacgtgagcttcatcatgggccacgccgcacgccctgaacgccccctccacgcccaccgccggcctcggggtccgctctcccgactgcgctacggagagacagagagaggggggaggccacttgccgtagtcgccgtcgtgggccacgccgcgttccatcaccgcctccacaacgcccgccgccggcctggggtccgctctcccgatggtgccagagagaaagaggggaagagccttgcctggcgccctgccgcagttgccgccgctcgccatagtcaccacagctggacagacgacggcggcgccaccctgcttagctcgcgggatggaggatcggcgtagcttgctcagcccaccgccagcctcgcctcctggcccgcccgccggcctcggtctctacgcccgcccgcctccggcctcggatcctcgcccgccgcctgtagccatccccgccgccggccgccagtcggtgtccgctcctcgcccacccgccactcgcagtcacctccgtgcccgtctgccgcctgcagccgcctccgcgcctgtctgctgcccgcagccatcccctccgccggccgccagtcggcgtcggcctccgtgcccgcctgcctctggcctcggctcatcacccgtccgccgcccgcggccatccccgccgctggccgcccatcggcgtcggctcctcacccgctcgccgcccgccagccgcaagatctgtcaaccgagagagaggagtgaaaaaaaacgctaaaaggtgggccccacctgtttttatttgtttttgctgactgtatcgccacgtgtgtgccacgtaggctgaaaaccgcttcaaatcgagttaggggggtaatttattcggttttaagtgtttggggtgttaaatgtccggtattatagtttcgggggataaatcgtactaccgcaatagatcagggggtaattcgtactttttccaattaccatatgtttgatgcatcgatgcaggctgatcgtgcatgcatgtttaatttcttacatgcctgtggttgatcatcaggataccaagtctccgaccacaacgtgttctttatgggaaaactgataaacaaatttcatcacttcagttaaacggaagaaactggatatataaatatggatgtctatgcctgattctggaagccatacagatatacagacaaaaacatctcgagcgagcacctgacaggcatgcacagaacctcccaaatggtatactattggtgcctagaccgatctctgcacgctcttgtaaccacagatcaatctgtagcccgaggtattgtgccgccgactcctgcaaccattggatcgatggtgcaccattcaatctactattcaatatttaatatactaactaagtcacttgggcatagttttagatcttggacccacagtaaatttaaaatttttacgttaaattatagcggtgcaaagttttaaattttatctaaatcgggaattaaatgatttatctaaatgttatcaacgtaatcgtagatctagattcattgatttgtaaagctagaaatacccatctctaataaatcttaatttgatccaaaaatgtaccaaaaagatctaagtacattgtcagatttatacaaacgtattggtattgagttgcacatttgcataatataatttagttggatttctcaccacacaacgcaacttactattgctttcatgatatgccacgttgataaggtaaggatcctgctgcattatagggactatagctagtctagagattccgtgaacgaggtggaaacaaacaagcacacagattcacaatattgacagaaaggtattggaaaaatacttgcggcaatctattcgtcaagcgaataaatttttcatagatattaataaataatgttgaaaaaatgctcgtggcaatctattcgtcaactcgttttccacattggagtatgccgtgggaaaacttgattcaaaaccacctaaaaatgtccgcatgtgattaaatgtccggatttaaccgatgaggtgtgtgttgtcttttttttttcatagttgagggcggtataaatcatattaattttttcctatagtagatatggaaaatctagttattaaccctatacaaagctgtgttgtttcacattttatacaagtttaggctatatgtattgtaactatagtcggttaattaagaaacaagaaaaatcgcataatttgatttggttactttacaatgaggaggtacccttctattgtttgaaaaattcctaagagggtaaaacaaatatctaataaataaacccattcaaacaaagatccgttactctcttacgtttcgagacgtatcttggtcgttttttgttgcgttgttatcatctttcgttgtgatttatgaacagcttctgccagaaaccagagttgctggcttctagaatagcaaaggcagcggcacgcgcggaccaagccagcgattgattggagacccttcccccccccccccccccccccggcgcgcgcgcgcatgtgctgacaattaagcgtcaaaatgaacgtgtgcgttggtgtgtgcgtggacaaatacctaactatcactgtgaattcagccagattggtgcgttatcgcacgcccaagttgcccaagttgccgagatcgatttggaacttgatcaaatccaaaacgaaaagtaggagatcgatgccgcagtgcagcccaaaactacgtacgctaggctacgtcctatatatatattcacctgctttaatttgcatcgatcccaacttaaactgagtgacgccgcgccaatatgcagccgcgctgtacgctcatccacgccgtcgccgtcgtcgcggcggcggcggcggccgcgctgctgcttcctccgctcgccgccggccagccgtggccgacgtgcgacaccagcgccggcacgtacaaggccgggagcgcctacgagtccaacctccgtgacctcgccgccgcgctccgcgcgggcgccgccgcctcgccgtcggcgctcttcgccacgggcatccgcggcggcgcgcccgacgccgtctacggcctcctcctctgccgcggcgacctcagcgtctccgactgcttcgactgcggcacccgcgtcctcgccgacgtcggccgcgtctgcggcggccgccacggccgcgccaaggacgtggccctcgtgtacaaccagtgctacgcccgattctccaacaagggcgacttcctcgccgccaccgacaacgccggcggcgagacgctgctcatcagcggcaccaacatcaccggaggcgccggcgtcgtggcggcgtacgaccgcgcggtgaccgagctgctcgcggccaccgtgcggtacgcggtggaggagaacccggcgaggctgttcgccacggggcagcgcgtgggggacgacgcccgcgacccggggttccgcaacatctactccatggcgcagtgctcgccggacctgccgccggcgtcgtgccgcaggtgcctcgacggcgtcttggcgcggtggtggcaggtgttcccgctcaacggcgagggcgcgagggtcgccggcgcgaggtgctacctgaggtctgagctgggcgtcggcccgttctacaccggagctcccatggtggtgctgcgggcggacaaggtctagccagcgtcgtcgccattggcacccgatggaagctgcggtagctacagcctacagttctacgcaccaaaatggtggaggtgcaccctacctatggccgacaaagtgcaagcaaatctctacacgtatacctatactattattaggacattccgacaaaatgtccacgttcacccgagaaattttagtgaataaatctggacatcgatccagttaaaaccaaatttacaacggttcaataactaaaataattgatatgcagctcttcgccaacttcaggtagaggttcacaaataaaattcagtagttgtgggagctttatcttgtgttggtgtgtattagtttgtgcttacttaatattttgttggtgcgcttctaaactcactgtgtaagattgcttttgtgtgaattctgtaataattggatatagctcattaagcaaaaatcgagatgttttattccatcacctataaaaaagctaaaataatcgacaaagctttcagttagacgtccaatcaaatagaaaagatagggcatcatattacctatgtctaagctacatggccgctatatgtgcatgcagtagcctatcttcctactcactagcattctcctcccttccgatgtcttttctacgtttttaaaatagcttgacatgagttttcttttaaattatttatattcaatttacaatccgattatatcttgaatttattgttattaaatatgtaaaaaaagatatcacataattatattcttatgaaagatatgtaaacttatgttttaaccatgaaaattcatgttcatacgcgatactgaaatgtttcaacatatgtttcacataatctttcagtatttcaatcactattttttttcaatgtttcacccgtggacaacttaaacatttcacccccccacaaaatttttttttatggaaattaggtgcctggtatcaatttcatgttggtacttcctcccgttccgtaatccttgatgttttggataagattgagatcaacaattaaaactttaactatcaatactccattcatttcacaatgtaagtcattctaacatttcccacattcatattgatgttaatgaatctagacatatatatctatctagattcattaacatcaatatgaatgtgagaaatactagaataaattacattgtaaaacggaggaagtaacttttaaaatatctagtttgaagaaactacaacattatgcatagattaattttgaaacatgcattaataaatttaaataatataataaaaatatagttaaaaatatgttctcgagaccgtattattatccaacacgtcaagaaatataatagaactgaggggagaatttagtcagatggtttatttatacgaaattatcattaaaaatgcttcctatcggtctgctgataaagccaacaggttgtgcctccatcttgcgcttgcactttctgcatccggcgcacctcgtttctctctctagctgcatgcgtcatctcttagacggatagtctgtctactctctctatctccttgagcatgcagtggctgtctgcattcatgcatgtgctgcattagtaactttaaacgattttacgtgtcagatgcaaatgtttccactcatatttgactttacttatcgattttatgaattctttccatggatttatcactgggctcaatgtttcatgtcacggttgttggtgttgcagtttgtagtttttaaacattccatttctctgaagcgtttcactaagtggtgaaacaacatttggttctttttcgaaataaacaagatgcccaagccatagtctcatctaattattacatattaaaaaaatttccattccacacctatggcaacagttaaatattttgtccctaaacttcaaattttcctcctctctctataccagacacattccatcattccactcatttgaatgaacttttagccatggatacatgactcaacatgttgacgaggcctggcacatttgttgagcacttgagctctctactatggttttgctctttctatctctctcccctgcacacgagagatgttaatagttgtgcattgtcttgtcagcatgctaactcatctgttcatacagtgaagagtttcatgtttagagatatgagtattaatgttttgacccattgttgtagttgagcgacagaaaatagctagttcattgtaatagttgggaggtacgaaggctacacttttcttcattataaaacaattataaaaacatgtgatgtgcttccttcatgtgaataaaggagtcacgcattaaacatgtataatgcatccaaacaggtgtgcacaaaaactaggtatataattattgaggtttctcttacctccttggaaaggtacctcctcactattcaaggggaaaaagaaagaaaatcggtggaactgattgaaagaacagtatacaattggtaaggttggactttttttttccatgggacttgggaggtatatagaggcatatatacctcacaatgttagtcatgaggtatatgcctccatatatataccattgaaataatacatttacctatgactctaaaaaacttctcaaccctattccaacctctaagattagttttggtacctctcttcatgaagggcatatctatatatataaggaggaatacaactcttcaagggtggtagatttttaggtcatgttatgatatgccatatgtgctatgatttgtactttgaggcaagccatacagtacttcttcccaattgatcatacggtaggtagttattaagagatgttcactttgaagtgtacaagacacagccgtgcatacaagtataaaccatacatgtgtcttgctaccaaaatagaaacaattcagacaacatcgccatttctgattcactcattatatatattgtcatattgcagtctgcttctacataatctacatatacatttggactgggaggtcttgaaaattgtctctctccatctaggaaaagcgaaagcttttgctgtcatgcagcctcttattaagagatcttccgaaggttggcaatattgtgaaagctaatctcttcagaggagcgatcgacgttttaatgggatgacacaatttggaaaagtataaatgttagttagtgcttgtgtgtttttttaaaccaaatgcatgtaactcccacataatttattaatgaataagtcctacataatttattaatgaataagcccgtctggcctcctgaactgtcaagagactagtgcactgtttactatattgactatgttaaacaaatttctttgctatccgtagttgtttgtgttcatgcaaaaaattaaatgcaacttttttatcgtctttgcctctggatcatcctacatcaattcagtttttctatatttccgtacgttcaacattatgtacataattaaagtggctttagctcaggatgacacaacaaccctgtcagactgtgctgagggtgatgttgggtttagtcccacatcggtaattgatgatggggagcacgacttaaaaggtgagagacgcggtacccacctatcatactagttttttaggttgcttaggtccagaacctaaagttgtggctttgattgggtctgtggtggagcaggtccaatgtcacatgggtggcccaagattggtgggccaggctgcgcactctaacaggtaaccttgtatgtatatcaaactactagctaaatacccatgcgttgcaacgagggggctcatattatttgtcatcatttttacctcatttaaacaaatcccctgttggaataaatattgaattaaggaaaggacaaaaaaatccttctaccttatcattcactggtggagaaaccatcttttgtcggtcggccgaatttcacaatagtcccggttgcaataaaaaccgggactaaagataacgggcatatttaatctttagtcccggttcaaatgctgtcagtgcttgtcaggccccccgggatctttagtcccggttagtgttaccaactgggactaaagatcccggtgatctttagtaccggttggtaacaccaaccgggactaaagtcccacccctttatatatgtcttcttcctcctccagcccgagcaagcttcaaaatttcttcaaaatttcttcaaaaaagaggggaggtcatgccaaaatttatagtgaatttactttggtgattatatacaaatcggaggtgcctaaaaggttagcaacttcatcctccaatgtttttttggtcatattacatttggagctatgttttgcacacttttttatctccaaaattttgttgtaagttgatgagagagaaaatttgtgtgggaaaagaaagaatatatagaaattttgtttatttgctaaataaggttttataaaatagttgagtaggaaaatatagagaaagttaatcttaaataaaagaaaacaaactaaattgaaaattaaaagaatttaaaacttaaaaaataataaataagaattatttggtggaatattttataatttttgtatgaataatgatatgtcattattgtatgactgttgaaagagtttgtgattattttatcattattgtatgactgttattattgtacgaatgattatttgtgtacgatttttttttcatttcatgtagatggatcgtcaatggatgtacgctgaccggcggtccaaagagtttattgacggcgtgcattattttttgagagtggccgaagctaacaagtagaatggttttatttgttgtccatgcaataagtgtaagaatcagaaggagtattctgcatccaggactattcatttccacttgtttgagtcggggttcatgccaagctataattgttggacattccacggagagcaaggggttgaaatggaagaagatgaagtggaagacgacaatattccagactttgctcagtacgctggatttgaaggaaatcaaacgggcgaggaggaaagagatgctgattataacgatgttgcggatgatcttggtcagatgttgcaggatgccaaggaggactgcgaaagtgtaaagggggcccataaattggacaagatgttagaggaccacagaacgtcgttgtacccaggttgtgagcaggggcacaaaaaattggataccactctggagttcttgcaatggaaggcaaaaaatggtgttagtgacaaggcatttggcgatttattgaaactcgtcaagaacattcttccggagggaaacaaattgcccgagacaacgtacgaggctaagaagatagtctgccctctaggactggaagttcagaagattcacgcatgtccgaatgattgtatcctatatcgcggtaaggagtacgagaacctagaagcatgccctgtttgtaaagcactacgatacaagattagacgagatgatccaggtgaggttgacgggcagctaacgaagaagagaattcctgctaaggtgatgtggtatttccctataataccacggctaaggcgtttgtttaggaacaaggggaatgctagaatgatgctttgtcacgctgaagaacgtcaacaggacgggatgctgagacaccccgcagatggttcgcagtggcgaaacatcgagagaaaatttaaagactttggaaaggacgcacgaaacatactgtttggtttaagtacggatggcatgagtccttttggagagatgagcagcggccatagcacttggcccgttacgatgtgtatctacaacctccccccttggctatgcatgaagaggaagtacataatgatgccgattattattcaaggccccaagcaacctggtaacgacatcgatgtgttcctaagaccactggtcgaagatcttaaactgttgtggaagaaggaaggtgtccccgtgtgggacgaggacaaacaggaggagtttaacctacgagcgctgctgttcgtaaccatcaacgattggcctgcacttagcaacctatccgggcagtcaaacaaggggtacaaggcttacactcactgtatggatgaaacagaaagtacgcttaagcactgtcggaaggttgtgtacatgggtcatcgttgattccttgcagcaaacaatccagtacggaagaaaggaaagcactttgaacatacggcggaccaccgtacgaagccaaaacatcgtagcgggaaaacagtgtttgctacggtgaaaggtcttaaagtagtgtttggaaaggggcctggtagccagcctatagagtgcgaagatggtcacgtggcgatgtggaaaaaaaaaactccatattttgggagttaccctattgggaattcttggacgtccgccacgcaatcgacgtgatgcaccttactaagaacctttgcgtaaaccttcttggcttcctaggtgtatatggaaagtcgaaacatacactggaagcacgtaatgatctgaagcatatagaacaacgtggcgaccttcacccggaaccaaaggagaaaggcagccattacttgagtccagccagctacactcttagcaaggcagagaaggaaagtatgtttcaatgcttggagagtatcaaggtaccatctggatactccacgaatataaagcgaataataagcatgaaggagaagaagttcacaaacctaaagtctcatgactgtcacgtgttgatgatacagctgctaccagttataataaggggtatcctcccagacaatgtccgggcaacaataacaaagctatgttctttcatgaacacaatttcgcagaaggtcatcgatccggataggttagaagcccttcagaatgatgtggtgcaatgtcttgtcaggtttgagttgatatttccaccttcatttttcaatataatgacgcatctgctttgtcacctagtgaaagagatcggtattctcgggcctgtgttcctacacaacatgtttcctttcgagaggtacatgggcgttctgaagaagtatgtttgtaaccgtgctcgtccagaggcaagcatcgctaagggggtatggaacagaggaggtcattgaattttgcgtagaatttattgaagaccttcgcccaatcgagttacctgaattacgccatgaagagagactacggggaatggggactctcgaaaggaaagcaataatgacggtagacaacaatttattccgtaaagcccatttcacggttttacaacaatcttcattggtggctccttacatcaaggagcacttggctctagttcgcaccagaaacatcggtaagtccgatgcatggattacacggcatcacattgatactttccccgcatggctgtgacaacatctcatgggtaacgagacgattaaccagcaactggccttcctggcgaggggtccatctggctcgatcgcaacattccaaggatatgagatcaatgggtacacattctatacaagagcccaagacatgaagagcacgaaccagaacagtgctgttcgtatcgatgccatgggacacgatggtacaactggcacgtattacggtgccatcgaggagatatgggaacttgactatggacctctcaaggtccctctgttccggtgtcaatgggttaggttgactggtggaggtgttataattgatgacagtgggatgacaacggttgaccttaacaaggttggatactcggacgaaccttttgtccttgccaatgatgtaacgcaagtttttaacgtgaaggacatgtctagcaaaggaaagaagggcaaagggcctgacgagccgatgcgcaacgtggttctcccaggcaaaagaaaaatcgtcggagtagaggacaagactgacgaggattacgatcagtttgatgggcaacgccctttcacggtgacgattgaccctagcatcctcctagcaaatgaagacaccccttactcacgtagcgatcacaaggaaggaacaatagtgaggagaaagtacgtgcggacaaccgtcaccgccgatgtattgccgtaaatgttgtaaactattttggatgtattgaatatgctagttatatatgatgattaacaaatttaaatcatgcatatgctaggtacatataattattagaatttttaaaagttttaaatcatgcatgtggtatttacatatgttaattacaatttttaacaatttaatataatgcatatgctaattatatatgattattagaatttttaaaagttttaaatcatgcatgtgggatttacatatgttaattacaatttttaacaatttaatatcatgcatatgctaattatatacgattattagaatttttaaaagttttaaatcaagcatgtgggatttacatatgtttattagaactttaacaatttaatttcttgcatatgataaataaatataattattagaatttttaaaagttttaaatcatgcatgtgggatttacatatgttaattagaatttttaacaatttaatatcatgcatatgctaaataaatatgattattagaatttttaaaagttttaaatcatgcatgtgggatttacatatgtttattagaatttttaacaatttaatatcatgcatatgctaattttatatgattattagaatttttagtaattttaaattatgcatgtgggatttacatatgttaattagaatttttaacaatttaatatcatgcatatgctaatgatatatgattattagaatttttaaaagttttaaatcatgcatgtgggatttacatatgttaattagaatttttaatgcattatttactattttagaaacacatattcaacgaaattcaatattcagtgctattatctttagtcccggttcttaaccctaaccgggtttaaaaaagaatttggaaatagcgggaaaatatctttactcccggttggtgagaacaaccgggagtaaagatatctttactcccggttggtaacaacaaccggaattaaagatagatttctaatcccagttgttgttatgaaccgggagtaaggttgttctcatcaaccggaagtaaagatctggggggtatatatattcccggtgcgccctcgtcttctccaccaacacttagacgtttttccatcgagatcgagcatcggcttctccttcgccgccactgcttagggcaaccccgcgccgacgccggcgtcgtctctcaccgttgcctggcggtcctcgccgcctccgccgcagacgccgccgccgcctctcttgggtgagagcccccaccctctctctctcgatgtagctctctctctctccaaaccgccgccgcgtgcctagctatagcttgttgccgacgccactacgccacgccacggtcaaccgccactgccgacgaacgacttcggcgtggccgccaccgccggcgacgctgacgccactgccacgccgccgcccctgtctcgagatcatgccgccgccgcgcccccacgccgcgggcccccacgccgccggaccgcgcccccaccgttgcgagatgccaccgccgcgagacgccgccgccgccgccacgctgccgctgcgcccccacgccgccgggccggccctcggcaccggaccgcgcccccaccgccgtgagacgccgccgccgcgaacgaacgcttaacgaacgtgaacgaacgcgaacgaacgcttaacgaacgtgaccgaacgcgaacgaacgcgaacgaacacttaacgaacgcgaacgaacgtgaacgaacgtgaacaaacgcgaacgaatgcttaaagaacgtgaacgaacgtgaacaaacgcgaacgaacgcaaacaaacgcttaacgaacgtgaacgaacgcgaacgaacgtgaacgaaatgttaaagaaatgttaacgaacgtgaacgaaacgttaacgaacgcgaacgaacgtgaacgaaacattaaggaacgcaaacgaacgtgaacgaaacgcttacgaaagtgaatgcacttgtactaaaagtgtgagaacgaacgcgagcaaaacgtgtacgaacgagataattaaacgattattaaacttagcatacatatatgattatatatataggttaaaacgtgaaatacaataaatgtaacttggccctgtttagactaatatattttcctagtaatgttgtagagaagacgtcgttgtcgtccctcaagccgaagtggtagctagccatcgaaggaattcgcgcaggcaagtgttgtaaagaagtgattgttagagatttaatataagattattagagttttaatataagattattagattattagaattttaatataagattattatattattagagatttaatataagattgttagacttagcatatatgattattacaattttgatataagattattagagtttgaatataagattgttagacttagcatatatgattattacaattttaatctaagattattagagtttgaatataagattgttagacttagcatatatgattattacaattttaatataagattagtagcgatttaatataagactgttagacttagcatatatgattattacaattttaatataagattattagagatttaatataagattgttagaggtttaatatacggaacttaattagacttagcatatgtgagtgtcagagattgttagagatttaatataagattattagaggtttaatatacggaacttaattagacttagcatatttgattgttagagattgttagagatttaatataagattattagagatgtaatattcgaaacttaattagacttagcatatatgattatctagggttctaatacacgacacttagacttagcatatatgattatttgagttttaatacaagattaattagtagagttttaatattacgcttagcaaatatttcttctatgaacagatggctgatcgcgatgaggaacagatactgtatgatacaatcgcagagggaagcagccaatactggaacgaagaagaggggaacgaggatccaaaccagtacttgaacgaggagcggaacgtggagagggatgcagaggggaacgaggaggggaacaaggaggggaacgtggagagggatgcggaggggaacgaggaggaggccagtggaagtcatccctccgctggacagaagagggcacgcggacaacgaggtgccacgaagaagataaagggtcggcacatcataactgaggtggacgaagacggccgacctagtgccccggcagaagcagccaagaattttgtacaccacatcggttgggttgtgagggataacgtgcctgtcagcaaggtgtactggcgcaaaacaagggcacgcggggatgatgacagctttgtcccggaatcagagaaagagatgctgtggactacaatgctcgagacgttcacgctccctgcgggtacggagaacatagtgaaacagtggactcttaagaaaatggcagaacagttccagactgtcacgtcctgataaattcatcccgaaataaaaatcatcttctaaaaggaataatagaattaattaaaattcgaaaagaaattggcaaacactaaaatacgtacaagaaaaattcaaatgtggcccggagaatttttgttaaattctccttggtctaaaaggagccctcaaattttagtggaattttcagagcacaaataataattgagaagaaataaacaaagttgaaaaggtttataaaaagaaaaatccctaaaaagtctttttcccccctttttccttcttgggccggctcggcccattccctccctctctctctcttcccccgcggcccatcggctctctccccgcgcgcgcgccgctgacgggcgggcccgcccgccgccctcgctgacgggtgggtcccgcctgtcatctccctcctcgcgccgcgccgccgcccgcccgtgccctagcgccgccgccgccgcggattccgccgcatcccgccgtccccgcgcgcattaaagagggggaaattattccccgcgattccctctcccgtttcccccgttttcccctctctctctccctcggattcgtccggattcatcccgcaatcgtcgccggcgtcttcaatggcggccgagatctccgcgccggtttccttcctctccggccgcgctctccccctctcggcgctatatatttgctccccgtgcttcgctcttccgtttccgccgctcgccgctcgctctccccgtcggattcgtgctcgcgccgtcttcctctctctccgccgtcgccgacgagctccggttcgccgccgacgtcgctccgcgcttcctcccgactcggcgccacctccgtcggcttcgccgcgtcgccgccgaccccgtccacccctccgcttcgctcgccgaccgccggagcaccgtcgccctcgccgtcccgaaccgcgccgccgcgttcctccgctccgttcgtcgtctccgccgtcctcgtgtctcggggtgagccgtggaccgtccctttcgcttccctctcctctccgctctctcgggcgccgctccgccgcgccggtggtcgccggcggtgaccatcggggcgcggtcgtgccgcctcccgtcggccgtgccggcgaggccgccttcgggcgcgccctcgcggctgccaagtgggcccggccgtcagccgcccgcgcccgcgggtgcggctgacgcgtgggacccacggcgccgaccgccgccagccgcgtgctcccggtccaccgtggaccgagaggctgacgcgtgggccccactcccgtggacccggtccgcgcgccctctccctcggctgacgcaataaatgagttttttaattaaaatttaaatgaagaaattcgcaaatatccatttaaagagcatataaacttcaaatggccatatcttggccatttgaactcggaattggaccgttcaagtctctaatttttccttaagaagtcaagaacccatttttgtgctttgttcctgctgttatgtggaggttattagagtaaaagccgtttcttttccgttggtcgtgtagacgctgcagcttcggaagatccgctcttcgtggaagtcgaagccgtcgtttgggaaagcgagcaaggcaagtcacatcatccttgatcatattgaatcccagtttgtaaaattatgttgatttaaattattgcattaccgctttatttaaattcccgcgttatcactgttttatctagccatacctatttacctttgttatgaccttattattattgttattgttattattactttgttcaccctaggttaaacaaaaccccaactagtgagtactctatttatggttccactagtatgaatttaggtagatgcttcgctgattaattaggcaacattaggtggttttataactttagactttgggaattctcatatcatttggacactatggaattgttggattatggtggaattggacatacacctctcttcctctttcaaaacccctaaaacctgttttcggtggggtttgggtgcatgccagttatgggaagtagcaccccggccactataaggattaagctcgggcctctgttgcaaagcactaccgtactaaccacatgtctaatgggtaaggcttaactcggtgctcagtctagtcctgaacaaaaggacacggatagagatggatgaagtcgttgcgacgatggatatctctgaggcaaatgaaggctacgcgagctgcggctcggtaatcgagatgtctaggcaaatgaagactacacgggtcggtgcccgttagtcgagatgccatggcactggactagtacgcgggtggtctcacccctatgtgtgtggcgcacccggtctagatcttgttgctaggggctcaatcctggcctgcctgtcccgggataccggccgtaggcagggttgggtcggtacttttgttcacggctaggatgggtgaagggttatgtcacatctttacgacgggttccaaggccatggaatgcggagtaaagatgtgtcttgtgggtaaagatgtacacctctgatcagagtaaatctattcgaatagccgagccctcggatatgggcaagcctagcaatgtacccaagtcagtgttttaattcttaaaatttgctcagcaactaaaatgtggaatggttggcctgggttggcttgggacgagctggaacccaggtcgggttgccagttcggtccaaatcatcgtaggccttgggtcaaggcaggttcgtgagggttcacggccttgtttaataatactgtgtagctctagaatcgtctttacaaaatggctttgggcaactaagtgacttttaaatgctgtttactgcaaaacttaatccctattattattcccttgtacctcccttgcattaattatgcatccgccggtgtggcttgctgagtactgtggttgtactcattcttgctcaatccttcccctcttcagtaagagaagctttggagaagatgtcttaggtggagtcctggcttataccccagttgagcgcctgtgaagatggagccgtaggcccgctagtccgctgctgtttatttttgattgtcaggccttaagtgcctttgtaataatgtaaatattatcgatataataaagatgtgtcttttatatcatgtttgtgtggtgtaccccggcttttcctgggacggggattaatacactagcgttcgggaaaaggcaattttcccggtcgcgacacagaccttcaagggagatctatacaagaaatacatcctgaagggactaacaccgaacttcgacgtattcccaaagctaagggatcattgggacgagttcgttgcttacaagacagggcaacaagggcaagcgatgatggtcaaaaacaaggaaaacgctgccaagaagaagtaccatcatcacttggggtcaggcggctatagcgtcgcaatgccgaagtgggaggagatggaggcaggcttgattgagaggggtatcgaaccggccaccgctaaatggccggatcgatcgaagttctggtactatgctcacggtagaacgcttaacccagttgatggctccctggtcttcagcgatcagatacgcgaggctgccagtcgactaacagacgcagtggaagcctcttctcagggcacgttccgacccgacagagagaaggacgagctgtcactcgccctacagactcccgagcatccaggacgaacacgagggaaaggcgtgattccctagaagattgtgacggagctcgtggctcctcaccgggagaccgcgcaggcccccctttgccggttcggccgggggcttagggtgaaatctcaagctctctcggtatgtggaaagatcgccagctaggaagaaacgcgagacacgggcgatgtatacaggttcgggccgctgggaagcgtaataccctactcctgtgttttggtggatctgtgtatgaaggagctacaaagtgtgagccgacccctccctcgttctaggctctgaatctggaaaaaatcaacccccttccctatgggcagggtcctccttttatacttcaaggggataccacatgcacccctctctttccaaactggacttttcttctcttcataaatggacggagatttgcacggttgtcctccgaacatcctcctgacgggacggcacacacctacctccacttctgccggaggcaggcgcgtcgtgggaacgtggctgtctgccgacgacatgaccggtgttagaccggtcacaaatcggtcattcttgcccaccacgcgtcagcctagcaacgtgcatgtttgcccttcttcatgtagcatcttgcctgtaatggttgggatgaagcctggtataaatctaaccagggctaacgtgccatctctaagagattacacgctagctccggcttgagacgagtgcctagaggctttcgtcttgacgggatggggcaaggcgtgcgtcagaccgccagtcgccacctaacccgtgatctgaccggtctgtgactggtcacagaccggataaaggaacgcactgcactacgctgcatgcagcgtgacacgttcgaccaaaccgcaataaatgtggttaggtgaggcttaccgtgttcacccaacccattcatgtggcgctaactccacaaggggtcggggcgcctcggccctcggggccggggcaggagtcacccgaccccccctcggggaaatcaggaggagggcggacacctcaccctcgggcccgacgtccccgaaggtgccaggccacgtgggcgattgtgtctgcctcaagcctctggtcacgatactcccggtcccatatcaccgacagtagcccccggcgttatgccagggcgatcgcccttctcaagggaagcggtcgggcgtgacgccactcctaaagcttggtgacaggtgggaccggtctccatggttgggcagaaacccaacggtctcaaatcatgcacatcggtaatggtgacttggctgtccataatgggcggtctcttcaagactgccacattacttgagcgacgtacgaatctgggtaaaccgatttgcttcgcctggagatatggtaacgttgcttcggtcggcgagcgtaattaacgcgcgcacgatacgatctatctcgactgccacaaccgcatatccacctcatgcgccgcaagcgggcgaatgggattagtggaagcgtgggcacgagaaacgagggagcgagatagtgagaaacgagggagcgagatagtgggcgcgagaaacgaggagccgggcacagcgatggcaaaggtataaagacactgaggaacggatttgctcccttcctttcgccactattccccttgccttcgccgcttgagctctaactctttctctgctgcgcctttccttcgccacacgcgctcgttctcaatcatcccttcctccggcgccatggcacggggttccgctctgctcgacggaagcgtacttccgccttctcgcatcgtgagcgagaggcacgccgggctgccgcgccgctttatgccggaatctgccaccggcagggagatagtgatgctgggcgagggacgcccggcaccagactacccggggcggtccgtcttcttcctccccttcgcaatggcagggctggttccgccattttcttctttctttatggatgttctggatttctacgatctccagatggcgcacctcacccccaatgcagtgatgacattggtcatcttcgcgcacctgtgcgagatgttcattggggtgcgcccatctcttcggctgttccggtggttcttcaccgtgcagtcggtgtcgccgccgtcggtggttggtggctgctacttccagccgctggggccggtgttgaaccgctacatcccctgcgccctccgcaagaagtgggacgactggaagagcgactggttctacacccccctcgccaacgaagcgcgcctccgacttccaagtcagcccccggcgcaggtctccagctggcgggcgccggtagatctgggggatgactatgacgccgtcctcgacagcctggcgggcctgcgatcccaggggctcacaggggccatggtgtacggcgactacctccgtcgccggattgcgccgctccaacggcgcgcccggggcacctgggagtacaccgggtccgaagactacatgcggacccaccagggagtcagatgggattgggctcccgaggacttcaagatcgtggtccaaagggtgctgaatctcagctccgtggaggcgtctctcattcctcaaggaatcctccccctctgcagcgatcccgaccgcgcctccattctgaccattatgatgggggtcggggcctcagaggaggaaactcctaagggccacgacggcgcgggcgagagccgccggggggaacaatctaccccaggagggggtcgtgcttctgggccccgcgtcgggggctcggggagcagccgccctgccgacgcccaggggaagaggaagctgggaggaacacctcccccatctcctccccgagggggcggggcggtgcgtgccagcagtcggcgcccggagggggccgcgctgacatcgcagcccgagggggagcgcaagaagaagcggccccgcaagatgggggagacggaaccatcccggggaaatctgatttcccctccaaggtggtcatttaaccgaccccctcgcaggttcgtcccactctctttgcgaccgcctttcttttacccaaaagcaagttttctcttacccatcttgtttgtcttctggttttttcttttgcttcagcgatgtcccgtcacgttcctcccgccatcccaagtctggccagtccgaggccgaagatccggcggccgcagaggaacggaggcgagaatctgaccggcgagaggccgcagatcgccttcgggaagctgaagaggccgcccgggaggccgctcgggctcgccatgcagaggataccgctcgggaggaggccgcccgggctcgccaagccgaagaagctgctaaggaggaggccgcccgggctcgtcaggctgaggcgatggcgtcttccgaggcagctcacgacgaagctgctggcgcgtcgcttgggcccacttccccaggcgacgcccaggaccaaacgggtctgggggacatccccgagcccagcgcgtcctccggcgggccgagccgcgtcgcattctctccaaggcggctcttcccctcgtcttctgtcgccccgctgagcgccgagccccttctgcaggccttggccgccgcaaacaccgcggtgctagatgggttcagcgcccaagtggaggccctgcgagcggaacgagcggagctcgaggccgcatgggcgcgtgtcgaggaggggcggcgctcggtggatgtcatggtggaggtgggccgtaaggctcaccgccgtcacgtctctgagcttgaagcccgcaaagcggcgctggcagagatcgcccgagaggtggaggaggagcgggaggccgccctcattgccaccaccgcgatgatcgaggcgcaggacaccctccgccttcaacacgggagctgggaggcggagctaaagaaaaagctcgacgccgcccaaggggtccttgacaccgccgctgcccgagagcggcaggcaacggagattgaagcggcgtcccagcggcgtgaagaggccctcgaggcgcgcgccatggcgctggaggagcgcgtctgcgtcgcggagaaagtcctggcggaccgcgaggccgccgtcacctcccgggaggcaacgctggcggcgcacgagtctgcctgcgccgaagaggagtccgcactccgcctccgcgaagacgcgcttgccgagtgggagcgagctctcgaagaggccgaggccgaagcgcaacggttggcggactccctgtccctccgtgaggcagcgctgacggagcaggcccgccgcaatttggaatccgtccgcgccgagagagccgcactggagcagcgggctgccgatctcgaggcgcgggaaaaagagctggacgcgagggcgtgcatcggcggggcggctgcgggcgaaagcgacttagccgcccgcctcgcagctgccgaactcaccatcgccgacatgcagtgcgcgctagactcatccgccggggaagccgaggccctccgcttggcgggcgaaatagggcccggcatgctttgggatgcggtctcccgcctggatcgcgccggacggcaagcgggcctctggaaaggccagacaaggacgcactccaccaacctggaaggcctcgcttcgcacctcacgaggatggcctgggctcttcaacaactccccgaggagctcgagaagaccatcaagtcatcctcgagggacctcgcccaaggagcggttgaactcgtactagcgagttaccaggccagggaccccaacttctctccatggatggcgctggaagagttccctcccgggaccgaggacgacgcgcgtgcgcgggtccgggatgccgccgaccacatcgtccacagtttcgaggggtcggcccctcggctcgcgttcgcccccaactccgacgaggagggcgatgccagcggtgcagacgatcgtgacgacgaggccggcgacccgggcgcatcggactgagcccccaggcccccgcctgactccagtttttcctttttctttcttccaaggccttcatgcctcttttttgtatagatcaacttaatctggaatcaaaaatgatgaaaaaattcgtgtcaattttattttgctatgcgtatgagatgaggatgatctgtgccgtggtcctcttttgtgtcttagcttgatttaaggactcgtgcccaagtcccagtcctctaatggctcgggtcggggctagtgcctggggagatccacatgtcgaggctggccaggccgggaacgtggtgaccgagggttatgggtgacccgattgtgggtttttgccgattcccccccgaagttcaccacgccccggggcacggctcggttctgggccccgtttggcgattttagctgaccgaaccgagcccccgagggcaaggttgagtacgagtgaccttatttcaagtcaagattctacaaaaggaaaaaacggcacagacacaacctttaggaaattgaaactgcttttattgaaatgctgaaataagagaaataagaatgtgcatgcgtggtagcccccggccaaccctgcacacccgaggggggtgcggggttggcccgagccaaaacctgacactcgacccccccctcaggggtagaagcgacgaaggtgttcgatgttccacgggttaggcagctcagtgccgtcgcccgtggccagccgtatggagcccggccgggggacaccgatcactcgatacggaccctcccacattggtgagagcttgctcaatccagcacgcgtttggacgcggcgtaagacgaggtcgtcgacgcagagtgatcgggcccggacgtggcgctgatggtagcgccgcaggctctgctggtagcgcgcggctcggagggccgcgcgcctccttcgctcttccaagtagtcgaggtcatctctgcgaagctgatcttgatcagcttcgcagtacatggtggcccgaggagacctcagggtgagctcggatgggagaaccgcttctgcgccgtagacgaggaagaaaggcgtttccccggttgctcggcttggtgtggttcggtttgcccagagcaccgctggcaactcctcgatccacgaatcgccatgcttcttgagaatattgaaggtcttggttttaaggcctttgaggatttctgcattggcgcgctccacttggccattgcttctggggtgggcaggtgaggcgaaaagagcttgatgcccatgtcttcgcagtagtcgccgaagagttcactagtgaattgggtgccattatccgtaataatacggttaggcactccaaaacgggccgtgatgcccttaatgaatttaagtgcagagtacttatcgatcttgacgaccggataagcctcgggccacttagtgaacttgtcgatcgcgacatacagatactcaaacccgcccggggcccgcttaaacggtcccaggatatcgagcccccagacagcaaatggccacgaaagtggtatgatctgcagggcctgggccggctgatggatttgcttggcgtgaaactgacacgctctgcatcgccggaccagatcaactgcatcattgagagctgtcggccaatagaacccttgacgaaaggccttgccaaccaaggtgcgcgaggcggaatgggctccgcactcgccttcatggatatcggcaagaagctcaacgccttgttcctgaggaatgcacttcaggaggattccattagccgcgcgccgatagagggtcccttctaccagcacgtagcgtttggaaatgcgttggacgcgttcactcccttcacggtcctcaggtagagtcttatctgtgaggtatgcttggatctcagagatccaagcaatcaatctaagggagcttggagcgctcccttcgggtcccgaggcctggactccgacgggcctcgggggccggtcaggcgcatccgtctcccctaaggggtcgggtcgcgccgacggctgggtaagcctttcttcaaaggcgcccggtggggtctgggctcgcgaggacgcgagccgtgagagttcgtcggcaaccatgttatcccgtctgggtacatgccgaagctctatcccgtcaaaatggcgctccatacgccgcacttggcgtacgtaagcgtccatctgtgggtcagagcaccggtactccttacagacctggttaacgaccagctgggagtcgcctaacaccaagaggcggcggatccccagtccagctgccactctgagtccggcaaggagtccctcgtactctgccatattattagtcgctcgaaagtcgagacggaccaagtatctgaggacgtctccgttcggagaggtcaacgtgacccccgcaccggcgccctggagagacagagaaccgtcgaactgcatcacccagtgggcggtgtgaggcagctgagaggggtccgtgctggcctcggggattgagacggtctctggagccggggtacactctgccacaaaatcggcgagggcctggctcttgatagcgtggcgtggttcaaagtgcagatcgaactcagaaagctcgattgcccattttaccactcgtcctgtaccctctcgattatgcaagatttgaccgagggggtaagacgtaaccacagtgacccgatgcgcctggaaataatggcgcagtttcctcgaggccatcagaatagcgtaaagcatcttctgggcctgagggtatcgggtcttggcgtcccggagggcctcactaacaaagtagacaggccgctgcacctttcggcggggccgatcctcttcgctaggggccgcatccccggggcgttcttcgtccaagtggcctctcggggcgcactcgtcttctgtgccgatgacctcggggtcggaggatgacaggagcggccttcccacagtggcctcggggccgtcctgggggtcgggggctcctggcgtcgtcggacaagcgggcaaagggcctactccggtcgtcaggggcctcaggcctccgttcggctcgggggcctcttctccctgctttctcccgggtcgagtcagcacagggttagcctcggggccaaagggcgataggtgcggccttcccgcagtggcctcggggccttcctgagggtcgggggcacccagcaccgtctgacaagcgggcagagggccgactccggtcgtcaggggccttaggccaccgttcgactcgggggcttctcctccctgctcgctcccgggccaagtcagcacagggcgggggtgcgcgaaatgaggattgtcttcatcgcgctccacaaccaacgctgcactaactacttggggggtcgccgctaagtagagtagtaggggctcgtttggccccggggcgactagaactgggggagagctgagatatgtcttcaactgagtgagggcacgttcagcttcctccgtccaagtaaacggccccgagcgcttgaggagcttaaataagggtagcgccttctctcccagcctcgatatgaaacgacttagggcggcaatgcaaccggtgacgcattgcacatccctaagtttgctgggggggcgcatccgctctatagctcgtatcttctcggggttggcctcgatgcctcgggcagagaccaagaacccgagaagcttgcccgcaggtacaccaaacacgcacttatcggggttcagttttatgcgggcggagcggagattttcaaaagtttcctctagatctaagagtaaagtctcttggttgcgcgtctttacaaccaagtcatcgacataagcctcaacattatgccctatttggctacccaaagaaattcgagtagtacgttgaaaagtaggacctgcattctttaacccgaagggcattgatgtataacaataggttcctacgggggtaatgaacgcagttttttcctcatcctccctagccatgcgaatctgatggtaaccagagtatgcatctagaaaacacaaaaggtcgcaccccgcggtggagtcgacaatctgatctatgcgaggcagggggtaagggtccttaggacatgccttgttaaggtcggtgtagtcgatgcacatccgaagcttgccgttcgcctttggaacgaccaccgggttcgccagccactccggatggatgacttcacggatgaatccggcctccagaagtctcgccacctcctcgcggatgaaggcttgacgttccggggcctgccgccgcactttctgccggaccggccttgcgcccggccgcacggcgagacggtgctcaatcacctccctggggaccccgggcatatccgccggtctccatgcgaagacgtcagcgtttgcccgcaggaaggagacgagcgcgtcttcctatttgccatccagaagaccaccgatccgtgtggtcttggatgggccgtcgcccagggcaacctccttgaccgggacctcggcgcatgtgacaatccgctgcctcggggcggtgggggcggaggtgccaagcctctcgtcaccaccctcgggcttggacgcagcagcgaggtggtccgcgcgctgctccatgcaagcgagcgcgactttcaggtcgccatggacagagatggggccaccggggcccggcatcttcatctggaggtaggcgtagtggaccgccgccatgaacttcaccaacgcgggcctccccaggaccgcgttgtagggcagactgaggtccgccacatcgaagttcacccgctccgtgcggaagttggctgatccaccaaaggtgaccggtaggtcgatgtgacccaacggccatgtgtgccccggcgtcacaccgataatcggttgggacggctggagcaccatccccggggccttgatggcatcaaaagccgcgggggaaatgatgttgagggccgctcccccatctatgaggacacgccccaacttcacgttgcagatggtgggggaaaccaccatcgcaatctgccctccccgggcgacgcacggtgggtggtcggtctggtcgaaagtgagggcaacctccgaccaccgcgcccggcgcgtcgcctcatgagtaggggccgcggccagaagctctcgcttcatggccttgaggctccggcgagagacgtgagcacacgctcccccatcgacagtggcaatggtggccccaggttcttggaaacctaggtcatcatcaccgtcatcgatgtcaacagcaggggccttctgtttggcctcacttcgccgtttaccggagggagttgccggcgacttgccctcacggcgttccttcctcctgtcctcctcccacttcctcgttcgctcagccaagtttttgaccgtgcgacagtccgcgagatcgtggagggaggtgttgtggacggagcaccacttgccgactgggcgctccctggtgggagtaccagcctctttctttttgtcgctcgcaggcctcccctttcgggtggcccgcggagcgccctcgacggcgaggacatgaccctcgtcgccggaatggaccgaccacttcttcctcctcctgtcacgccgccctgtctgagcggcggatccgggggcggccgaagctgccactccggaaccggaggggttccaggtccatgcttcctccttacgagccactcggtctgcgagctgaaaaagctccgcggtagtctggggctctttggaagcgatcttttcgagcatgcggttgtgccgcacaccccccctgaacgcgtagatcaccgcgtgtgcagggatgcatggtatggtattgcggacttggcaaaaccgctgaatgtacgagcgaagtgactcatcatcccctcgctgtaccgcgtgcaagtccgcttcttcgcctgggcgcggataagtgccttgaaagttcatagtgaactgttggcataaatcctcccaagagtggaccgacgcaggtggcaggttcattagccaaccccgcgcctgtcccttcagggccatgggaaagaaattcgccatgactctgtcgtcacccccagcggcctcaatcccggtcgtatagacctggagaaactcggtggggttgacactcccatcatacttctcggtgatggtgggccggaaccttgggggccaacggacattccgaagactcgccacaaaggctctacagccgacaccaccagccgggggcacggagggctggtcctcacgtccatgtcgaggtgacactctggacaaagaggcgccctccgttgcgcggggagtacgccggctattacgccggcgctcgatgtcgaggcgggcatccggctctccacgctgatcctcccgagtcggaggtgccgacgagggagtggcagccgaatggcgtgcaacagccgccgctcgccgcgccctccgtcttgacgacacggagccggtagtggcggcgccggaggtcttggtggtggcggaccgtccaccagcacccaggcgctgctgtgccgtcatgaccaagttggccacgtcgtccagccatcgctgggctggagactccgggtcagggacgacgggcgggtgacgtaggagcgcgccagcagcctgaagcgcgccctggggcgtgctgccgtcgccatagacgaggaggcgacgctccccatctcgccgttctcctccatcgcccgcgatcggtgaagccgcggatctgtcgaccctctcgagggcctccccctgcttaggactttggtgtggaggaggcggtggagtacgagctcgacggcgtgggtttggctccccgtcgtcgccgctcacactcggagagaggtcgtgcgcctttgcttgcccggccattaggctgaacaagaaaaacttggcgcacacggaaaagtgcgagagctcagaaaacacacgctgagccccctacctggcgcgccagatgacggagctcgtggctcctcaccgggagaccgcgcaggcccccctttgccggttcggccgggggcttagggtgaaatctcaagctctctcggtatgtggaaagatcgccagctaggaagaaacgcgagacacgggcgatgtatacaggttcgggccgctgggaagcgtaataccctactcctgtgttttggtggatctgtgtatgaaggagctacaaagtgtgagccgacccctccctcgttctaggctctgaatctggaaaaaatcaacccccttccctatgggcagggtcctccttttatacttcaaggggataccacatgcacccctctctttccaaactggacttttcttctcttcataaatggacggagatttgcacggttgtcctccgaacatcctcctgacgggacggcacacacctacctccacttctgccggaggcaggcgcgtcgtgggaacgtggctgtctgccgacgacatgaccggtgttagaccggtcacaaatcggtcattcttgcccaccacgcgtcagcctagcaacgtgcatgtttgcccttcttcatgtagcatcttgcctgtaatggttgggatgaagcctggtataaatctaaccagggctaacgtgccatctctaagagattacacgctagctctggcttgagacgagtgcctagaggctttcgtcttgacgggatggggcaaggcgtgcgtcagaccgccagtcgccacctaacccgtgatctgaccggtctgtgactggtcacagaccggataaaggaacgcactgcactacgctgcatgcagcgtgacacgttcgaccaaaccgcaataaatgtggttaggtgaggcttaccgtgttcacccaacccattcatgtggcgctaactccacaaggggtcggggcgcctcggccctcggggccggggcaggagtcacccgaccccccctcggggaaatcaggaggagggcggacacctcaccctcgggcccgacgtccccgaaggtgccaggccacgtgggcgattgtgtctgcctcaagcctctggtcacgatactcccggtcccatatcaccgacagattggattcaaggaggacatccacacatacaagagtcagatgaggagcaagagagataccgaggcgaagattgcagatcttgagtacagggtatcgagctacgagctcagcatgcaagaggaggtggcccggaaggtggatgaacgcatggcagcatatcggtcacacgatccccagccgtacatacctcctccaatggtcagcccatcaggcaatcgtagcagctgcgcctcaatggggtaggtaggatcatatagcatggacgtcatgcaaacccaggacgaaaccacctgccccattgatgagatcacgcaacggacaccatgtgagctgcatattcccttcaagaacttatcaatcaaggtatgctcgatataatatatgatttttgacttgtacgttccgcaagttgctgcttaggttgattactaatagataacctctcatcacgtgaaggtggcatcggtaaaggacatcccaacggacatttcagggacttaccactgtaggccgattccagcaggatactcgagggtcgaagttgagctggtggaagccgtgtacgaggacctcgagttggactacttaggaggagatggtgagacgcatctacgagacacaagccacgtccggttcatcatcctccctgggcgacaagcggcgtctcgtgcaccatctcctctggctccgccgtctcctcctgcaccatctcctccagttccttcgccacgtcctcctgcaccatctcctccggctcctccgccacctcctcctgcaccatctcctccggctcctccgcctcctccgcctcctccacctccacctccaccgtgtccgcctgcacctcccaagacaaggtctcaccaagctccacctcctgccagcacaagggcaacgaagaaggccaaagttgacaccaccaaaaacaaggagccgccatacgattgtagtcaagaggagcttgacccttatgtggcaggagaagtgaagaggcaactcaagcctcggactcctgaaaagaagatacctattgacccgagcatgaagaatttcttcaagggaatatccaccacaaacaagaaggccttaaagctatcggactatgaccgaacacttaggaaagcctattacaagaagtctaaaccagttcctcagcttggagaacaaccaaaccaagtggtcgagccgttggtgaccggcgaagactttggcataatggatttcattttggacaccggtctaactgtggctcagttggttggaggcacaccaatcctgaaggcggaagtggcatacaagtttgaactcggtaaactgcttgtcaggcctgagcagctgcagtccctaccgacacaaatgtacaaattccatgaacgatacatggaaatgagcgccaatggtagagagatgttcggagcgaggatcagaaaccccgacttcttgcaaggagaagatgttctatggatccatttcaaggatgtcttcgatctgtaccatcgggacgccctcgacgtctctcttctgagcgcatggattttgtaagtatctttgagttcgatttgtttcgttcaataattagctcctagcatatatgtaagcaataataatttcctttcaaagggcccgacggcggggggtttacgatactgggttcattgaccctcggaaaatcaacaccgaaatgctcgacaagtacgagaaagacacagaggacaatctcgtccatctcctaacgcagcagcatttcaagacgttcatactattgccgtacaacacagagtgagtttttattgtcgttcgaacaaatttcattcccatacatataacatgtacattctgatatttatctcatctcacgcatattccagattccactgggtcctgttctctttcgacttggacgcatgcagagtcactgtgtacgactcaatgaataaagaggagaaaatgtgcacatgttctacattagatttattttttatatatttgaacaaacgttgttacacaataaattttgtgtattttcgtttgcagaggtacttgcttgggcgaaggaaaagagaccgagtgtaacgcatgcatggatgatcaaagaagttgattggggactaaaccaagaccttctccaagtctacttctatttcaccacgtcacttttggtccataaaagacgagagatcaagttttacacgttttggattcggattcgggcctcctgacagcatcaacttcaaatggacatagccgctgatctagaaggaatttcggggcccatgagtacttgttgaaaagcttatggaatctactttcagatggttttggtcccatgtcaaaatttccaccgagctgccgggaaactacaaaacaagtcatgtatctcatctggtctgaatctgatttgggttttaggccttgtaattgtgtctaaacgtgctgatgaagcctagagggggggtgaataggcagtccctgaaaacataaaaacaaatcgcagcggtaaaattcaaacagacccggaacttcctggtaaggaacaccagagcttccggtctgccaggcccagaacttccggtgttcagaacaaagaagaaattcaaatttcgaaacaggagactaagccaatcttcataagatgatgcacaggtattctaagcagaagatagatcacaaaatcatccacagaaacatcacagaaatagacaagagcgattttttaccgaagttcagatcttgcgatcctactctccgttgaggagctccaaagagctgggtctcaattaaccccttgcctcacttatgcaaaaacaccagaggaaatccacagccttcaaccccaaacacccctaggcaaatttctagaattgagtgactaccaagatccaactcaacctacttctagaaattcgccacaagtgtgggttgctctacttggaaaacctctagaatctcagcacaagaacttcattaacttacctcgttctctttcggaggagaggagatccttcacaaacttactcgggacatccacaatatataacggattctcgcgggcgacacctaaccgtctaggagatcatctccaagagtaacaagcaccgagatgacagcccacaagatattccaagtgctcacccaatatcctagtcttcacacctctccaaatcttcttctctccctctcaatctctctttctcacaagaattaggctcaagattgagtggagaaggcaataaacacttaggagaggctagcaacagctctaggttcgaaaagtgaaagtagaatagccaaagaatgagctgcaaacgagctggttatatataacggctaggtgacgtcatctagccgttactcacaattttgaacttgaaactagacaggaagttccggacctggaagacaggaacttctggaaaacagttaggaaaatctttttcaccagaccggaacttccggacctgaaagacaggaagttccagagttgcatttttggacagacggagtatttgcaaaaataactcctagggaaacttgtcacttggttcacactaagagtacttgacatatctcagagcaccacctggaacccctcttaatagtacggttttttctaaaactcgattgcaataaataaactatcctatgcactcctcaagttctggtccgctttgattttatacttttgggtggtctccaagcatccatcttccacactttggactaatgcacctgaaagtagctcaatgaactcattagtcccttaaccacatttgtcattaatcaccaaaacccactaggggggtaaatgtacttttagtgtcgtgggcttagcccaagggggtgtgcgccctaaggcaaccctaggacgtccctaatcatatttattcagtagccgtcatcgtttagagtcaggttttgcttagattaatctgtcaaaaacagtttcgccgctagatcggtttgtggaaccccaaattcgagtgcttaatatattttccttcacctaagcaagtacctctacaaacgaaaacacacaaaactcattgtgtagcaacgtttattcaaatatataacaagtaaatccaatgtagaatatatacacctttggttgattaatatataaggtagtcatgattatatccgagctagttatgtcctcatcaggcgctaccgagaggataagactgtgagagactagagagaaggaggaataggaagataagaagaggataagagtgtgtgagagagaggaggaggaataagagatggaaattaacttttaaggataagagcaaaggattatatacgtatattgatgtttagttccggttgggaacaacaaccgggactaaagttaggattttagtcccggttgatgttaccaaccaggagtaaagatctccggggatctgatagcctctaacacaaggtgaaccaggactaaagatagcatagtccccttacacttataaactgtgactaaaaatatttttatccccagtttttaatgaaccgggattattgtgtattttaggcaaccaacaaaaatgatttctccggtagtgatgctcactatgaaaattatgttttttaattttaattttgaaataacgaatataaattgatcaatatttctctgcatacacactagcagctaatagttttttttccatatgacctgtttttaaagccaggatagactttatagccagatgaacggatatgggttttgaagaaaaaagtggctcacaaaacacgccccttgtaacaggaaggttttgaatagattgatgctctatggtaggcaagaagaggagggaataaaataaaagaaaatatacgaggatgaactaagttcaaagatgacatagtactttattaaagaagcattcactgaggtattcggacgttgccttcactctctatctattttcaccatactattaaattgatgcctaagatataaaagtgaaaattaaatttgaaaatatacattttttttcaatattttgcgtttatatacctgcatagaaaatatttgcacaaatatacctctccgcacgatggggacgcaggaccgaaacggtgccgcgcttccattccatgggaccggcagtcctgcaggatggctgtgcgacaccgcctcactcccgcagcccaggagagcggtagcgtggtagagggcggctgcacgcgggaccgagcaggtcgcgtggcgccgtggcgcgggaccatgcttcccgtcccgtcccgcgcgtgcgcgtgtcgcggtcgacgcgagccatgcaaagcatcacctctcaagcacgcatgcacgcagttgatctagccaaaccccacaatatataggtactccctccggttttattttaattgacgttttgaacaatgacacagtctacaaaatatatgtttgaccttatttttctattataatatataaaattaataaatgcatgttaacttttactatatatgttttgaaagataaatctatatatattgttctagtttctttaaaccaaatatttttaaagttatttatggtcaaagttatataagtttgacatcaaccttgtccaaagcttattatagaaccggagggagtactagcttagcttactaattattccatcctgatctcctcagctccatccatccatcattgccaacttaattcttctaagagaaagtacaagctagctggttaatcatattgttaattttggcctcaattaggtctagaattaatcaaggcacagctagcggcgcagatgggcaggagcagggcggttgcgcggcaatgatgcgcgggaccgagccggtcacacagcgccgtgttgcaggaccgccctccagtgaggccatgcgaggcggtgccgcacggctgtcctgcgcgaccgccggtcccacggaatggaaaagcggcaccgcctccatcccgtatccccattacgcggaggaggtatatttgtgccaatattttttatgcatgtatataaacgcaaaatattgaaaaaaatatgtattttcaaatttaattcataaaagtgagttgcactccactttattgtgcattttagaaatgagtgagttcctccttttatagggcaattatgacggttatggatgtcggttcacccacaatcgccattctccatggacctccacgtgaaaagtggagatgagggggcctaaggtcggtttgaccaaatccctggttcgaccgacctgtgggtcttaccactctctactaggggtgaaaacggtatggaaactttccggattccagacctattttcgaaaacggaatctgtcggtcagaatttttttggaatttttcggaaaccaaaatgaattcggaaatattttctcgcaaatggaatcggaaattataagcgcagtttccatcggaactcggaatcggtcggaaactttccgaaaattttctcggaatttttggaaattgtctcggagttatcagaaattttgtgactgcaataccctggattctttttttaagcactaaatagcgaataccatagtgtttggctgttacctttttcaaaaatatttgttatgcaaatctaaaattacataagaatatttttttcctacattgggatttattaacaacattactcttttgaacatagataatttattcaattggatttatcagtttgagaggttttttattccgataaattttcgttaccgtattcgcgccggttcgttttagctccgttttttgtttcgataatattcgattctgttttcgtatccggtgtttccgattccgattctgattcccgaaaaaaaatatgaaaacaaaaacgataaagacggtttccgtccgtttccgtaccgttttcacccctactctctaccgtctttcaacccattaaatttgatattatattttgtgttcttttatgcaggagttagataactcccggatctaatgttttatcccaaattattctataatttatttatgattatataggtatatagccagctacaacgtaagaaacatgttagtattactactcaaatactccctccgtattttaatgtatgacgccgttgattttttaacaagcgtttgacctttcgtcttattcaaaaatttatgtaattatcatttattttattgtgacttaatttatcatcaaatgttctgtaagtatgacataagtatttttgtatttgcataaaagattaaataagacaaatggtcaaacgttgattaaaaagtcaacggcgtcatacattaaaatatacggagggagtataaaagaaaagaaaaaaacaagttagtactactacttaaatctctatctctactactcttattttaataccgaacgaaaaataccgggcgaaacaaaaagtccgatccagcaaagggaggaaaaaaaaccggaagaaaaaaatgtcccatccaaaaaaggagcgaaaaaaaccggcgaaaaaacaaatcagtccgatcaataaaatatggggcaaaaaaaaggaaaaaaaggaaacgaataggtaaaaaaagagcgaaacaaattaaaaaaactgtctgattccaaagaaaaggaaattaaatgtgacacggtaaaaaaatcgacaaggcgaaaaaagccaagcgaaaaaactgggccaaaaaatcaaaaaagtcggataaaaaaaggggcgaaaaaaaaatctgtccgataaaaaatagggaaaaaaaaggaaaaatcgaaatgaatccgactccgtcgccgcggtaaaaaaagggcgaaaaaaattgaaaaaaaaatatctcattccaaataaaaaggagttatatgtgacacggtaaaaaaatcgaatcctattatatctagaaaggtccgacactaataaagtggcgaaaaaaaccgttcgtaaaaaaatacacgagaaaaaaaataaagaagggcagaaaaaaacgcggtggaaaaaagtctaatttctattcattgttttagtagtccttttatatctcttctttatctctaatctaatctaatgtaactattaaaaaaagtttctaccatatattaaaaaggaaaaaaatgcgcgagaaaataaaaacggtttaaaaaacgcgtgaggaaaaaaatgtcagaaaaaagcgcaaaagaaaaacgcgttagaaaaaagttccgtagtcagtaaaaaaacgcgcgagaaaaaaatatttccatcttctgtaaaaaaaaaaagcatatgagaaaaaactgttagaaaaaaggttaagttgatgaacatttggtcggatagactccatcaatttttttccatctcctacacgacttttgtttcatcatctattctcctatgttggagaccctgcacatctttgtagacaattatcatattatttttgtgaagtatagctattattcttgataacatattatatggaaataatcttagaaaataaacatattttaattgttatttagagaaaagtgcacagtgactctattttgtgtggacttgatcatacgagtcagtgtaggatttgattggttgcaataatgagattaaaagaatattttagattatatgtatttcattggttgcaataataagattaaaataatattttagattatatgtatgttgtcacatgaataatccaattattttaaaacaaacatcgtaagcttgccatcatcgagattgggctattgcatttaagatattccaattttttgattttttgattgtcatatatggttatgcatgaaaaacgtatattatcattaagtttttttatccgttgcaacgcaagtaacagaaaagaaaagaaaaaatctcccgattcgtccctggtccacagccgcgaggccacacgaaattcgcggatatcaactccccgccccgccaccaccgcttccttttccaacgacttcttcttcttcctgctctaccttcttggcttttgcctctgttcctcttccaagatttgcgagatggtggcggtgacgccgggcaggcgccgccggcctgcaggatgcgccgcggggcaccaccaccagcaccagcagcagaggctgctggccgtcgccgcccgcctcgccgcggcgaagccggcggccactacggaggccgccgtgtacggtggcgtaggaggaggaggatgctgcctcgagttcctcgactgcgtgctccgggcgatgggcgtcgccaccccggccgagatcatgccccccgcggacttcaggtgggccgcgcgcccgatgcggcggcgccgccgcgggggctcctcgtcctcctcctcctcgccgcgcgaccgcgagccgagggacggccggatcgccgccaacggcgcctccgctgccgcctcgctctacacgatgcggggcaacaagggcgtcaaccaggacgccatgcttgtctgggaggtaattatttctttcatcccccattaatccccaatttatttctttcatcccccattaatccccaataacttcttttccatgtgttttctgtgatgtgaatttttttttttactttctttgagatgatgtgtgatgtgaaatttgttcgtacccccggcgaaagagaaacgtgttaattcgtgattgattgattgatgattgaacgtttacatgaaagccccgaactgtctgatatatctgcgatttttttttaatatatgttgttcttgtgtatgcttgagctggcctacacagattgatttttttttcaactttgacataggacatacatgtgtcgtcttggtgtagaatgcatgtttgattcccctacttcttgatattagaataccactttgttctgtctccatatggattgccattggatattgctggtggagactgtttcagatagtaatataatacaacctaattattattctccctatgtagaaaatttgttagcaggggaggtgctccacacgattctcatccttatcctttcttctttttatggatgatcttattcttatctgtttacacattgagtttagctcttgggccatccttttgctgtgtaattaatgtttgcttatcgttctgccccataacacctagtattatccttttgttgtgaggatcctctaccataatgttactaccattacagtcactagtatgtggatcctaccctcccattgcaccacacgtcggtgcctataatgatagtaccattattgtagaggatgtgaacccaccgagccttattgtctccacagtttgctgaagtaccacctggcatgccatgtagcatacaactattgtttttgtgagccagctagtagaatgatagctcctttcatgtacttttgcaatggcaacatatttgctgccctaccaatttctttattgtgataatggtttctgatttttccatatttacatctagtaaccatggaaaaaaatactataaaagccaaataataaattgaaagtacaatttttttgtgatctggtttgttgaaatttttggagatctccatgggaatgcaccatctgatgttcctttctatgaagcctttgtaatattaaaaccatgaatgatattcctttcagctataaattacataaatttatcaattcctacctgataatagtctgtaatcatatgaattatccacttccagttttcctgttctaccattccatttttaggcaccgcaaagttgattttgatggtgttttttgtttgacttccagaatttctgttcaaaggaagatacaattttttgtggtgtttttgatggccatggaccatatggccatttggtgtccaagagggtcagagatctcctccctataaagttgagtgcaaatttaggaagagatggacacaaagaaacttcaactaacattgtcacaagcagcatgactgaaggtggtggcaccgaacgcatggatagagatactgaaactcccctgggaacggaggagaatggagactaccccgagatgtttgctgcattaagaacttcattattaagggcattttatgtaatggacagggatcttaagtttcataaaaccattgactctgtgttcagtggtactacagcagtcacagtgatcaagcaggtaaaaatgtgtcaaa

SEQ ID NO: 9529 - DNA, 1283 bp, Oryza sativa
cgacgtttgatgtcgcaattctggtatttgcatagtatggggatcgtcggtgctagggtatacgcgagactgaggtaaaagagatggagatgaggatttttatacaggttcgggcccctgagcggtcaggtaataaccctacattctgttggccgaagccggtattgctcttattcatgataatcacaccagtacaatgtttggggtagcctatctaactgttgtcgacatggcggtctaacgatctgactcgtagtcgacaacagggtagccttccacctcgaatccgtgcccggcgagaacagagatagcgctttcgtctctcctgacagtatccgaagacaccgtagggtactagccgtgcttatccctgaagtcgatatccggcggcgtgtcttggcgtatgtaggcttctgtgttgattgtgttaggtgttgatcctgtcaggtgttaatcccgttgggtgttgattgtcttgtcccccatggtggttgttgatcgtgttgatcgtctcatatcatgggtgtccccctgtcctcctaggggggcttgtatttatacccacaggtgtccccttgtccaagtagaactagggaaactagtatggatacaatccgagtagtccttgtcgtttccatgtagaactctggttgtctttccttatccagaactccctccatatctgaagtcagtttccgtattagatatggtatgtggtggatcctgccaagatttagtcaactactattaggtatgtggtatccataaccctaacacacatatatatttttatgaatatatttcaatgcataaaaatatattcacacagacacaaagtttgtatacgcactaaaaaataaaaaaataaaaaaaaacatcacatatagaaagtttgtatacgcacatataaactttgtatatgtgtatacaaactttgtatacgtgtatagaaagtttgtatacgcgtatgaaaagtttgtacgcgcgtatagaaagttctatacgtacgaatacaaacttggtatacatacgaatacaaattttgtatttatacattaaaaaagaaaaaaaccaaacagaagagaaaccagaaaaaaacaaaccgaacgaaaaaaccggagaaaaaaccaaatagaaagaaaaaaccaaagaaaaaaaaccaaccgaacagaaacgataaaaaaggaaaagacaaaaaaaaaaaaagaagaagaaactcgctcctccctcgcggcgtgtccgccgccccctctccgcgcgagacaagtgcccaatcgtgtgcg

SEQ ID NO: 9530 - DNA, 18322 bp, Oryza sativa
aagggcttgttgatttgatgtcattttcaacccttcagtgatattttatggtaattccagagctttccactctcaaatattctaccaaattttggtaagatgcacaaaccaaacactttcatccacaccttattaccttaccaaaaattggtcatggcaaaatttagtattatcaaattttggtaggtttattttcgattttgctatatctcactcgaaagattttttcttatctctcactcgattttctcacttaaatttacagtgcattttcttgtaagttacagtgtaatttatgaaacttacattgtaatttgtaagttacagtgtaatttttgaatcttcgcatgtaagttttgatatttgtattggatttggtctttttcttgaagatatggtaatttagtgtccattatgatatttcttagttgctttttgccttttactgtgtttatcagattttaattcaaagattaaaaatctgtatgatacgattataaaattttttcgaaagatacataggtactcccgtttattttagtgaagtaagcaagcactgaaatcctacgtcagccataccctgttgaccatagaatctcctatgctggtagtagataaatacattcacatacattttttcagtgatatttcgtacaaaaacaaatgttcttaacacaaaaatcaaacaaatggccctcaacaatagacaaaatgtgaaaataatttgtacaatattaggtgtgtaatcatcaatacagaagttacaataaaattttccttccaaaaacacaagaaggtaaccgggcattcacacggccttttttttttctcctttgtactttatactaagaaagtgagaattttacattattgacagtttaaaaaaaatatagtaattaataactatgtacacccacactaatacttcttccatgcttttaatatctcaatttattatttaaaaaatagaaataatagagttatatctgtgtttgagtctcaatttagcatattcatgatttgataatttcgaattttggaattaacaaaaaccgagctgtcctatgcttggtctgtcaatcatattttctataatttaggtcctatttggcagatctcacatgcacgctggagtagtagtttaaaattttgtatttcatctaaaactaaagcaaaatgattcatccaaatgtaatgaatatagtaattcgatttcagatgtaatgaatatccaagcatagcagcatttgttggtagtatataagatggacatgttccatataattttggatggatgcagtaacttcttacatcttagtcttgatacaaaggaagtttgttgggggtcctatgactcctgccaattacagaacactgacaaaactaaccatgctacatcttcagatggtacagaaagaaaacacacagctacaaatactgatcagtatttcctcttgaaagaaatttatcaacagaggagactttctgcataactttacattgcatgccatcaacaaaaccgaaaatggcatacctccaggttccgatggaaaggagcattccaaaccatagccaaaaaccgaaaaccactccagccattacacagtagtagaaatactggtcctcgcatgttctacagtctctctcatctgacgcaactgaagcatttgtgcatgaaatgttcaacggagggccacagagccctgaattatggctgtatattgatgggtcagtgaaggtttgaagttgattcccggtgggtatcttgcctgatagatgattatacgagagattaagagtgctaagggtagatataccagcaaggcttggaggaatggctcctgaaatttcatttgacgagaggtcaagggactcaagatttttcaaactacctatgttttcaggtatcccacacgatagattgttccttgacaagttcagaaatcgaaggccttggaggtttgttaactcatcggggatgcattcagacaatgagttacctgacaaatcaatacccgtcattaattgaagtgttttttggaaaattatctcctgccccttccagattatatcgattctatcctgataggtagacccatctaatgatcccgcactggatacaatttttggattcttcatggatgttaagttgccaaaagatgtgggaatcgaccctgtcaaactgttgttggtcatatctagcagttggagttgagaaagatgtgataactcagaaggaatttcaccggtgaagttgtttgatctaaggctaagaatcttcaaagatgaaaggcctttcccaatccaaggaggaatgccaccaaagaaattgttgttcccaatatctaaagtgaccagcgtctggcatccctttagcgctgatggaaaaacaccggtgaagccgttgccggcaagatgaaccgattcaagagaacaattgtagcttgtattgactgcagggatttcacctgagaagcggttgtgggagaggtccatgaactgcaggctctgcagattccaccagcagtcaggcagcttaccggtgagcttgttgtttgacaggtccaggatctggagagaaagcaacctgcaaaaggccgagccggagctgctgttggaggagttgccgttcaggacgttgtacttctccggcatgactgcgccgccgtcgtatagcctccgagccggcctgctggagaagtctacttcatcattgcggtagtagttttcgtcgtcgtcgccgtcgtatattctccgtaccggcctgccggagaagacgtcgtcgtcgtcatcatggtagtagttgtcatcgtcttcgtccccatcgtaatggtagtagtgatcgtccacatcggcatcgaggctcaagctcgtcacccgttgaggagatgataacagcaagagggagagggagatgcagaggaagagacagaggcgcagcacgagaggggccttggctgccatggctggatttggtagagtgcaaaggagcttgtggaactgaagtattgaactccacttgtaaagctgcaggagtatttctttctctctttcttggtatggctatggacagggggcgaggttgaccgtgaccatgggggtcgtcgggtgggggtgctgcggattaggaatttggagcgctcgccgtgtcgcggtcggcgcatgtttcacacggcacagcgacagcgatggaccagccggctccaccatgtgagatgacttggactgatgacccgagaaaggcacaatggcacagtatccagccagagtcaaggatggagccaatggcgagcagtgcgttttgcagtcaaaatttcagaacacacggtggagttgtcagagacgaatggtaccttgatcatgagaggctcgcccgatgatggcgctcccgcgcgagcgacgtcgcccgccgcgctcctgtcccctcctcgccgtcttcctcccgccccgagtccctcctcctcctcccaggcatttcctcgagcacatcatgcgcgcagcacgccggcgagaccgagacattcctcaaagcgccgccgcctgggcaaaacccaggctaggtgggggaccgagctctggccgccgcggatgctgcagcgcttctattggagccacgacggcggcggcggcgcgcgacggccgggaccctcgctccgccgcgtcggagacagaagccgacgccgacgcgagcgcaaagtagctcgttctgacgcggtttcgtcctcgattcgcgagcccggcccaaacaaaacgaaacgaagtccgcttccgtcatctatacggcccattattacatactccacacggtgcttttgttcatgggcttgatccatttagtacggcccagcacagtcctcgtctcgatggcccatcacctgtaatgggccgtacttctccacggtgctactagagatggcaatggggacccaaaacctgtgacccgacgggtttttactctattaggagctaattgtgttctaactcttatacccatgggtctactaatgggcaaaactcttacccattaggtacgtgggtatgggtccgttctttacccacccatacccaccaacccgtgggtgaaaaaacctattgattaagcctaaaactataagcaatataagtctcaacgactactaaatcataatatgaaactcctttcacatcttaagcattgttctattctagttatatgaaattattatttgatttcttgattatgtatgtggttgtataattttttttactcgcctttgtatgctaatgttaatatattattgctagagaaaatattgatggtttacaactctaatatgactaattatagtacaaaactataaatgctacaagtcaactatatgggtatgggtacccgttggatacccgttacccgcacgggtgtgggtatggggaagattttgtacccgcgatgggtgtgggtatttaagtgggaaaatttagacgttgcgggtgtgggtatgggataaggaaacctgatgggtatgcacccgttgccatctactgctacacgcgcgcctactaacgagcggagtcgtcaggatgatgaccagctgacgtcacgttggcttctacttactctctccgtcccataatataagggattttaagtttttgtttgcactttttatcactcgtcttattaaaaaaaatttggaattattatttattttttgtgtgacttgctttattatccaaagtactttaagcacaacttttcgttttttataattacacaactttttaataagacgagtgatcaaacagtgcaaacaaaaactcaaaatcctttatattatgggatggagggagtaacattttctgaacttcatcgggaaaagcaaaaaggtttattccgtaattccgtatgaaacaagtgaatagcgatattagacgaaggcagcgacataaaattgtactaggctcatagcaaggaattcatatcaagttcagttatacttgtaagaggaggtgcactaacatactgttagccagctataaacatatttgtcaaggagtaatcctctctagcgggagatcgtgagatcccctttttgtgagttcggccgagggaaaaggctcgcttggggagatcgcgtattcgccttgaacgctgctatatcatgtgtgagccccaagattatacaagttcgggccgctatcgagcgtaacaccctactcttgtgtgtgggattatggctgagtgttagaagggttcctaaactccggagagcgctcccgcttctcttctcctagagttcaggtttactgagagtcgtccccttttctcggtgggcaaggtcctccttttatagttcaaggggataccacatacaccgcctctacctactctttcatgggaggggcacccactctatcttgaccgggccacgatccgtgccttcgcccggaagctaagcagcagtccgtccttgagcgggacccagtgctgccccccgcctgacacgggggacagccctttcattccctcataaatgggtgaagacttgcggtggtcctcctccacggagggaactccaaatgacgcttcgatgggacaggacatacctatctccactccgccggagacagaaacgacgtgggggcacggccgcccgtcaatcggacgtgaccggcaacaggccggtcacagattggtcacgtccgactgacgtgggtcagtcaggcggcaccgcacgtctgcccttaccgcattaaacgcggtgagggatagttggggcgccgcgcattgatggctgttcagcccgggtcctctccccactcactccccccgccacatggcagctgggcgagagccttgaggtgaggcagcgcgaaggcccgaggggcacgacatggcaccccgaggcccctcggctgcttttgcgactcgcgaggtgcgggagtagggccaggctgtagagccacgcggcaggataggaaggtaacttcccctcactttgcatacccccgggcccatatctccgacagtagcccccagcaccacgtcggacattggtccctcgaggacagtctgacgtggcgcctcacgacttctcgtgccgtggttgtgggcccgacgggaaatccagacggttgccggcgagcggccaggttggcacattagccaaaatggcgatttgaccgccgttaaccgcgctgatgatgggggcgcctagggcgcgaaaatcagggggtcggctagaccacgcctagaatcgtcacccacgccgcctcgactccctcgccctttgtgagttcggcggggggcagcgggtgagatttgagggcttggtgggcaaagctgtgtgatcttgagggggttcaatcccccaaagacgatgagacaaaagggatttatacaggttcgggccgctaagaagcgtaataccctactcctgtgcttgattgattgagtgtagaacacaagtgcttggggttgcaagacccaagtgccagttcgctcggaagtcccccctccccccttctctcactaggactggacctccttttatacctcaaggggttaccacataggcccaacaacctaacttcctcgagaagtattacaatctttgcattaaatgcatgtcttgttccttaacttggaagccgcatacacgtcgcctcggtcgtagggcctaccaaaccatgccgcctgacacggggggcgcccatgtcattcaccatttaatgggtgaagacttctgggctcctttacaccgggaaaacgggagcctagctttaaccagagcgggaggaccgactctggctgggataagaggatgagaacctctcattatcattatttgatgggacatgtcaggctgcacgccgcctgacacacgagcagcgcacaggcgtactagccagtcccatcggtcattcgaccggtcacagaccggttgagtacactgacgccgcattaaatgcggcgtggcgcgaccgctcgagtcgccataaatgcgggtaggtgggcacctgtaggcggacacctaacccaccgtacgtggtgacctagagagggggtcgggggagcccaacccctagtcatgggagggggcggtcgccgcctgacctcgggcccgatcccccctcggggagggccacgtggcattggggggcagcctcctctcactagtctttgggaaggagtggccgccaccccacctcgggcctgactccccttgggggagggccacgtggcattggggggcagccttctccgtccaatctctgggagggagtggccgccgccctaccttgggccggactcccctcggggagggccacgtggcattgggggcagcctcctccgactagtctttgggaaggagtggccgccaccccacctcgggcctgactccccttgggggagggccacgtggcattggggggcagccttctccgtccaatctctgggagggagtggccgccgccctaccttgggccggactcccctcggggagggccacgtggcattgggggagggccacgtggcattggggggcagcctcctccctctaaacatgatacccccgggcctatatcaccgacaatattttaatgagataaaatatgagagagaagagcagcgggctacagatctgtagccagctgcagcacggatttcaagacgtagtgtgtgtatgataggtaggacaatatattaatagtatagtaagtaactactgtataaattggctattgtattggctatatgtgaattagagctagtagtgggctattctcctgaatttgctctaactgcaacgcacacgtggacccacaatccagagtcacacggatcgagcctacataaattctctgtatttattgtagaggataacatgtcataagtaaaataagagtgtgtttaattcacgttaaattggaatgatgtgatagaaaaatttaaagtttgtgtatacaaaaattttaatgtgatggaaaagttgaaaatctgaaggaaaagtttgaaactaaactcggcctaaatctcaatgccatagtgaattgccgtaaattgttgtatcgtcattagtgctagttacgacggcaacataagtaagtactcctaaatttgttgctgttgctggcttgctgccgcggcagctatacccagctggtgcaccatatatagacagtttttttctttactgttgcgattcgacgtactagtattatttgatccggagagtccacacaactgaacaaaatggctaaaattgatcctaattctgcccccatgttctttcttttctacgtttattagtacttcagaaaaaactaaccaacttcaaatattaaaagatggagggagtatatatcaacctgttgtattgagctttacattagctattaccgcaaattatcctctttttttcttaaacaacaagtacaatatagtatgacgtttctatcgatattaccggagattatcctcattatgcagaagcacgtgtctagcattagtatgacttttacgcgaacattcgtgtattagacgtaccctcgactcctaccgaaatgtggtgggaatgtgagatgatcaaagcagtagcttgacagtcttttttgctagccccctcaattatttcactccttcagcaaacttggacacaatacgtcaatatcttgttatgtttttatttcttttgatttttttttaaaaaaaactactcctgcatagttatcgtgttatgcatggtggtgatcgttcggttcaaagtttcaaacacacttgttcacattaatggaacccaccgcagttaatagcgctggagagggccatactcctgtgtgaggcagtacagtttgttgcgtgtcgtgtagccgtacgagctaccagtctaccacagctatctatctcgcggagtaataatgacttggacttagagcaggtacattagcaggctataactgcaaacatattttaagaatataaatgaggagagagagaggagcggtgggctacagatttatagccatgtgtagcacatactccaagacacagtgtgtgtatgataggtgggactagatactaatagtgtattatataactattgtatgaatgaactattatattggctatagataaattggagctagcagttggctatactattaaacttgctcttaggaatgtactactagtattattttctgttcctaaatatatacatcttgattgtttaacaaaaatggtactactacattggttgacaaatcaaaatattttttattacctcattggttagattttaaattgtttgtactcttctgattgatccatttaaaattgctagagatcggaatcaatatctcataaataattatataaggagaaccaactagctaggttcattatggtgtaaccagcctaccctcgttcaagttttaaattttagacaggtgttcgtatttacagctaattattgtttcactgataaatgatgtacttattagtaatgaggtgcatggtagggtgtacagacgaccgtggtgaattcatcaagtttatagcatagttattaagaccggaccggtgaatgaaccggttgagctctcggttcactggtttagcggtcgagccagtggttttaccggtccaaccacggtctgattactattatagaatgaatgtttatgtgatggcacaagcagcaggatggtggcatggctagcgcgtgaacctgtcaatcccgtgaccagaggtcgaatcctcgtctccaccaatttttctcgggattttgcgcgcgcatgcacgggaggcaactagttgggccccccattagccggtctttcccggtttgaccagccaggttaatctccggtttatataaaaaccgcccgagttaaccggttttctccggtccgattatacgtgtatcttgaacgtctatgtttatacatttgtttttttataaaaaatttgaataattctatagatgtttacatactggagtactatttggacatctatctgtggctttgtttagttccaaactttttctttaaacttctaacttttccatcacatcaaactttcttacacatataaacttttaacttttccatcacatcgttccaatttcaatcaaactttcaattttagcgtgaaacgccaccctatctctcggggagtaataaatggctggacttgaagagtgtcgcagtactgtagcagggtcgacagcgaccgtcctgccaatagggaatcaatgcggcccccgtcttaagttcgcttctgccctgtcaggtttgcccagccactccccgcgcagcagctcagccgtcgctaccaccacctcaagctcccgcctcgcgtgcagctagctgagagcgagcgctcgccatggagaacggcgccggcgccggggacgacgagtacacgcgcgacggctccgtcgacctccgcggcaaccccgtcctccgctccaagcgcggcggctggaaggcctgctccttcatcgtcggtacgtgtaacgtgttcgtgtgtatagtcgtcgtcgccggcgagcttggtggtgatgtttgtgtggtggtggtggtggtggcagtgtacgagctgttcgagaggatggcgtactacgggatcgcgtcgaacctggtgatctacctgacggagaagctgcaccagggcaccgtggaggcggccaacaacgtcaccaactggtccggcaccgtcttcatcacgccgctcatcggcgccgtcgtcgccgacgcctggctcggccgctactggaccttcgtcgccggctccgccgtctacctcatggtcacatctctctctctctctctctctctctctctattcagctacataccctgttctcttctgcctctgtctctcctctctattcaacggaaaacaatattaaactctcgacaactcaaacaccacggttatggaaaaatctgaaaaaagtttcttaggaattttgaaacagttttactcctgcatgaacggagaaaaaaaaaattctgaagcatggtttgcaatttcggcgtatgcaaattatagctcagtaccgaaatttctgacgaaagagtaatttttttacacattttaaaatttagaattcgggtcttttaaaactgtttaagcttgattcttttgttttcgtgtaatctcatctgcatatatatatgtatgcagtggttaattattgacttctcatccaaatatgataatatatataattggaagaccctatcttgttttactcaactaatttctcaaatgtttgaaaggcatctaatatctccttatcataaatgatgttatattatattcaatataatttgtcgatatatgattagaagaggtaatgattaaagacctctcgtcagctaatagtaaaccggtcccttgtccctatccaaatttgcatagtagaccgtatcttcatgctacttcacccctgttaattaagaagctactactctctccgttttatattataagttattttgggtttgtattaactcggttctcttcaagttttaccaagtttataaaacggtcaaattagttttataaatgcatcattgaatatatttttatagtatatttattttgtgttgcaaatatcgtaaagtgaaatttactcttatatttttctgtaaagttttacttatgacagactcgaagttacgaagccgggtagtggtaatgaagcaatcggcaaaagaaaaccattctcccttttttttttaatcaagaaaaccagtcttgattggacaaaagaaatgtcataatactcacttcacttcatttgtcctgtttgcacccataatggggttcacttcacttcacaatgtcccttttaaaaaaggttttacaatgtcgacagtaaccgctttgttatcgtaaaccgtgttgcactcaccacacaatgttcataaaatttacctgtatacattattgatggtgtcaatatcattaacaatggggagagcaatatttcgacggaatcttcattttgaaggaaatgcctggatttggagataccttctgtacaatgaaagtgcaagaatgaatgccatgtgtgtgtggcatcccagtaggccggccgtacgtcattttgtatctttgcatttgtatcttcgaagacaataatctgtgtctttccaaactaaatccgacaaaaatgaaaccatcaggaaataataggtcaactaccatgaccccatgtgagatctggtcctgaaaaataggacaatggggtgtaagattgacaccaggttttgcttttgatataagcaagtaggggggtaatcctttccaaaatgtccaaaattagtacagaggattgatgtgttcatgttgtgacttcaagtccatttccactaaaaaattggagatttgggtaaacgtcacagctaattacgagagcatgctggaaaatgcatcttttgttttagcacactttgtactgttaataaaggttaagttctactccctccgtttcaggttaaaagacgttttgactttaattaaagtcaaattgctttaagtttgactaattttatagacaagtatagtaatatttataatactaaattagtttcatcaaatcaataattgaatatattttcataataaatttatcttgggttaaaaatgttactatttttttctacaaacttggtcatcaaaaatcaataattgaatatatttttataataaatttttcttgggttgaaaatattactattttttttacaaacttagtcaaatttaaaacagtttgactttaaccaaaatcaaaacttcttataacctaaaacggagggagtagttagtactaatatgcttttctaaagtagaatatcaacttcaccaatttttggtttggtgggaactcaggcttctaatttgggctttactggtgcaaactgcaaacccacacatgcttgacaggttaacctaacacaaaccttgttcatcacagtccaagtagaacttctagaaaccaaacccaagttcaatttcaagctgaacacatgagtttgaacattatttattcgttcaaattaaattcacctgaaatttggaaacacatggaagaattcctctctttcaaatttcttctgaatctgaaccatccaaattaacaaacgcagggcatgctgctgctcacactggccgtctccgtgccagcactgaagccgccgccgtgcgacggcggcggcggcgccgcctgcccgcgcgcgtcggcgctgcagctgggcgtctacttcggcgggctgtacaccatcgcgctcggccacggcggcacgaagccgaacatctccaccatcggcgccgaccagttcgacgacttccacccgccggagaagctgcataagctctccttcttcaactggtggatgttcaccatcttcctcggcatcctcttctccaccaccgtcctcgtctacctccaggacaacgtcagctggaccgtcggctacggcatccccaccctgggcctcatggtctccgtcgccgtcttcctctccggtacgccgctgtaccgccacaaggtgccccagggtagccccctcgccacgatggggagggtcgtcgccgccgccgtgtggaagtggcgcgtcccgctccccgccgactccaaggagctccacgagctcgagctcgagcactacaccacccgccgcgggttccgcatggacgcgacggtgtccatggcgttcctgaacaaggcggcggtgaagccgggcgaaggaggaggaggatcggtggcgcggctgcccgggtggacgctgtgcacggtgacgcaggtggaggagacgaagcagatcgtgaagctggtgccgctgctcgccacaatggtggtgccgtgcacgctggtggcgcaggcgggcacgctgttcgtcaagcagggcgtgacgctggaccgccgcatcgggaagttccacgtgccgccggcgagcctcggcgcgttcgtgacggcgacgatgctcatctgcatcgtgctctacgaccggttcctcgtccccgccgtgcgccggcggaccaagaacccgagggggatcacgctgctgcagcggatcagcctggggatgctgctccagatcgtgacgatggtggtgacgtcggtggtggagagccagaggctggggtacgcgaggaggcacgggctggtcgccaccggcgggcagctgccggtgacgatcttcatcctgctgccgcagttcgtgctgctgggcgtcgccgacgcgttcctggtggtggggcagatcgagttcttctacgaccaggcgccggagagcatgaagagcctcgggacggcgatgtcgctgacggcgtacggcgccgggaacctgctgagcagcgccatcctcgcggccgtcgagcgggtcaccggcggcggcaaggggaggacgccgtgggtgaccaacaacctcaacgcctcgcgcctcgactactactacgcgttcctcgccaccctcgccgccgcgaacctgctggcgttcgtcgtgctcagctgcaagtactcgtaccgcgtcgagtccacggagaccatcgacgtcgacgtcgccatggacaacgtcgcgcagggcggcggcgtggtgacggtcaaatcagaggcagccccaatggcatgacagcacttccggaattgtatcctgtctattcccgtctggattctgaagttgcaatgtaatgaagaaacggtgatgatacatattagcactttaaaaatgttaaatgaaaattttatttactcgttctgtaaaggaacggtaatacggacaatattcacagcttcacacaatcgcactagtagcaccatcgtttctcttatgcctatacttaagctaaaatgtgaattttaaagcttcactttagagttgattttgtgttttttttaaatatagtttattttacagtatttgctttcgaatcgataaggacacgtcgcataaattattttttaatttgttaataaacgattcgcatgaacgtaagtataagtaaaaggatggaaccataaatatctaggagtaatttggtgacaacgatggagatgcactattacagtcatgacgctagaggcaactaactccatccatcctaaaatatagcaatatagtacatgatgggacatgtatgtccatattcatagtactatgatatatcacatctcatattagattgttatattttgcgacggatgaagtatttgagagatactagctccgttttttaatagataacgccgttgactttttctcacatgtttgaccattcgtcttatttaaaaaatttacgtaattataatttattttgttatgagttgttttatcactcatagtattttaagtgtgatttatatcctatatatttgtataaaatttttgaataagacgaatagtcaaacatgcgagaaaaagtcaacggcgtcatctattaaaaaaacggagggagtatatcatatcggccgatgatgtaagctagtagctgatcctttcaaattatttatctttctaggtttggacttaagtcaagtatttccatctttttaccatcagatatatgttttaacaacatggaaattatgtaccaccagaaaacaaggcacgcttatatataacgtgttcatatgactaggtaacactctaactcaactggattgaccgtagtcagctcgccacctgagctgaaagcaggcacaatattgtcgatctcggatacttcgctactgtaaattgacgaacatgacatcaagacgagaaatctaaggaataagtccagtttgactcccttaactagtgaccgaatttgatctgtatccctaaaccacaataccggatatcttcgacccccaaactattgaaatcggtgcaatttgactcccttggcggttttggagggcagtttcacttatgtagggcccgctcacatatgggacccatatacgatcctccctttccttcccttattcctccttcctttctctctctcccccttaccttcccttcttcctcctccctttctctcccttaccgttggtgcaccagtagttcagcagcggtgccgggaccgggccgtcgtttgttgtttgttgggaggacgccaagtagggcgacgtcgaggagcgagacggtggcctctccccggaggtcctagtggcgtgggcgccgagccagccgcggaaggagacgcggatctaggtgttagagacggcggcgcggagaggaggagggcagaagggggaaggtggggccgggactccggcgagcggggcaatccccgttcacgtcgctcctctcgaccttcgttgcatgggatgctaccatcggttgcccactcatccgcgccaagctcgatgccatgggggccacatctaccaccagcggggcccaatgaggcacgcgggggcaaggacatgagggcgcgccacgttggggtgctcgtcaagatgtgctggtgtggacgtggatccctgacgcgcttgtttggatttctgcaggaagtcgaagctgtcccgccggcgccactccagcacctgcccgccaccactccaaaacatgctcctcgcacacgactgaagaaggggtagagagagggagagaggagggagacagagggaagagtaagaagggaaggagagagaggatgacatttgggtcccacatgtttgtgggtccacaatttttttttgaataacaagtgggtccacaatatatatatatatatatatatatatatatatatatatatatatatatatatatataagttctaatgacatgtaagcgccacgtcaacgccacgttgtacgaacactaggtcaatactaccacgtaggcgctacgtcagcgaagctgccctccaaaaccgcaaatggagtcaaattgcgcccgttttaataggtgaggatcaatatatccggtattgtagttcaatgataggaatcagattcggtcactaattaagtgagtcaaagtgggcttattccgaaatctaaagtaagcttatttcataacaaaattcagctcagttactcttgggtcaataagctagcctaataaaccgggaagaaaagtcagaaaacaatctcgctagcttccacctctcatgctgcagcatgcttataaagcaaagacaaatctagggttgatttagccttcatactcaatggagttattcctatatgctccgctgagatatgttgtttgtttcactttcaatcggttaaacgttgactgaacagtcgtcatcatcacgatgtaatttctacctttcaatcggttaaacgttgactgaacagtcgtcatcatcacgatgtaatttctacctggaaaggaggcgtcgaaggagcttaatgaaacatatcaaatacaatgcaattagacaatatgagtgaactcttcatccaaataaatccttatccatgacccaaaaatcattctcttccattatctgaagaagattagctcaccaagttagtagaagtgttcatcatctatcctcgactagttcaaaagcagcaagaccaccttcccacggtgtgtaaatgaaccccaaaacagaaaaaaaactcccaaataacacgccacaaaaggtatggtaggtgtggcttgacaatattacattcactggttgttaggttaagcattaaacaatcacatgtctcagcatctgccactataaaagttcatttttaaggacagtcatatagaaactttaattttctgagtctaattattggtcttgataatgtatccaaacatttacaatcgttatttttcatgatccacacatactgactatgacctatatgaataatgagacgaccaatcaagaaaactgtagtaaagaataattaggcaatttgttttgttggtttgttgtgggatatgttatatgttaatcaagttagtccttcttattggagttgaagagatgacataaaaaatgtttctatgtgaacaaagtaacattaagaagataacccgttaaactctttttttcttatagtaaagcgttcaactttgtgttgcgactccaaagctttattatggcacaaaaactttacacaaggctctaattattcttttactataaatcttaatttgttatgatgatgatttttaaaactaacttttaacttttaatttgttgagttggacgacaagttcagttatgtaaagctccaaggtcactgatagaagtgagcaactgttagtattttcatatttacttttcaatgatttatatcctaaatggcaattgcggagttcattacatatatatcaatagctaaacttgttatatgtattacaggat

SEQ ID NO: 9531 - DNA, 3303 bp, Oryza sativa
atcgtttctgttcggttggttttttttctttggttttttctttctatttggttttttctccggttttttcgttcggtttgtttttttctggtttctcttctgtttggtttttttcttttttaatgtataaatacaaaatttgtattcgtatgtataccaagtttgtattcgtacgtatagaactttctatacgcgcgtacaaacttttcatacgcgtatacaaactttctatacacgtatacaaagtttgtatacacatatacaaagtttatatgtgcgtatacaaactttctatatgtgatgtttttttttatttttttattttttagtgcgtatacaaactttgtgtctgtgtgaatatatttttatgcattgaaatatattcataaaaatatatatgtgtgttagggttatggataccacatacctaatagtagttgactaaatcttggcaggatccaccacataccatatctaatacggaaactgacttcagatatggagggagttctggataaggaaagacaaccagagttctacatggaaacgacaaggactactcggattgtatccatactagtttccctagttctacttggacaaggggacacctgtgggtataaatacaagcccccctaggaggacagggggacacccatgatatgagacgatcaacatgatcaacaaccaccatgggggacaagacaatcaacacccaacgggattaacacctgacaggatcaacacccaacgcaatcaacacagaagcctacatacgccaagacacgccgccggatatcgacttcaaggataagcacggctagtaccctacggtgtcttcggatattgtcaggagagacgaaagtgctatctttgatctcgccgagcacgaattcgaggtggaaggctatcctgttgtcgactacgagtcagatcgtcagaccgccatgtcgacaacagttagataggttaccccaaacattgtactggtgtgattatcatgaataagagcaataccggcttcggccaacaggatgtagggttattacctgaccgctcagggacccaaacctgtataaaaatcctcgtctccatctcttttacctcagtctcgcgtataccctagtaccgacgatccccatactatgcaaataccagaattgcgacatcaaacgtagataatatgtatgtatattatgtatatatgcacacgtatatacatatgatgcatatagtatatatgagagactagagggggggcgattgaccgcgcgcctcctcgcgcgcgcagctgatcgcgtatcagcaccccggggggaggggggacaagtcgacttgttcgcagctaacttttcgttaaagtgattgatatcacttattctcaacaccatatatcttttcactcctaaattataaaaaaaccatgtaacttagggtgagttcgagaagaggattgagaagattgggaagatacgcaaaacgaggtgagtcattaacgcatgattaattgagtattaactattttaaatttcaaaattggattaataagattttttaaagcaactttcctataaaatttttttgcaaaaaaacacaccatttagtagttcgggaagcgtacacgcggaaaacgaaacaaacaaactctaaatcacctcaccacgaatgcagccttagatccgattaattacagtaaaaacctcatttttccttgttttttattacatcgtagatgtctgggcccacttgtcaaccaaccaagctacgaccaccatatcaccgagagaaaaaaaattggcgctcgtcatcgctccgctactccgcctcccgatctctcctacttccccaccacaaccgatgccggcggtagccccctcccccccccccccctctctctcctagcgtgtaactccatctccttggcgccctccccctcttagcaatagcgtctgccttcgtcctcagtgcagcaggcaaccgcgccttgccgttgcgaaacggcttcgaccgctggtggacgaggaagctgttgctcatgtatttgtagacaaggagaccattggcaagcctgacgtgtcatcgcaccatcctctggttcagccaatgcagtcgctgtgtttcaacgagggctcacaacacgataaatgttaggggacggtggttgccactgtcgccgacgccgcgatgttcgactcgaaagcgcggcttgaggtgtacaatggctgtaagcggtgactgtcgcattcgacgagaagctcccgatttagagattgtggccatcggcagctagtcggatgggaagagctccctccttaaggccctcctcgacttccacttcaatgtccgggaggtcaagatggggacctaccgtccctttgtcctctagatggtccacagcttcaccgtcctcgatccatggtgcctcttccctgtgcgtgttccgcttcttcccctaggcggcaccctttggacgtcaaggtctccttctcttttgaggatgacaaatgggcctgaacatctgtcatgtaagagaaaacaagggaaattgggatctatactactacgagacccaagttcggttttgtataatttaggtgtatagatttttggtattgagattaaggcatgccaagcaaattaaactcgaaataaagatgagggatggtaagtgaacttttctgagcaaaaaacaggtcaacaatgagaagcaaaaggaaataaaaatctattttgactctcttaactagtagatgaatctaattcgtaatcctccaccataaaatcagatatgaatgccctctcaactatcaatatctgatcaatgtacgtcctttgatggttcttagagtggtttcgtactatgtgacgtgtttgtgacgtgttgactagtcaatccatgttgagtcatgagatataagtatataacaacatgacattgacgtggtggtacagccagaaaaaaaagaaaataaagaaaaatcagaagctcattatcccctccttcctccggtctcagaatgacagacatgaaggacaatactccatagctccatggctacggtgaggagcagcagcttgcagcagaggaagcagcgggcttggtagagtcctcggcggcatgcagtgactccgagctacggtggtggcttggcgggtcttgtcaagccgaaggtggagtagggaagccgaaggtggagtagggtggcactaggggcctgtttagcacagctccacctccacctccacctccacctccatctcttttggagctggagcttgagctcagctaaacagtttcagctt

SEQ ID NO: 9532 - DNA, 7748 bp, Oryza sativa
cttgtattgtggatctctttcttgattctattctaactgtttttatttactctgtgtgtcttcttctgtgtatgcagggcgacatctttgtacacttccgctagatccaaacattggaaaaatgctgcttattggatctgtttttcagtgtctggatcctgcattaacaatcgctgctgctcttgcatatcgtaatccatttgtgctcccaatagataggaaagaagaagctgatgctgtcaaaagatcatttgctggtgactcctgcaggtaattaatataatcttttctctgttccgtattgattccttttgtcttacctgtactaaaatatctttgtcaccatataatgcaaagaatgtgagtgttatactgttattacctcagacataagtaccaaattgatgtagaatgctgggttgcgtactaggttaccgctgataacttactttgacaattataacatttctacaagtactttagttttgaaagtaatgttatgttgataattttttgtaacttatttttccagtgatcacattgctcttgttaaggcgttcgaagcatggaaggaagcaagacgcagtggaagagaacgctctttctgctgggaaaatttcctttcacccatgaccctgcagatgatggatgacatgcgtaatcagttttttgatctactatctgacattgggtttgttagcaaaacaagaggattgaaggttgactatctttccacattacattttaattcaaacatgtagtgcaatctaaattttcaaaattaattatatagcttccttcaacttctgattgtgtttgctaccgtgctaataaatagcactatagcattcatctaagctgaggtctttatttcctcacaagactgcattagtttcactatttgtggtgtttatgcattcacttttgcacttgtccaatagttactgtcatttgattgctacttaataaccatggtctgtaaaatttagtgtttaactgtacgggcacatatggggcctgtttggagagcccaaaattatggacaatccacgaagatgggccaggattttggggcctcctaaacgatcttataattatctcttttccccatttcaacacacttgaatcatatctactttcgtgttccagaacataagtttgcagtatgggttcttacttccatgatataatttcaggcatataattattatggaaaggatctggagatggtatgtgctgtcctatgtgctgggctttacccaaatgtcgttcagtgcaaaagacgaggcaagaggacagcgttttacaccaaagatgttggcaaagtggatatccatccatcatcagtcaatgcgggaattcaccaattcccattgccttatctggtttatagcgagaaggttaaaactgctagcatttatgtcagggattccacaaacatttccgactatgctcttctcctctttggtggttctctcagtgagagcaaaactggagaaggcattgagatgcttggggggtatcttcatttctctgcaccaaggcgtatcatagagttgatccaggtatctctaacttccctacaagataacttgtttgaactaaagaaaaaaggatttcagttattctatttcgtttctattttaaggtttatttttcgaacaggaaaaggtattaaatttcatgcttgctatttgatctacattcctttgttcacactgagcaatcattttgcttgactgatttacggttttagtccctcaaatgcattgcagcgaatagaacatcttcatttcttcacatgtctgcacagaacttgctttattttcttgtttgcacaagcaaatcataaggatgttaaaacagttttggaatcactttgttgtaatagatagacctatatgccttcttctctaatttaggaatgtttttatttgacagagattaagaggtgaattggacaaactcctccagaggaagatcgaggagcctgcacttgacatattttctgaaggaaaaggcgttgtggcggcagcagtagaactgctgcacagccaaaacgttcaccactagatgctatctataccggttccatatagcagttttagaactaaaataacagctataccagggagtgcttttgtatactcccttcaatttcgtttgcttgttagagttgaccccttattttttgtgattttccgggagcaagttgctttttacatggacaaacgggataaaatagataaatcaatataaaaatttaatacggacaaaaacttcgaaacatttttttgatctattgctgggacttttagaacagtactcatttgccaacgaaaatggaagaagatctcagaaattgaaccggtctgtttcctttcacgatatgaacacaatggaagaagataccgagtcctcttgttgttaatagaggcacaacagatattgaactgatctgttgaatgacaagcgcttgcttgatcgtattatccagcacttctgtatttttagagaagaccgagtatcgtatgcaagaacacaatagtgagaacttgaatcaaattgcaattgctaaagcggttattttagtccttgtggtttgaaaagtaatactccgtgcaatttttgtttcttggtacatgaaacagaagttacatggagcaaacatctattctgacattcagacttgaccaagacaatagtatgtttgtttcttcaaaaaaaaaaagaaagaaaaaaaaatgagcagcatgtttttccatcaatcatatctgtcgacttgaagcatcacacctactgcttacctatatgatactaaatttcttgtcattctgttatgatactaaaaataaaacaaattggctctatcgcaaaaagaagaagaagaagaagaagaagaagaagaaaagaaataggaaagaaagacaaatcggcccacttgacatttcagacaatatcttttctgttcaacacaatgaaatgcaatttaacacttcatgtgttgtttattaactttattcaatgatagaagtagtaaaggtgacatcgaactgtatctctgcttaaacaatttattcatgtatacatcattacaaagtatgtttatttcatcgactattgggagtaaaaaacatgctcgattctattcaatccacaagcagaagcagatgatacatcatttttcccacaacaccagccatctcaagatgtcttgcgggtcagcctagacatcatatgatcagatctctgcaaatatgaaaattctgtgcttagaactgcttgtcaaattcagatcagcaagagaggtaataagatggaagaattctagtaaaaagatagaatgggtataatgattaaatctgtaactctgtagcctcatccaacgcttatctgctaataataatcaaggatagtacaatggtgtgacggatcacttccaaagttaagtataatgtaaagcatatattcaattccaaaatcttccatacagacggcagatgattcaacatattcaattatgcatcaattcaaaaaagtaagatgattatatcgagaatagggaagcaagaaaacactaacctgctcactgtaaggaagatatttcccatcaaatgtgaccaccacgcgatcttttccatcagcaccttgtaccttgtcaaccgaacagtagaagtctatagctgacatgctgcattaggaagcagttaaacggattctttcacctttttttttcaaaggatataagcatggcagccaaaattagatggtcagtagtcttgaaatacaaaggcctctatatcagcctgaagagaagaaaatattttacttgacatcctgataagaatatagtgatcggttaccagctaccactaataagaatatagtgattaatctagacttaatgaacctccagggattgttcccataaaggtacatgctttgcattttttttcagagaaaggtgcatgctttacatcagtgcttactgtatacaaatccttaacttcgtccatgtgcagttaccaggaacaggaagtcaagaaatactggggtaaatgaaaatcaaatagaatgaagcataggcagatatcttacattccatcaccaaactcctcattgataatttccttgatgctctctccaaaatgcataacagcttcattcaatctgagcgcaatatataattaaaaaaaatatcaacaagaatccttttctagagtgttgtaaaagtgcattaccacaataatttaaatcaaccgtgtactaaacttgtaataatctggtaaattttcatagagacaacatcttccattacaatagcacatatatgtcgataaaaggctcttgcatgttacaaagcaaacagaactaatcatgttctttagcatattctcttacaagttaactatttggcttcttaattttaatggaaaaatgaaataaatattcactttctgacatagaatccctaagaatataattagtcttcgccaacgcgatagaattaagcaacatcgtgtctatttttctatgccaaaggttcaaaatttcagaatcaagaacagcacaaagaaattacttaatttcgccatcctcacaactctagcaagcatgtataataaataacgaaaagataaagagggctgctaccccacggtattccgttgctcctagcagtcacgggataactaaaatcccgagagatttaataagcttcatcaattttgtggggaggcccacgctatcctgcgattccaccatatccaatcctccttggtatcttgggtaaggtaccgaggtggtacctggtacattggtatcagctggtaccctggtatcgactatcgactgatacctggtacaccctagtatcgactgatacctggtaccctgggtatcgagctgatacctatgtatcaggccttggtacctaggtatcaggtcttggtacctgggtatcgactgatacctggtaccctgggtatcgagctgatacctaggtatcaggccttggtatctgggtatcagtgtgatatcccaagagagaggaggaggaggagtcgtgggtcagggaagtcgagcagcggggcgacggcggaggaagaggaagaggaggcgatagatctggtgcctaccttgtgccattccgtcgctcgtcgtcgtgcctcgctccaaaccgccaaacccgtggctccattgacgccgcctagagcagctcctcgtcgctcatgttgtgccaagtgctcgcccccggtggccgcgtccatcgctccccgaccgtaggaggcgccagcgccgccaaggaggaggagggcggcagcggcgaggaagctaccgacaagaacgacgaagaggaggagcgccttgaggagcttgatggggaggcttcttgacggcggccgtcgcccgtggtggtcgggagctccgccgactgtcgtccaggtcgtccgcgggggctggtggtgacggcaccgtcgtcgtcgttgccgccgccgtcgttgccgccgtcgtcgccgttgccgtcgccgtcgtcgccgcctccgtgctcatgggtggtattcacagagagagggatcgaatggaggggaagagagagataagggagtagtactattccgtctccacggaaaaccgtaggatagattttctcaaagataaaattctagaagaacaatcaaaaggaaagcatcaacatgtatggtttggaatcagaggcgagactcaattgagaagcagagtacggtacggccatgggagggaggggaaggaggaggcacctgtagatggcgggctcgtggacgatgtccgggtggtaggagcggaacggcggctccatcatgagcgcgacgaggtcgtcggtgagccccggcacggccgcccgcagcgccggcgccgtctccggcttcagctgcgcctgccgccgcagcagctgcgccacgtacacgttggtcagccccgcctcctccccgatctccgagaagctcttccgcgactccgccttcgccgccatcagccgccgcaccacccccgccgccctctccccgccgccgccctccatatccctctcctctcctctcctcccgccgccacgcgtcgcagtcgaggtgagtgggtcgaggtcgtcgtcggcggcggcgcgatgcacggtggcctcaaaatcacagcttttgtatgctcatcttcatcatcaccatcaagaacagaaacagaggagcggggggcgctcgcctgaccggtggggcccacttcgctgacagctctgtgggctgtgggtcccacgtggtaatgggccggaatttttttcctggtttgggggcctggtaaggtttttgggcttgggcttgggccctttacgcgctcagccaggatggggagagaagctcagatcggccgttcacctcgggccttggctcagggaaccttgggcctggaggtaatgtgggcaaagggcaaccaaacacgggccttgcaaccatgcgtgcaagccaaccattatcactgtatgtaggtaatcaaaacacgtgcttaatgcttatattacgtggcagagggtggttacccctcctatgtggtaataatgacagtaaccgcagtaaccagttatcaagtaaaaccgataaaaaaaccaaataaattttatcggaatttaaaatattatttaaattcttttgaactcggtcgataccgagcggttttcgttactgcaccccaatggtaagtccggttgcccgttggaccgatgataatgcaaaccctgtcagatatttgctagctagtgcttttgttatctttccttctaaaaaccagctttgatttttttttcttttcaccagaagaaaagttaacaaattgtggtcctccaaaaggaattaatgattttgaagataaaaaaaggacggttgggtccagtgtctcatatatccacccttcatgcctgtagctccactactgcaagcagagattgcacacatgcaatttgcagtacagactacagttacagagacgctcaaattccagcccaatttatgccaactttccagcagcaaatgcatccgaacgcccaatctatgcaacctctgacagaatgagatctgaaaattaaaggagacatataacaatgcatggttttatctgatctcttgcttttgctggccaccacactgaataatgcagatatcagtcaggaatggacaggcaatcgtaaggttaattaatctctgcattgatcaagcctacatttaattctgaagtactggctctcgatcgattaattgatcaccatttagtttaggccctgtttaattcccacccaaaaatttttccccgtcacatcgaacgtttaaacacctgtatgtatgaagtattaaatataggctaaaaaaactaattggacagattgcgactaatttgcgaaacgaatcttttaagcctaattgttccatgatttgataatgtggtgctacagtaaatatttactaataacatattattaggcttaataaattcgtctcgcggtttactgacggatactgtaattagtttttttattagtgtccaaacaccatatgcgacatcatatataatattgacacgccaaaactttacatccctgatctaaacacccccttagtagctagcttggtccctcccctgcgtatcaaatccagaacaagtagcataactgaactataaatgaactggacctaactagggtacgttgatgtgcttcatctccgatcaaatgg

SEQ ID NO: 9533 - DNA, 16606 bp, Oryza sativa
  unsure (1)..(16606): unsure at all n locations
tgggtggccgcggctgcccccaacctctagtcaagatatcccggttcccatgtcaccgacacaacgttatctctaaactcaccgagaacggtcacatgagctcgataacagttactctaatgtctgcgcgcggttgagaatatgaattcattcatttgcatcgaagttgggggctactgtcagggttatggataccacatacctaatagtagttgactaaatctccgcaggatccaccacataccatgtcttatacggaaactgacttcagatatggagggagttctggataaggaaagacaaccagagttctacatggaaacgacaaggactactcggattgtatccatattggtttccctagttctacttggacaagaggaaacctgtgggtataaatacaagcccccctaggaggacagggggacacccatgatatgagacgatcaacatgatcaacaaccaccatgggggacaagacaatcaacacccaacgggattaacacctgacaggatcaacacccaacgcaatcaacacagaagcctacatacgccaagacacgccgccggatatcgacttcagggataagcacggctagtaccctacggtgtcttcggatactgtcaggagagacgaaagcgctatctttgttctcgccgggcacggattcgaggtggaaggctaccctgttgtcgactacgagtcagatcgttagaccgccatgtcgacaacagttagataggctaccccaaacattgtactggtgtgattatcatgaataagagcaataccggcttcggccaacagaatgtagggttattacctgaccgctcaggggcccgaacctgtataaaaatcctcatctccatctcttttacctcagtctcgcgtataccctagcaccgacgatccccatactatgcaaataccagaattgcgacatcaaacgtcgacactggcgcgccaggtagggggattttggtgcttcaggatttcgacgagatgggtttaagagatgaactctccgacaaccagctgagatccaacctaaccagatcggaaccatcatcgtcatcgacaacttggtctatcgagatcatccaagcctcaatatacgcgacgtaccaaaagatgtcagatcatatgatgtccaacgagtacgcaataagataattggtagattggtttttcaaattgatctactaatttcgtaaatacatccggcatgtatctacaaaggtacgcaatattttatctgcaatttatcgtacctattcagatcatacatcattgtcagatccatgatttattatgtttacctagagcatgttctttatacaataatatctgttgcgcgagtgtccccgatgttaaatcgactacggtctaacgtagggggctcgctctattttcttctgtataaatcatgcttgtttacggtttacataatgcctgacatttacatctgctcattatatcctgataatactagaagatccatgcagtttttgagtacatactcgatatcccatgctatatatcttgtcttctagaaaatatttttcaggaacaattgagcactcgagtatattgtggtcgagtacaccgcattatcgagaacgatctcgacaaatgcagagtcgtcgcgcccaacctaccaaagaagtccgacgacctatctcatagcgctagccatcgctggactactcgagaaaaggttgttaacggataactcctcacgaacaccgtcggcttgatcacccgacatgattgcgagcggacatccggatatgctataagttgggtatgtgagtcatgctggccacatgatatgcacatgtaataaaccaactttagcgcccctataggtgattaagagactcctactcctggttctcgaaccagcaaaatgtagtgatctctctcgcctcactttaagtggtcgagttacgactactgcctggtcctcgactagcgatgtagcgtttctcccactacttctactttcagtggtcgagttacgactactgcctggtcctcaaccatcgatgtagcgtttctcccactacttctactttcagtggtcgagttacgactactgtctggtcctcgaccagcgacgtttgtttctcccactacccctgcttcaacaaagttgataccaggtgcacaagatcgccaagggttttacccagagatcccttacccagatgacacctaacgttgaaacctatcctaatgtccctttacgccgtcttgacaaggcctccgatgaacctgagggaacttcggctagggacgcctagagccgataaggccttgttggatccttcagagacgaaagaccatgtaagacctggtcgtgtaagagttctcgccgtgcgtattaaccaagccgtgtaattggaaattgagttttccaacttcatggctggggactaggatcagtgcttgttcaaccgaggcaggtcaaaggtccaagagccttgacatccgagaacgattctccgacgacaaggctgggggctaaggagagtgtatgactctacaaactgactgatcggagtcggtaagagagaagacgctcatatacaaaacactagtctgtacattcaattcactagtctgtcatattataacatgtcaccctttgagaattcgctcgggggctatttctatctaatattcttttctgagtattgattttaggaaaattctattcgacattatcgaggactccatgtctctatggttctaaaccaagattgactaaggcgagtgcgacaaatgtcgacaaagttctatcgcagactctacgccttctcgatcgctcgagaacggttgctagatctcgacaaggaatacggaatgaagaaatggtgtacccgccgagataaaatttcttgacttcaatccaaattctcgattacagcaagacgtgagacttagtcgtacgctctatattttctcggtcgacatcaaagattgacttagacaaaccctttcggtgcccgcacgaggctgacaaaggaagtccaacgtgacgaagcgtggggctcctcaccgggagaccgcgcgggcccccctttgccggttcggccgggggcgctgggtgaggttctaagcccttgatctgtggaatggttcgcgagagagcaaatgcgcaagacacgggcgatgtagacaggttcgggccgctgagaagcgtaataccctactcctgtgttctggtggatctgtgtatgaaggagttacaaagagctggagagcaagagagttcaaactctagagaccctctcactcctcttttctccagtccccctcttggtaggcatggtcctccttttatatctcaaggggataccacatacaccatttctacctacccttcttttgggtggggacccatcctactttgaccaaaacttggctcgtaccttcgcctgacaccgggataaccctgtcctccctcattaatgggcggagatttgcaatggctgctgtccgaatgaccctccgatgggatgggtcataccaacctccactccgccggaagcaggtgcaacgtggaagcacggttgtttgctgatgacgtgaccggcgtcagaccagtcacaaaccggtcattcttgtctaccacgtgtcagtttagcatgccacacgtcagcccttcttcataaaatgacttccttgtaatggttgcgatgaagcctggtatgaatctagccgggaccgacgtgctaactccaggagttcccacgccggctccgtctagggacgagtgcctagaggctctcatcatttcgacgggacggggcgaggcgtgcgaaaggccgcctgttgccacctaacccgcgatctgaccggtctgtgaccggtcacacactgtgacctgtcacggaccgaacgagtgtgctgcgctgcattaaatgcggcgtggggcgctcgtccaacccgcaataaacgcggttaggtgagcgccgctgtgctcacctaacccacacacgtggcgccaaaccctcagggggtcggggcgccccagccctcggggacgaaacgggagcggcccaacccctcggggagatagagggaggggcggcctcatcaccctcgggcccgacccccccgagggggtcaggccacgtgggtgaccgcggctgccccaaacctctagtcaagatatccccggtcccatgtcaccgacacaacgttatctctaaactcaccgagaacggtcacatgagctcgataacagttactctaatgtctgcgcgcggttgagaatatgaattcattcatttgcatcgaagttgggggctactgtcagggttatggataccacatacctaatagtagttgactaaatctccgcaggatccaccacataccatgtcttatacggaaactgacttcagatatggagggagttctggataaggaaagacaaccagagttctacatggaaacgacaaggactactcggattgtatccatattggtttccctagttctacttggacaagaggaaacctgtgggtataaatacaagcccccctaggaggacagggggacacccatgatatgagacgatcaacatgatcaacaaccaccatgggggacaagacaatcaacacccaacgggattaacacctgacaggatcaacacccaacgcaatcaacacagaagcctacatacgccaagacacgccgccggatatcgacttcaaggataagcacggctagtaccctacggtgtcttcggatattgtcaggagagacgaaagtgctatctttgatctcgccgagcacgaattcgaggtggaaggctatcctgttgtcgactacgagtcagatcgtcagaccgccatgtcgacaacagttagataggttaccccaaacattgtactggtgtgattatcatgaataagagcaataccggcttcggccaacaggatgtagggttattacctgaccgctcagggacccaaacctgtataaaaatcctcgtctccatctcttttacctcagtctcgcgtataccctagtaccgacgatccccatactatgcaaataccagaattgcgacatcaaacgtagataatatgtatgtatattatgtatatatgcacacgtatatacatatgatgcatatagtatatatgagagactagagggggggcgattgaccgcgcgcctcctcgcgcgcgcagctgatcgcgtatcagcaccccggggggaggggggacaagtcgacttgttcgcagctaacttttcgttaagttgattgatatcacttattctcaacaccatatatcttttcactcctaaattataaaaaaaccatgtaacttagggtgagttcgagaagaggattgagaagattgggaagatacgcaaaacgaggtgagtcattaacgcatgattaattgagtattaactattttaaatttcaaaattggattaataagattttttaaagcaactttcctataaaatttttttgcaaaaaaacacaccatttagtagttcgggaagcgtacacgcggaaaacgaaacaaacaaactctaaatcacctcaccacgaatgcagccttagatccgattaattacagtaaaaacctcatttttccttgttttttattacatcgtagatgtctgggcccacttgtcaaccaaccaagctacgaccaccatatcaccgagagaaaaaaaattggcgctcgtcatcgctccgctactccgcctcccgatctctcctacttccccaccacaaccgatgccggcggtagccccctcccccccccccccttttttttcctagcgtgtaactccatctccttggcgccctccccctcttagcaatagcgtctgccttcgtcctcagtgcagcaggcaaccgcgccttgccgttgcgaaacggcttcgaccgctggtggacgaggaagctgttgctcatgtatttgtagacaaggagaccattggcaagcctgacgtgtcatcgcaccatcctctggttcagccaatgcagtcgctgtgtttcaacgagggctcacaacacgataaatgttaggggacggtggttgccactgtcgccgacgccgcgatgttcgactcgaaagcgcggcttgaggtgtacaatggctgtaagcggtgactgtcgcattcgacgagaagctcccgatttagagattgtggccatcggcagctagtcggatgggaagagctccctccttaaggccctcctcgacttccacttcaatgtccgggaggtcaagatggggacctaccgtccctttgtcctctagatggtccacagcttcaccgtcctcgatccatggtgcctcttccctgtgcgtgttccgcttcttcccctaggcggcaccctttggacgtcaaggtctccttctcttttgaggatgacaaatgggcctgaacatctgtcatgtaagagaaaacaagggaaattgggatctatactactacgagacccaagttcggttttgtataatttaggtgtatagatttttggtattgagattaaggcatgccaagcaaattaaactcgaaataaagatgagggatggtaagtgaacttttctgagcaaaaaacaggtcaacaatgagaagcaaaaggaaataaaaatctattttgactctcttaactagtagatgaatctaattcgtaatcctccaccataaaatcagatatgaatgccctctcaactatcaatatctgatcaatgtacgtcctttgatggttcttagagtggtttcgtactatgtgacgtgtttgtgacgtgttgactagtcaatccatgttgagtcatgagatataagtatataacaacatgacattgacgtggtggtacagccagaaaaaaaagaaaataaagaaaaatcagaagctcattatcccctccttcctccggtctcagaatgacagacatgaaggacaatactccatagctccatggctacggtgaggagcagcagcttgcagcagaggaagcagcgggcttggtagagtcctcggcggcatgcagtgactccgagctacggtggtggcttggcgggtcttgtcaagccgaaggtggagtagggaagccgaaggtggagtagggtggcactaggggcctgtttagcacagctccacctccacctccacctccacctccatctcttttggagctggagcttgagctcagctaaacagtttcagcttcacaaaaactggaagtggagttgggtggaactctctcacaaaataaactagagttgtggagctgggnnnangcngntncacnnctctactccaaacccaactcttaggagttagagctgtatcaaacagacctctataattgaagttgctgggtcaacaagctcggtccaagctttcatctgccacccgaccgcccaccacagttaccgccacagtctcacccaccagtgtgaggacatctcgctacaacgacgcccccgctggccagcctccactcacctctgcccgctgccggtcaataaaagaaccattggtacacttcactctattagaatgtactccctccgtttctaaatatttaacgtcattgacttttttaaacatgtttgtttattcgtcttatttaaaaaaattaagtaaatattaattatttttttatcatttgattcattgttaaatatactttcatgtatacatatagttttacatacttcacaatttttttaataagacgaatagttaaatatttgctaaaaagtcaatggtgtcaaaaatttaaaatttaaaaacggagggagtaccataagcaatcaacaactaatatgagactcatctaataaacagtgacaaaaaatacattatactatatatcaggagaagtatatgcgtatatctaaacggtgataatttagtgttcaattatccaccgaatgatcacttaatcacatgatgactagtgatactgaacacagttcctctccttggcattcactgatctggctatctagaccattaattagttttgacgaaccaatgtagttagtcacatgcatgcaaagagattaattatttcagagacagatcgatgttcttttgagggtgagacagatcggtgttgaaccatccatttgtcaccttctagcttttgcagcagtagttaagtacaggagataactatatactatttgagtcttgagagactgattattgactaattgttacatgtgtgacagctcaggcatttctcccgttctgctagacacatgcctgagctgaagaaaaaagaaagaaataattggaccttctcctgatagttagtagtaccatgcatgcatttaagcgctagctaatccgagtacaactcactgcatatatttataagtataacaaccaatattagtcattgccacacataggatgtttaatactctctccgtactttaacgtatgacgtcgttgactttttttatcaacgtttgaccattcgttttatttaaaatttttgtaaaaatataaaaatatttatgtcatgcttaaagaacatttgatgatgaatcaagtcacaataaaataaatgataattacataaattttttgaataagacgaatagtcaaacgttggacgaaaagtctacggcgtcatacattaaaatatgaaggtagtagttagattaagctaagtctttttaaaacaaagaatattttaatgagtagtaaaccaaataattggctgaatcgatcgctaagatatgaccaagttgtaggatcgcacagcaagaatcgagcccaaacagacatgggataacggttgtagtaacaaaaaaaccaaaacttttagcaaaattaaaagttatccttgtagctgatggagatcggtctgaccggagtatatacaccaatctgaccaatcgaagacctccggcctaactggtgttgaagctctagtctgatcgcctaccgcgccgccaacacctgtcatcgccgccggtccaatcgccatggtgtcactggtcttatcgccggtatgatcgtcaaacctgagcaaacacaaattgaagatctctcaaaagtaaattgaactttattacgtctattcgtgtttctaaagtgcaacaacatcactcctcccacaaaatttaattaaactcgaaacattaacttttctctaaactcaactatgtcaaaatcaatatcgggaggcctcaaccccctctctatttataaccaacttgtacaagaaattctaatccactatgaaaccttcacatgcaggacacaaactttacaaactccaattatattaaatttggactccttccaaattcgactccttatcccatacacacacaatctccctatcatatgccacaaataatttttatcaaccacgtacattgttctttagcctaagcatcctgcataatatcataatcgtccggacgtcattttcttccaagttgattcccgatccatcaccagcaacactctcctgaagcattaagactcagctgcacatgaatcaacaagaaactatattcgagcacaagttctctccaacttgactcaacattagtacacaatagtattatatacatataataaacatttagaagtcataaatataaattaatcatgaatatcaaataaataatccgaaactgaaaccgacacaaatttagccgatcagaccgtccgctcgcataactccggtctgaccggctccactcagccgaaaacttgttcatcaacaatcactattcacaatatttgtctaaccgatacacaaaacccgggttgatcgaaccacttttctaaataataaaatcaattatctcaaatactaattgttcgtcatgaaataataatgaaaagacactttgttcacacaagttggctgttaaacaaacagcatcatttgctcatcagtcatccccgtgaactagtaggtacaccggacggaagatgagtcagccattctattatcagatctgtcctcggaagtcggaatctttacttacaaaatattgaccgaccaggaccagcatctttggagacgacaccaacgcgagatcgccacgtcgtgccgatcagctcgatcgtgtgttttcctccgtccggctcgcatggccggcgtcgtcttcctcgtcctcttcgtggcggccgccgccatgccagcatcggtcaccgcagcgacatcacagaccgatgcgctgctggcgtggaaggccagcctgctgctgggcgacgcggccgcgctgtccggctggacgcgggccgcgccggtctgcacctggcgcggcgtggcctgcgacgccgccggccgcgtcacttcgctccggctccgggacgccggtctcagcggcggcctcgacacgctcgacttcgcggcgctcccggcgctgaccgagcttgacctcaacaggaacaacttcaccggtcccatcccggccagcatctcgcggctgcgctccctttctttgctcgatctcggcagcaactggttggatggctctataccgccgcagctcggcgacctctccggcctcgtcgagcttcgcctctacaacaacaacctcgtcggcgccatcccccaccagttaagccgtctccccaacattgtccatttcgatctgggagcaaactacctgaccgaccatgacttccgcaagttctcgccgatgcccaccgtcacgttcatgtcgctctacctcaactccttcaatggaagcttcccggagttcgtcctcaggagcggcagcatcacctacctcgacctgtcgcagaatgctctgttcgggccaataccggacatgctcccgaatctgaggttcctcaacctgtccttcaatgcgttctccggcccgattccggcgtcgcttgggaggttgacgaagctccaggacctgcgaatggccggcaacaatctcaccggcggcgtcccggagttcctcgggtcgatggcacagttgaggattcttgagctcggggacaaccagctcggcggtccaatcccgtcggttcttggccagctccagatgcttcagaggctcgacatcaagaacgctagccttgtttcaactttgccgcctcaactaggcaatcttaataatctcgcttatctggacctgtccttgaaccagttctccggtgggttgccgccgacgtttgcagggatgcgggcaatgcaggagttcggcctttccacgaccaatgtcactggtgagatcccaccggcgttgttcacgagctggcccgagctcatatccttcgaagtgcagaacaactcgttcaccggcaagattccatcggagctcggcaaggcgaggaaactggaaatcctttacctattcctgaacaaccttaacggttccatcccggcagagcttggcgagttggagaacctggtagagctggatttgtcggtgaactcgctcaccggaccgatccccagctcgctcggcaacctcaagcagctcataaagttggcgctattcttcaacaatctcaccggcgtaatcccgccggagattggcaacatgacggcgttgcaaagcttcgacgtcaacaccaacattctgcacggcgagctgccagccaccatcacggccctcaagaacctccaatacctcgccgtgttcgacaacttcatgagcggcaccatcccgccggacctcggcaagggcatagccttgcagcacgtgagcttcagcaacaacagtttctctggcgagctgccacggaacctctgcgacggcttcgcgctggagcacttcacggtgaactacaacaacttcaccggcacgctgccaccgtgcctgaagaactgcacggggctgttcagggttcggctagaggagaaccacttcaccggcgacatctcggaggccttcggcgtgcaccccagcctggagtacctggacatctccggcaacaagcttactggtgagctgtcctccgactggggacagtgtaccaacctcacgctcctgagcatggacggcaatcgcatatccggccgcattcctgaagcatttgggagcatgacaagattgcagattctcagcttggctggaaacaatctgacaggaggtattccacttgatttgggtcatctcaaccttttgttcaatctcaacctgagccataattccttttccgggcctatcccgacaagtttgggcaacaattctaagctacagaaaatagatatgtcaggaaacatgcttaatggcacgataccagttgctcttggcaagcttggtgctctgacatttcttgatttgagcaagaacaggttgtcagggaagataccaagggaacttggtaatctggttcagctgcagaccctacttgatttgagcagcaattttttatcgggttggatcccccaggcagccttctgcaaactgctctctcttcagattctgatcctgtcgaacaaccagctgactggaaaactgcccgactgcctatggtacttgcaaaatctgcagttcttggacctttccaacaatgcattctcaggtgaaatccctgcagcaaaggcaagctacagttgttcccttatatcgattcatctttccagcaatgacttcactggagtttttccatcagcgttagagggatgcaagaagttgatcaatttagatattgggaataacaatttttttggtgatattcctatttggattgggaaaggccttccatcattgaagattcttagccttaaatcaaacaacttcagtggtgaaattccatcagagttgtcacagctttctcaacttcaactgctagacatgaccaacaatggtttgacagggttgattcccagatcttttggtaaacttacttccatgaagaatccaaagcttatatctagtcgggaattattacaatggtcttttaatcatgatagaatcaatacaatctggaaggggaaggagcaaatatttgaaataaagacttatgcaatagatattcaattagtgacgggtatcagtttgtcaggtaactcattatcacaatgcatccctgatgaattaatgaacctccaaggccttcaatttctgaacttgtcaagaaactatctgtcacgcagcatacctgagaacattggtagtttgaaaaatcttgagtctcttgacctatcatcaaacgaactttcaggagccattcctccaagccttgccggtatatctacccttagcagtctgaatctctcgaataatcatctatcaggcaagatatccaccgggaatcaacttcaaaccctcactgacccatcaatctacagcaacaattctgggctatgtggccttccgttgaacatctcatgcacaaattatgcacttgcatcagacgagagatattgtagaacatgcgaggaccagtatctatcgtactttgtgatggctggagtggtttttgggtcttggctatggtttggaatgttattttcaattgggaacttaaggtatgccgttttctgctttgttgatgacattcagcgtaaggttatgcagaaggtgtcctgtattaatcaacttctttcaagagggaatactgcccaatatctgtagctgtgtttccttaaccttctgatgatgaagtatgtgcttcctttgtattaagagtaagaaaaatgtaattggaagggacctgaagaaacagagaacagctggtttaatgacaggtattgatttacaaagcatttcactttacattgaaaccccaaaatagctgacataccttcagggcctctggtttttaaacttgtcagggaataatctatcacgcatgtgttccagaaagaattggcaattactatatcttgggagtcccttgacttaattatgcattgagctttcaggtggcttctctttgagaacagcctgccatggacctacattggatgagaaatgaagaccatcaggaacttgataagttcttattttactctctgagttttggcattgttttcggattttggctttggtttggagctctacttctacttgagccattgacagtcttcagaataatttcagtacatgcatcaccagttaaagtaatagagtactatcctaagctttgcccctggagttaatctatctaacaatgcatttatgcatcttaactgtgaaattccaaccgttcccttcccggcggcgggggaacgggtgggcgggagtcgctccggcgagctacggtgatcttgccagtaaaaagagagggtaaaggagatttatcgcgggtagaagacgatggtcacctcaatttcggaccaaggaactcgggtgcgggcgaattctcgggatttggtggagccggtgaaagctagggtattcgccgcgtttgcgcccgggcgacggcggtggaggaggcgaagtgttgtgcggctcttgggcggaggcggccgtctcttttgctgttggcggcggcttgatcagttattcggtgagagagattgaggtggatgcggcagagctcctcgctcctcggcttggcttgctgccgctgcgaagctttggaggggggtctcatgcagcacaagctgctgctcacggtccagactgagctggcagggccacaagcgaggaagaaaagaggaagataaaggctgtgttttgattcaaaattttctcatcaaacttctaacttttccatcatattaaatatttgtacatatgtattaaacattaaatgtggatgaaaaaagaaccaattgcacagtttacatgtaaattgcgagacgaattttttaagcataattacaccatgatttgacaatgtgatgctacagtaaatatttgctaatgatggattaattaggcttaatagattcatctcgcagtttataggtggaatctataatttgttttattattagtctacgtttaatacttcaaatgtgcatccgtatataaaaaaaaaatttggcacacgaataaaagtcaattttggccttcctcgttctctctctcggtctttgatcgaatcgtctccctcaaccgcaaaatcgggtctaactgtttacgctcaaatttaacacgtaggttcaaattaaggaaatttgccaagatttaggaaagtcgccggtttcctctacagggccggtcaaattgcggcttgaaagccggtctaaccggcggtatgtggccggtcagaccggcagagtctaagcccgagtctattttcatcaggtctcgagtttccttactcaaaaatatatgtttcgagtttccattggtttctatcccaagttgacgtggaggaggatttgtagtaggcaagaccaacccctatttaaggggcaaggtcgattcgattaagaaaatctctctcccccaacaatctctacaattgaatcgttttcttttaccttttacttttcagctatgttttctactttaccctagtttagtctatctttatcggtttgcgccataaatcgtccgccgtcgctgcaagagtgcgattacccctttgtaggtttgtcccgcaaaccttttgttcgcccacgagacgggtagttatcatcgtatcgatcaaaatcggctccgctagccggtttagcttttctttctacaaaacccattttgaactagtttttgcttgattgaggtggttagcgactccatatcaccgcaatacttttaggtgtcccaatcatgtttttcttcttgccaaaaaaagtttccaacaataatgtctctctatcttcaaaatccggtgtaaatcaactccttcggtggtttaaaaagtagtttatgttgatgtggcaatttaggctggtcagcggatggaacatgagaggacgccgtctgcgccggtgaggaaggtctgagaatagattaagtaaggtggctcccgccgctggaagggtgagagggaagagggaaggagagaaagaagggagaggtgaagaagaggatgagatgagcaggaagtcatttacatatggttctcgcttgctgatttagttagttaaccatggttaaactgtcatttcagcataaaccacttctaaaacctcaaaaggaggttatttcgaagttaggaaagattttatacccggttttacgatgatggagccaaaatagacttatattctgcaaaagaattaaggggcgaacccgtcttgggagcattgtcctcatacctctggtctagtgtgacatggggtgtggtggtgtgatgtgattagttttggcgtgtcacatcaggtattatatatggtgtcgtatagggtgttcgagcactaataaaaaaactaattacagaatccgtctgtaaaccacgagacaaatttattaatcctaattaatccatcattagcaaatatttactgtagcacaacattggcaaatcatggagcaattaggcttaaaagattcatctcgtaaattagtcacaatatatgtaattagttattttttagcctatatttaatacttcatgcatgttttcaaatgtttgatgtgacaggatgaaaaattttagggtgggatctaaacagggtcgtagccatttttgaaagaaaaaaaacaaatactccctccgtttcgaaatgtttgacgccgttgactttttagcacatgttt

SEQ ID NO: 9534 - DNA, 13782 bp, Oryza sativa
ttttaaaaaccatggcagatgaaattactcagatactatatctcttcttgcaacagaacatctctctttctgatacggtgaccacatagcataatccagctaaaacttattctgatactttgcaactgaatcatcaaccttgagcaactgggcagaacccatgcataattgcagcagaccaaactttgtccatatcaagcaccttgtcaccacattcatgctcattccatccctccaacgcatgaagaattcccgcgattcgccatgcgctcataaccctccttggcagccaattctgtcaaaaaaaaagttcaaaaattttgtgattagatcatgtgaagttcgtctgaatctctggattatttcaacaggttattactactacctcgcatgaatgcacattctgcagcgtttttggtacagccattgcaggagttgtcgagtagctgcagctgtccttgcgtaccatctttggaggaaattgtgagtatgggataaacagagttcctttctgtgctctgaattgttcagcagaatctagaccatcaccaattaaccaaacctgaaaatttttggtttattaggcaatgatatttctcttatacattctattcatttgtccagagaatgtaggaaaaatgaggaaatctattcttacctttgcggtgcctgttttcgaaaacgaaagattgtcagctacagtttctggtatttctggcttgagtaaatgataatcttgcttgtttgtcatcgtgacctgtacaagaatagtggtttgttacaacatggtatccttttgcatgctataaaataaatcagaggtgagtagtggattaattactttgatatttttcttgcataatgcttgcgctacagcacgcgccaccttggaaacatttcctgcaagaattacttggtctgtgccttgggggatactgttgacaaccactgcagcagctaagctggttccatcgacaattcttgctcccaactttgggtatttcagcagatattgttctccacttttattcagggtatgtgccttatattgaagatattgtatgtcaattaccagttcaaccatgcatgagtacatacttccctaatttctacatattgtattctcatgaaatgtacagaatttattagttctgttggactactgtcaacggactctttgctacttaatttttttattttcctacctttatgactaaaccttttccctgaagataaacaattattaagcactaactgttttatcttgactaaaatttggcagtacatgtggacatatagctaacatctgaattctgaagtatggatgataatgtttcaacttgctctgaattcattaggaaatgagctacctgattcaggagtccaaggcttacaactttagccccattcttgtcagcttcacataccgccttttcgataagatcattgatagcttccttctcccaatccaatccatactgcacaaaacaaaatgtttctaacctgattatcaatttatcatgcacaccatctgtgaatcatgcactgaacatggttactcttacatggaaactgtatcttggtatggcccatgactgcatcctgatcttcttcatgacattcctctcaacagtgaatgaagaaccgtacgtccatgtcagcaccatggagagccatgacagaggccacatcatcctcatgtaccacctggaaacgtagggcctggacgcaaattcggcgaaaccgggcctcatgtggtagatggaatgcagggtggtcaggtgtgtaaggtgaaccacatccactgcttcttcttcctcattgtttttcagtgagttctcatacagagtgtctgatgacttgtccatggtgttgtagatataatcgtagaacggcatgaaaagggagtagtttgtccgaaactgagtgtggtgcagagaatgaaacctaatatatcacataagttcagattattataacagtgaaaacagcatgtatgatcaagttatttattttgcagagtgacatgcacatcatcttcttttatttggctttttcaataactatagaccatgtgcatcctagctatgcagatatcaggagtggttttagagtatattgtatccaagatcaataaagcctcctttatcttaaaagaaatactgaaaaccgtaaaatttctccaatataaaatatggtacttcccctatgctttcttaaaaactgtaaagttactcttttacatactccctccatcccaaaatatttgatgccattgacttttttaaaaatatttgaccgttcgtcttattcaaaaatttaaataattattaattctttttctatcatttgatttattgttaaatatacttttatgtatacatatagttttacacatttcacaaaagtttttgaataagacgaacggtcaaacatgtttaaaaaagtcaacggcgtcaaacatttaaggaagaaggaagtattattaagagcctgatgaagtacttacgatggcgtgtacatgagatacttgagaggagggaaccatgtgaagagccagctgggtaccaactcgaagttgcagtgccccatgttgttcatgaaatcaatgtaaatcaaatacatctcgaatgcaattatggaagcagttccagtcaaggcacaggcgatcagtgggatcgagaagagcaattcgtaggcaacgagctcagcaaacggatggatgacggctgcaacaacgttaggaattgtaggtaatgaacatatatgcatttaggtatatgtatctgcttgctcaattacaaatactgcagtctgcagggttctcttcttctgcagtgtaaccagtagacactattggtttttttttaacagtacttaaagaaaacaccataatcttaaagggattttatggttatcaagaatcactgaatatatcgtgttctctaatgtaaaatttagtactaatacaagtagtgcattattttacatttgaaaagcgatttctcccattacacatccattcaaatcactttaaagtcaatttatggtaccgtcttgtacatcttaaaattacaagatgacaccaaaatctttactactattaaaagatagtagtggtggtagtgaatctgccatcaccacaatcactgataaggggcggacccagaaataggccaaggcctaggccgccccatggaaattttggcccaacacaaagttacatggttgaaaggaggaaaaatagacttattcctagtaaaaatgcatatttctcatcgggcctttcatctcaggccctgggccgtggaccagtttgcccagggcctgggtcactgatatatgggccatggtattaaggtttgggagagtcgcctgtactatatatactgtactatactttagctctttaattttctaagcatggcatttttgtttgtttctttaagatgaaaagttgtgtttcaaccatttttttttaaaaaaaatttaacaaggacttaattttgctatttttaataatccgttgcaagttgcaacgcactgatatttggctagcttacacgaaaaatatagtacttctcgatacctctcaataaaaaaaactcttccactcaaaaaaaagggggaaaaaaccccttagaatgtgatttctctcttgtctaaaagtctctgatacgttgttcatggaccacgtttgcttctccgtttggtcaggcattcagcaacggattcgatgggctacataaatttagctcgcgatcgatcggtcggcttacttcgatctcaatggtccatgaaatatcgtgtgtcctttgcattccttaactcacacactctctaggcctacaattattgttcaggcatgcattgaaggaggagggaattgaagtagcgatcgactggccacaggaacactctgtgtttcctgaggaacggacacgcgcgacacttgcatctgacgaagtacacctcctgttttgtgtccttatggaaaagacttgttttttactttgttctattggaagattaccgtggtttaatttatcccaaggttacaggtctagtaatatttctgtctcaaaattttaagaatttgtattaccaaaatcttaatattcatttagaggtttgggacgaaagtaatatcatgtaataggttgtttggagcaatgatggtacaactaggtagtacaacttacttcctctatttcaaattacttgtaactattagtattgattgaactttgatcattgataactttagatgatgaataaaaattttgtaaaaatatttatgacgcaacacaattcgatactaatatagaagctcaaaggttattgcctaaaagagaatgtaatgtttggagcctcgaggataaaccgtctctagtggcaattaattacgtacatgtgatgggctcagtgacgattgaagagtggtggtgcgagtggtagtgggtgtagagaaagtggtggtgcaacgcacgatggaaccagtagtagaggaactccactggccccgcatgcagcaaggcgatcagccccgcgccatccgtcctccacagcggtaagtgttgcccgcccggtacgtacagtgcgccgaggtatagtaggataccgctcaggatgatctggtcgtccctgcacgcacaccaccatacacgtaacaacacatcaactataatgaggttgaattaattaatctcgaaggtgaagctagccgccacgaacacaccgcgtgggttgtacgtaattttatggtgtttggcataccagttcctctcgcggtcaacctggtcgaactcgatgccgcggcgaacaatctggcggcggccacgggcgttttggaggcgggagatggtgatccaggcttggttgtgcagcatccgcagcagcaacgacgggaggatggcgatgtacccgagatccacctcccgccaccccttggtcgccacctcataccacccgtgcgctacccacggcgccagcaacacgtactgcatatgcacacatatacatgcatgaatccatccatcgaattaactcacatgtgctataatttatagctgaagttactgttgtaatttgtaaaggtcggaagttgtgtatactgaatgtttttgcctaatcaaagacgatgtggcaaaagcttatttaaccatgtactctttaacagtttatttgctgcacagaggtgctgcaggaaagttcatgcccctgcattactgatctgcagcagatgcaagagaattaatctcatgcactgctagctgcacatgcggcaatgtatgctttgatatcaaacagaagctagcgaactcaaacaagaacataatggtcatggtgcagtgctgccatggatggaactagaagctgtgcgtttatttgctcgatcgagctgccagaagacagtgaagtaactgaattaaggagaagaagatggaaggttaattttgattaccttgaagctgccaagcttcttccatggccactccgtgaagagtcctgggtttgtggccatggtagacgatctatgggtgcagaatcttcttgcagcctctggctagctagctctcgtttctgcagtctcaacacggcaagagtcttgcaagaactggcctgagaatggaggacggatatatctcaatttataaactcgaccagggcttcgatctagctgtgcgtacgtgtcagagtctcatatactactcttacatagtgctcccccatcttaaaatataaggaattttagttgaatatagcacatcatagtactttaaatccggatttaagtttttttagaacggatagagtagatgagaagtatgttcagatttcgttgcactgtaatatatcccatcaaactaaatttgctttttttttttttacggaaggagtaccagagagaatgccagtaacttctgaataattctaccttcaaaataaatattcttgcattgattggggttgctcgaagggaagatatcggtcctttatgaatcatgtgcgtcagaaataggtaactagggtcaggtttgtgatagatgcagcagacggcatgaatgtaccaaaaacaaacgagttactgctaagctaaccttcctgtattatttttttattattatttgtaacataattaactgcaaataataaatatatatatataatcgaattccatcatgaaaatgttgtttttctttttcctaccaaagcatttcaacattgatacgatcattatgtatttttaggtaattctttacgggaggaggacgggttattaattccattttgatactgaacaaaatgatagtacaagtttcggcgttaaaccggtgttcgacgaggggtttaaagctatgatcgatcgtctaaaacttaatagatagatttttatcaggtttgggtctttctgaagataatagctctagtgacccggctatattttcttatgtggattattgatttgaatacaaagaggagagcttaagggaacacaatcttctccatctgttcgggcagtctgtgtctttgagaagagtaaaaaagggaaattaagaataaaagaaaaagagatgagtcattaatgtatgattaattattaattattttaaactttaaaaagtagattaatatgatttttaaaacattcttataaaattttaaaatatatatgtatatatgtatactgtttagtagtttttttaacgaatcggcaagctgccaatttcattgaatagagaaggagtaaactttacaagtaagaaaaacaaggctcaggaccttcggtccaaatgagctaaaattataaagcaagccagctaccaagatgcctcgcccctgcccgagaccatgttttggcctcctctttaattttagccaacagacttccggtagatagctctttgtgctggaaacctcgcccctgcccgagaccatgttttggcctcctctttaattttagccaacagacttccggtagatagctctttgtgctggaaaattctacagtttctctcgttctagatttcccagttgaccaggagtgttaacgtgtggagtgctttctttggggctttcttcaagttagcggtggcctctctgtttagcagtttgaaaagtgtgcacgtgaaaatcgagggacttttgtgcctttttgtttttcaaacgaacgctcagttcgggaagtcagattcctacccaaaaccacttttgaagtctatgtatttcttgattctttattattattattattattattattattattattattattattattattattattattattattattattattattattattattattacacacgcacaccctacccctatgagcacctccgtaagactgggccggcatgtcttgagattgacgaagtcaccataggtgcctcgctgtcgacgagtacgtcgtctaccactgaaaaaataattagccgtaaatgcgagcacccgtgtcaactctaggatttgaacccgggtgggctggttccaccacaagtaacctaaccagttgagctatgctcacttcgcattttttattttttattttgctagctgttttaatcatatatacacatttattgacacagattgtttccagagtacataataaaaaaaaatagaactacggctcgagaacgccggaatgtcaaccagaacattcagaatggaattgatgacaaagtatggtgaccacgttcgcatgaatgttatgtcatatccattaatttgaataagttattcttttcactacttgcgtattctttcattctaaaataaacaaatctaaataatacaggataatatatatctcggtatagatttacagtatcaaaatatgttatatgccgtacagtattacgatataatatatacctcggtactgtttatgatatttaacccaaatcaaatctatcgacaagttctcattcaacataaatttgtccatatattccgcagcaaagcaaataactttatctagctagcttttaataactttgtaagccacgatctgtacacttgtaagccacaatgcaagtacggttcagctcacctgcaaagctgagcgaaattaattaaggtgaagcctgaacattgttacgagtgacggtgacaatgcgcaagaacatggccagttccgtgtatacactgcacactgtacgtttcttttcgttgcacacacaattaatcgtcgtcagccacgctttaatttgttcaaccagatttggttgcaagtattggttcggtaataatcagatcgacatatagagtatacatgcaccacgcgtgcattctatcactaattaattgactatattttttttagataatggattttcattaataatccagcctctatatccacgaaggatatacacagccaaaaagatacaagagcacttagactcagatctcaatagagagaacacaaaaccaaaagaaaaagaaaaaacaactaccggcacatccttgctttccgacatcctctcctaaatcagcgagattcggagtggaagtcgtctagtcgtcaacgcccctagtgcgtcgtcgccgcgagcctccgctgatgccatcttcattcgcttcagatgagttgatgtcatacgtcccggtttagcccaccttcatccgtcgttgcccagcctaaacaagccaaccaaatgcaggccgacagatccatttccgcttcactgaattcctaggcctctgccgcccctagggccgtcaccatcttcgggatcctcctcccctcctggattcccagctcgtcaccgccccaagggccgtcgtcggagacctctggaaccgctgtcgaggaaaatcaatctcttccaccggactcccaggcatctgccgcccctagggcagccaccgtcaacgggatccgcctcctcactgcgaaccttgaactggcactcaggctgccaccgtctcggttggacgctgcccctagggccgccgccgccgccggagaagccttctgcccggactcccaggcgattctgccatacgctgttgcgaaagataccacctccacccaatcccgctatctccttgccaaggatacaccggcgacacttaggccaccgccgtccgaagggacgccgccgtcgactccagaacacctcagctcccgcacttaacaatcacatggctagatctctgtcctccgtcgccaacttcaccaccgcgccgaaggggacaggccacgcgcagaggaaacatatatatatatatattgttctagttcttttaaattaaatacttttaaagttattgatagtcaaaattataaaaaattataaaagtttgactacaatcttgtccaaaacgtcaagaattataaaattagtgggagtacacgttaagtttataatagtaactttcatatgctgactcgtggcattaatttcgcgtgccagaatcagctaaagcctcaacctagctcacattcaatcgagccttaatgtttgcggtgtatgtatacaacaaccttaaagctagcatctattactatgattttaattattttttgttttaatacgaagaaactgtagtacatggatttttcgtttctacagtgctcatatgaaaccgttacaatattaccataagataaaattgtgacagtatatataattagttaaactatatatctcaacaatttgattagctgtaaacttgtatcgataagaatcctttgtatacagtgagattgacaacgtgtgatgagatccatattgtctcctagagttgtgtaatcttctgctcctaccccagtgtgaatcgttaaaaaatactccctccgcccaaaaaaataaaccctgggtttctatgtccaacatttgaccgtccgtcttatttaaaaaaattatgaaaaaaattaaaaagataagtcacgcataaagtattaatcatgttttatcatctaacaacaatgaaaatactaattataaaaaaatttcatataaaacagacggtgaaatgttggacacggaaatttagtgtttgtttttttagacggagagagtaattacttgtataccgtcagatattcaggttgtcagacgactaagtacgacagtgcatttggttagtggttggtaccggtacgcggtacagtgcaacttttgttctgtcacacacttggctggttgggttttaatttctacttctcttgctgattaattggcacatgtacggcatacactacagtgctcaaagcaaaaattaaaagaaaataaagaaaaaaacaaatggcacggcacgtattttagagggagagtgttttgcaagcagcttctcgttgcatgctattcaaataactaagattttttttagaaaaaaatgtctcagtttatattattacctgttattgtactagacaaaccatgcatgtgcgcaagagtaaaaaattgatctaacacgtggagaatatatatcagatatgcatttggatttatttttgttttcctccttgtttttggtgaatttatggaacgatatgatggatatgcaattgtaatatactacatcgctatttttttctttaaaaaagttataattatttagataattgacgaaggatatgcacatttaaactataaaatggctttccgacggaagcatatttgaaaagcatatatagatacaataaaattgttggtgtcatccaagatatatctaatcgatatatagtgtactatatagttggcattcagatccttaatttggatttactacaaggagctgtatatgtagtgggttggatcgagttggttaaatcttgtatccataaatatatatagctgtgtttcagttttagttggtatagttatttgtataaaaagcagccagccttttgggatgggatattttcccttccgttttatattataagctctgacttttttgacttattaagtttgatcattttttttaaaaaaaatatactccctccgtttctaaatagttgacaccgttgactttttagcacatgtttaaccgttcgtcttattcaaaaacttttgtgaaatatgtaaaactatatgtatgcatataagtatatttaacaatgaatcaaatgataggaaaagaattaataattacttaaattttttgagtaagacgaacggttaaacataattaaaaaagtcaacggcgtcaaatatttagaaacgaagggagtatatagcaacatctagaatatcgaatgagttatattaaatataatattgaatatatcttgatagcgcgtcttttttaatgttagtttgtttctaaaaacttagttaaatttaaagaagtttgttttagaaaaatagttaatgccaattataatatgaaatgtagtaaataggaaattaactaagaatatgagtttaggttgggttcagaaggatgatccggtggtgcaatggggtgcaggggtaaaattaataagatgtcgtgaagtcatagaacagagacgatgagaatgggtcgaattatcatgtttctcgtggcagacgtctgaatatgccaacgatatatttcctcttatctcaaaatataataatttagaatcgaattaggcacattctaatttaggatcgattagacacatcctattatgattaatccgaatagaaggtttatccatcgtaatattagaatgtgtttaatctgatattaggttgctatactccctatgagttgataatactttttttttacaaagtcacagcctcagaaaataattttggtaactattttctattacaatatatatagaattatcaacaaattacgatattgaagtattatggtttatattttatatttctaagacaagtattttagaaactattaataatcaaagattttaaagtttaacatcaaccttattcacaataataagtattgttaatttggaggacgtatattttaagatagagcagagttatgtacttactaggcgtgaccgtgtgagctagattggacatactccctccattatatccgttatatttcaagtgcaatcatgagttttcgtgtctaattttgatcgtccgtcttatttaaatttttttttataattagtatatttgttgttataagatgataaaacattaatagtattttactcgtgacttgtgtttttaattttttttttaaaaaaaataaataagacggacgatcaaagttgagcacggaaaattacagctgcagttaaaatgggaccgagggaccaaagagtacagcgattcgctgtgagattggacaaagaacacatgcacgcgtgtaattaattagcctggaactctggacatggaatacatgcatgcatgtccggtcgtcatgggcgtcaacgactcataaatatcgacctcaatttgatcataatgatcagtagcagcaactccgcatgctatgcagcaatgcagctcaaaaaccgttggcaccttttattatagggctcctataatccaaagaatttcaaaggaaatttgaagcatttcaattcaatcctgatgatttttctttcatattgcgttcgcgaaataaaaagatatttctttcatattagcttatttggaacaaaggaatacgattgggaaaaatcaaccaaatttgaaatgaaaaaaaaaatgctagttcttgtgttttgaaaatcatgtgtcaaataagccctatgttacatgtgtattttagggtagataggagcagatctatactatttgaggggtgctcacgattggcggagccaccgcccggtgaccccgggctcgtcgcagcgaacacctgtaaaatttgttatattatggaatcgaacacaaaattttcatagcaaatagttgctgtggttagtgttggcaacttattgtgacaagttggcaagcacgattgcaggacctaacgctttgcggtgatcttagagtcgccaaccaccccaatctaacaaaagctaaatcaatataggattttaataaactaaaccggctagcggagccgatctagatgaaactatggataactacccatctcgcgagcaaaacggaaggttttcaggacaaaactacaaagaggtgtcgcactctcgcagcggcggcggacgatttacggcgcaaatcgacaaagatggacaaactgaactagaactagaagtaaaagtaaaataatgattcgattgattgataattggttgattttttacaatgaaccagccttaccctcttatatatgggttagtcttgccctctataggtactcctccacgtactattcgggatagaatccaaaagaaacccgaaacatgccttcccgagcaaggaaacctcgagacccggtgaaacagtcctgaacatggactctgccggtcagaccggccacacaccaccggtctgaccggtccactgttggcggtctggccggatagtacatggcggtcagatcggccctctcagaggaaaaccggcagatcgtccaaactttggcaatttccctattttaattctaggtgctaaaattgggtgtaaacagttagctagattaattgttctggctttgaaaactttctagctctaccaggaatccaaccaagaattttttttcaagatataatttatctatttttatcatatgtgcaccactcaggtccgtttagttccccaaatttttttcccaaaaacatcacattgaatctttggacacatgtatgaagcattaaatatagataaatgaaaaaactaattgcacaattaggggagaaaatcgcgagac

SEQ ID NO: 9535 - DNA, 16909 bp, Oryza sativa
catcatctttcaccgaatcactgatcaagccgccaccaacagcaaaagagaccgcctccgcccccctctacctccgcccaagagccgcacaacacttcgcctcctccaccgccgtcgccatccgcaaaccaggcgaaaccctaacctcaccgcctccgccaattcgcgagaactcgccgcacctgagacccggccttcgtccgaaattgaggtgaccagcatcttctacacgcgatgagtctcctttaccctctcttttcctggcaacatcaccgtagctcgccggagcgactcccgcccacccgttcccccgccgccgggaagggaacggttggaatttcacagttaagatgcataaatgcattgttagatagattaactccaggggcaaagcttaggatagtactctattactttaactggtgatgcatgtactgaaattattctgaagactgtcaatcacaaaagttatatccttcatcaactttgtattcctcgttgctacttgcttctgtccctgtctaatactccctccatctcaaaatgtttgacgctgttaatttttttaaatatttttgaccattcgtcttattcaaaattttttatgaaatatataaaactatatgtataaataaaagtatatttaacaatgaattaaatgataggaaaagaattaaaaaatacttaaattttttaaataagacgaacggtcaaacatgattaaaaaagtcaacggcgtcaaacattttggaacggagggagtattattatttttcccattggctaagcaataaacttgtaaatgcaagacagagaagagaaatgaaaattatgacaatgatatataattctgtcaaggaaaagcaacaggggtatattatttggttgctggtttgcatctgaagagtacttagtgcgtacatcttctgcaatttgcatagcttctttctatgtggtcaacaaaatgaaaaacaaaatctcttaatggcttaagtaaaattagagctccaaaccaaagccaaaatccgaaaacaatgccaacaactaaagagtaaaataagaacttatcaagttctttatgatcttcaattctctgatccaatctagatgcccggcaggctattctcaaagggaagccacaaaggcccaaattgttgctatatattgagggatccacaaatgtctgaagttgtcttccggtgggtatgcttccccataagcggttatttgagagatttaacacactgaggcatggtatatttgcaatggttgtagggataacacctgaaagctcattccatgataagtcaagggattccaagatattcaaattgccaattctttctggaatactgcctgaaagatcattccttgacaagtttagataccggaggccctgaaggtatgttagctcttttgggatttcaccgtaaagtgaattgcttgataaatcaattcctgtcattaacatagctgttccttgaaaagtttcttcatgtcccttccataatatgttaaatctgtctctagactgatcaagagggaacggataatcgtatcctcttgaaggggcacttttccaattaaaagtccctattgtggggaaggtttttgcttgtttcatggatgataagttggcaaaagttgttgggatgaatccagttaacccattgctggccaaatcaagaagttgaagctgagaaagttgggataattctgtgggaatctctccactgaaattatttgatcggaggagaagaattcttaggacaggaagactagttcctatccaagagggaatcttgccaaagaacttgttgctccacatatcaagcgtaacaagtgctctgcagttgcgaatggtggctgggaaaactacagagaaactattgttagcaagatgcagagattggagaggaagttcagggcttcttgatgctggcaattcacccgagaagccgttgccagagacgtccataaacagcaaagcttgcaactcccaccaacaccttgggagctcaccattgaatcggttatttgatagatccaaaaactgaagagatgacaatgtacaaaaggtcgaatcaaggttgccggatatgctgttaccgttgattgacagatatgtgaggttggtgcactgtccccagtcagacgatagccgaccggtgagcttgctcccggatatgtccaagtattccaagctggggtgtatgccgaaggcatctgagatgtcgccggtgaagtggttcccgtccagccgcacccggtataggcttgtgcagttcttcagacatggcggtagcgtgccgctgaagttgttgtggttcgccgtgaagcgctccagcgcgaagccgtcgcagatgtggcgcggcagctcaccggagaagctgttgttggtgaagctcacgtgctgcaaggctatgcccttgccgaggtccggcgggatggtgccactcatgtagttgttgaacacggagaggtactgaaggttcctgagggacgagatggtggcagggagctcgccttgcagacggttggtgttgacgtccaacctttgcaacgctgtcatgttgccaatctcaggtgggattacaccggtgagatcgttgaagaacaacgccaaagccgtaagctgcttgaggttgccgattgatctagggatcggtccggtcagcaagttgtttgacaaatccagctcttccagattctccaaatcgccgagttctgccgggatggatccgcaaaggttgttgctgaacaggtaaaggattttcagtttcctcgccatgccgacctcttttggaatcctgccagtgaagaagttgtactgtacttggaacgatatgagctcgggccagctcgtgaacaacaccgaagggatctcaccggtgagcccgttcatttcaagtccgaactcccgcattgcgcacatcccggcgaatgccgggggcaagccaccggagaggtggttcacggatatctctagaaaagtgagattcttaagatttcccagctccggcggcagagttgaaacaagcccagcgttctttatcttgagccgctgcagcatctggagctggccaagaaccggcgggatcgccccgccgagctggttgtcaccaagttcgagaatcctcaactgtgacatcgacccaaggaactctgggacgccgccggtgagattgttggcggcaatcagcaggtcctggagcttcgttaacctcctgagcgacgccggaatccggccagagaattcattgttggacaagttcaggtacatcagattcgggagcttctccggcagtgtgtccggcatcagcccgaacagagtattctgcgacaagtcgaggtaggtgatgttgccgctcttgaggatgaagtccgggaagctaccattgatggagttgtcgtagagcgacatgaatgtcacggtgggcatcggcgagaacttggcgaagtcctggtcggtcaggtagtttgctcccaggtcgaagtgggcaatcttggggagtcggctgagctggtgcgggatggcgccaacgaggttgttgttgtagaggcagaggtcgacgaggccggagaggtggccgatctgcggcgggatggagccgttgaacccgttgtcgccgaggtcgagcgaggcaagggagcgcagttgcgagatgccggccgggatgtcgccggcgaagctgttcccgttgaggtcgagctcggtgagcgccgggaacgcggcgaagtcgagctcgagcgtgtggaggccgccgccgagtcccagtccccggaggcgcagcttcgtgacgcggccgccgccggcggcgtcgcagcccacgccgcgccaggtgcagaccggcgaagcccgcgtccagccggacagcgcgaccgggtcagcgaggctcgacttccatgccagtagcgcgtcggtctgctgggacgatgctgcggcattgactgatcctgggatggaagcgatcgccacgaggagggggaggaggaagaaagggtggacgacgggggccatgcggagtaaaacaccaacgcagtgatcctgcattgccgtcgtctccggctatgccttttcgggtccctctttcaaatatgaatatatgatggtgccaatagctaactatatataaatataagtgatttatttttttttagataatggaatataacattccggtctctactcagaacgagctacaaccaattattacaaagtagcactcaaagaaagagtgtagtttaaattaaaaagaacagaccaaacaaaagcagaggaaatatagccaaaataaggagaacacgtttattcaattctatttgtaaacatatttattcaagtttataagagtgatttattagttcgtaaatattttttggtgtgattatcctactgatgattacacactagaactagatccagtgatccaccggaatgcgcgcacacataccgcacgtaatgcctatagcataggcgcatatgggaacaaattttaacactaaagatctgagatttgaactgggtgttccaccacaggaaccttaaccaacttaactagcctttatttggtcgttgttggtaacgattctaattaacttccgatgatccaatagaatggtcacgatcaacccatttttgatcgggtgtaccgtgtacctatatcggttcacagggagtaggcttcaacgcggtagacgttttgttccgaatttttctatagcaaacctgatctaacgatacaatgaattttttctattcacgaagaaaaaatatttagaatcgcaatgctactattaggggtgaaaacggtacgaagatttccgagcttttcagctgccgtttccaatttgcactgtctgtttcagtcggtatcggtaaccaacggtgatagaaatggaaacggttatatctttcggaaatggtagcggaaatgggatggatgtttttccgaccgtttcatcggtaaccgtatttgtatggtaatttccgtcaaaattccgacagttcctcaacggctcaaccagcccaatctatctgaagcccataaatgaagaaagtctgataggcttgtcctataaaaatttcctaaatctaaggatagaatctaaagatagggaatagaataaaaaagctgttggtgatgctattagatgaataacttaaaatatataataacctcaagttagttgggtcactcaaccaaacaacccctaacaatatcaccagaatcccctatttgacttctgcttaattcgcagagcgggagtggctaaaacgtagcccgtgcggtggaggccaactattcaggccaccagcgagaaatgcccagaagttttctggctagcttcacaaggtggtgggctagaggatctggatttaaaggctcaccccttctaattatttgatattagattcttctctaatattcgagttttttttattcaggccaccagcggcaccgcacgacgtaacgaccccgcgtcgccgtcgtctccggcagtcgcatactcgcactggcgcactgctagtggactagtgtcgctgccaccagtggtgtgcagtcgttgctttgggtgctcgtcgtcagtgccttactcattacccccactgatccagttttgctatttaaaaaagatagattcttggggtgaatggccgggtgtaattttggtgcatgtatgtattaatttgtacgcttttcggcgtgcacatatattcattaggattcgctaaaattcatgcacttgtaaacggtggctgatgcaggatttctagcatgggtattcaaagttacaaagtagtattgtttaacacaactaaaaaaaatcagaatattgtacactaaactacacaataacataataatatttaagggacctatattggacgttgttctttcaagttctttttttgaataagttcacctgacgtccctcgactttatatcgagtttgtatcaggtcctcaatccccaataccagaaatctttatccttaaactattcaaaaccgtttaaagttaatcccaagactctataggccaaaaattcccctagttttgctgacgtggcatatgtcgggccccacatgtcagtgtgtcgtggcattacatgacgctacacgagtggttgtcaccgccggtcgccgcggcgaagaagcctaatgagatcgccgcaacaccgccacttgcggctgctccggtgacccggagcatgggaagggagcggcgcggaaaagaaggagaaggataagggctcggagaagaaagctacggtgttggagaagcaagccaaggcgccaccggccgcacccgtaccgtcgatgcccgttcggcgccagcgctgtcatcgccggagcaccctcacagggctactcgccgcatatttgagggcctgtcggtgctggtgcgggggcgccgctgtcgaggaacccccgacccggacttcacgctgttgcgggcggatcaagcggcccctcaccggctgtcgaccccgccgcctgatctgaaggatgagcgcgcggctgctggctccatctgtgctgcctggttcattgccaacaccgtcgttcggatcccggcgccgcccaggcttgccggccgcctccccctccccctcgaccatgctcatcgcactgtcctcgatgcccgcctccccacgccatgcctcgacctcgccggtcgtgccaaggttgtcaggtgcgggaagtggctacggtgacggtggtgcgcgtgagcgtcgttaggtgcggtggcagagctcagccggtctcaccggccgcctctaccccatctaccgccactggcctcccgtgaagagaagagaagagaagaaaacagtagagagaaaagaaaaaagacaagagaagaaagaaaagatgtggacctcacattttttcttctcacttatatgtgggccccataattttttaatttttatttgtgctgactaggataccgcgtcagcgaaactctcagagatccatactgttatcgactctagattgcacggttttgtaaagtttaggggtgaagatttctggtattagggattagggatgtcataaactcgatgtaaagttgagggagggatggtgaacttatttcttcttttttctggcccagtctggcccagagccaatccggccgaaattccctgccccctgcaggctgcagcctttgctcttgctttgctgcctactgggctgctggcccgctctgccttgttgatcgatcggctgctctccgtcgcctttgccgagtcacgcgccgcagcgcctgcgcatcgctcctcatcccctacacgcgacgaatctcccttttagcctctatttttcctggctagatcgccgccgtagctcgctcgccggagcgactcccggccaccgcaccccctctttgctcggttttagccgccgcccgcggccacacgccgctggcctccttccagcagtccccgttcaagcctaccttttctgaaccgttcacagctagtgatttgtaagatgcattgtcaagttaattccaagggcaatcttaggatagtataactggtgataataaatatataatgaaattattctgtaaactgaatcacaaaaatctatcgttcatccaacattgtattccttgtcgttactatccctgtggagtatttttatttttttcataggctaaataataaacttgtaaatgtaatcgccatataattccctcgtagaaaagcaatacttcttagggcaatagcagtgcgtctacggaaaatgccgatcctcaatacttcttagggcaatagcagtgcgtctacggaaaatgccgatcctcatgtgccacgtagactaggaaccctattagccacatactccacagtgcaggtcacatatcacagtattgtgggtcccacctttctctcctccccttttcatcttcccgttcgtctctctcctctcttcatccctcatcggcagaagaaacgaaccggcgacggcgacgagctgcgcggcggcggtggtcatggtctcaagcggcggcggcggcggcggcagcagttgtggtcgggagcagcgtcgagcggagcggcggcggtcgtagttgctgttggaattaatgaatgggccttagcccactcgaagattaattctttggaaaatcacaaaagcccacctcatgggatggcatgcatgtggagtttagtaccaccttgcttattctaggagagggggacctccttaaaagggaggatgccctcctagccacttgaagcatgtgtggtggagagaagaggggaaacacacgcgctcgctcgctcgcctcgcctggcagggcagggcaggcggcgcgcgtgcacgacgtacgcgtcgaatggtccgaaaaattggctcctcacccttgcgcagatgcagcctccttttgcagttttgttttgctgcaaattcggattcgtttttgttttggaaacgttccgaaaaatccgatgcgtgcaaacggcgtggagtccggataagttacgcgcgacttatccggttcggttacgcgcagtagagatcgtgcgggcgccctgatcaagcgacccttctctatataaaccgacccgccgtcttcacgcaatatatgtgaaaatcaatctagggtttgcctcctactctgtactgcgccgtcgctcgtagactactccatcccgctcgccggcgtgcaccagcgatcgggagagcaggtctccggaacctctgcctttgacgtcctgcaccgggagaaggcagcaataaggtttttgggaagcgcttcgcgcgactgctccctgttcgttcgcgacggctcgccttcctcttcgctcgcgtgtttcgtgccttcgtagacacctgcgaaaagtttcgaccaagcagccggtcttttcgtcacctcggtacgtgttcaatatgttgcgcatatttgatctgttcatgttattctgcgtagtttacatgtgtagatctaatgatgcgttcatgctagttttcatctgtaatgtcatgatttatttatggaataaattaaatcattatatgctgcccataatctcaacagttgcgagaggcgccgagcggcggggcggcggcggtcgtggtcgcaagcagcacggccgcggcggtcgtggtcgggagcagcgccgagcgtccggcagcggtcgagcggagcagcggcggcgccctatcctccatccccaacaacggtggcggcggcctggatcgacctcgagcttccgtccccgcttcatcccttccggtcctcgtccgcggtggctagctgcatcgccgtcgccggcaccctctcctccacccccaacgacggtggcggcggcgtggcccaagcggcggcgcggatcaacctcgagctcccctcccccctcccccttcttcatccctccgattctcgtccgcggcgccggcccggtcctcgtccacggtggctgcgtcgccgtcaccggtccggtcctcgcccgcggtggctgcatcgccgtcgccgtcgacggccggtggtgtggatgctctcctccttcggtccttctctcttcccggatgggcacggcatggcacacgaaattgtgtgggcccagaactgtggttttgatgaggaatgagtagcacgttttggctccccgttcttggtgaaccatccaaaagtgctgaggtgaaggggaatatctgagttggctagttgaggctgaatgacaccttattgtattgtaaatggccttagaaataaactgtatatatattccagcagtcctctttcttcttctatgaatgtaactaagcatattctgagaaatcagaacggacgacagataaatgtgtgtgatactgtaaatgaacgggcagtgctcctgcactttgatacaaaaacgaaaagaaaaagttccattttactcccttgaactatttcacgggagtacttaatctcctaaactatttttaactcattttacacccccgaactatttaaaacagtccacttcatcccctaacactatttatcttctttagttctcactatataagtcatattttgcattgaaattttggtagaatatagatgcatccataacttaagtctcaacattcttctttgattttttttctcactgtttacataggttgaaagcacttcaaactgatttaaacatcagaattttaaagttcaagcaaacgtcatgaaaaatttcaaaatatttttgaactttagtaattgtatcatctatggctctaataaatttcagcttaaaatataacgtgtataaagagtaaaaaaaagaaatgttattaaggagtaaaacgacatttctagtagtttaggggataaaacgagaaaaaatagttcaggggttaagatatccattgaattagtttaggagagtaaaatggactttttttttcaaaagaaaataaattatatgatgcatgaaaaaatcccttcaaaatagaaaggttgcggtctgcagacatcagacaaccacaaccagataggcatcaagtacatcatggtagaacgtagctgttctttttttaaaacaacccgctagtgcgacatttctattgataaagaaggaataaaatataagtctatagtcctgagagactatagtaaaaaaaaagaaaatatataaccacaccacgcatctgcgtctgatcctactgctaaatactgaacaaacacacaatacccctaaggaataagtcttctaaacgatggctccaaggaggaaaatgacgccaaaagcaccaccgccgcccatcctagagaaccaggatgtggttttcacttgaagaacctcttgggaaacgatagaaaacgcaacaacgtcccaaggtgaaaacggtgcctgtaggcgtcgccgttgccggcccgaaggctaggccttcgctccttgttctactctcccgcgctaaagagtgcatgccagattcaacagaaccaccagctaatccccttcgacgtgcagccaccgcgccgacgtctcgctgttggctggccatcaaagaagagtctcatccttcatcgcgcttcaatccatccacgtggttgggttggaaagggagagaatgagagagaagaatggatcccctctcccccgtactagcctgtccagcgtgaccatcttacggcggccgccatcctggctagctgctcggttctctagcggcgcgcttcggtggcggtgaggggagggagaggaggagagaggggcggtggcggcggtgctaggttttcccctgagccacccgcgcgtgggcgacgcggtagcacagagttgataaatgtttatgttctccataaagatgatggccctgtttagatccactgacaaattttttcaccctgtcacatcgaacgtttaggcacatgcatgaagtattaaatatagaaaaaaaaactaattacacagtatgcgtgtaaattgcgagacgaatcttttaagcctaattactccatgatttgacaatgtggtgctacattaaatatttgctaatgatggataaattgggcttaataaattcgtttcacagtttataggcttattatgtaattagtttttttattagtctatatttaatattttaaattagtgtccgtatatatgttgtgacccgctaaaactttacaccactggatctaaacaccctgatatttatcttttagtaaagatgcatctaacataccaagtttttatttggatagatagaatcggagttatttgttgcaaaaatgaccaaaacaaacatccctataaactgacagtggtatattacttggttgctgatttgcatctagcatatccactgatgtgatcacttatttatcactaatcacttagaatttattttggggtaaaataaaaaagatgctctaacttcaaaattaaaatatactaactacaccttgatgtgatctcctcctggcctggtcctctcgctctctctctctctctctctctctctctctctctctctctctactgaattctgatccaaattcgctgtctcctctgcagctctgctcggccgctctccatcgccttgccgagccacgcaatagtagctctgcctctgcttcatcccaagctttgccgcgccaacaaaccaagccgacgacaagctcgacctccattccatgcgctcgagctatgccgccaacggcaaaagagaccgcctccgccccgtctacctccgcccgagagccgcccagggcttcgcctcctccatcgccgtcgccggacgcaaacgcggcgaaaaccctagctttcaccggctccaccaaatcccgaaaattctcccgcacccgagttccttcgtccgaaattgaggtgaccatcgtccttctacacgcgatgaatctcctttaccctctcttttactggcaagatcgccatggctcgctggagcgactccaggtcacccgttgcgccgtcgggaacggttggaatttcacagctaagatgcattgttagattaacgccaggggcaagcttaggatagtactctattactggtgatacatgtactgaaattattctgaagactatcaatcacaaaagttctgtccttcatcaactttgtattcctcgttgctacttgcttctatccctgtgtaatattattatttttcccattggctaagcaaacttgtaaatgcaagacagagaagataaatgaaaatcatgacattgacatataattctgtcgaggaaaagcaacaggggcatattatttggttgctgatttgcatctgaagaatacttagtgcatacatcttctgcaatttgcatagcttctttctatgtggtcaacagaatgaaaaacaaaaactcttaatggcttaagtaaaattagaactccaaaccaaagccaaaacccgaaaacaatgccaagaattaaagagtaaaataaacatatatcaagttctttatgatcttcatttttctcatccaatctagatgcctggcaggctattatcaaagggaagccacaaaggcccaaattgttgctataaattgagggatccacaaatgtctgaagttgtcttcctgtgggtatgcttccccataagtggttgtttgagagatttaacacactgaggcatgacagatttgaaatgcttgcggggataacacctgaaagctcattccatgacaagtcaagggactccaagatattcaaattgccaattctttctggaatactgcctgatagatcgttccatgacaagttcaaaaaccggaggccccgaaggtatgttagctcttttgggatttcaccgtaaagtgaattgcctgataaatcaatgcctgtcattaacatagctgttctttgaaaagtttcttcatgtcccttccattgtatgctaactctgtctctagactgatcaagaggggactgatttttgggttctcttctgcggtgaggcttgggaacctggggtacttctggctgaaaaggactgctttccgcgttaaaatattctgtcgctggcaaggtttttgcttgtgtcatggatgataagttgccaaaacttgttgggatgaatccagttaacacgttgctggccaagtcaagaagttgaagctcagaaagttgggataattctgtaggaatctctccactgaaattatttgatcgaaggataagaattcttaggagaggaagactaattccaatccaagagggaatatggccaaagaacttgttgttccccatatctagggtaacaagcgctccacatttgcgaacaatatttgggaaaactccagagaaactattgttagcgagatgcatcgattgtagaggaagttcaaggctttctgttgctggcaattcaccataaaagtcgttgccggagatgtccataaacagtaaagcttgcaactcccaccaacaacttgggagctcaccattgaatcggttattcgatagatccaaaaactgaagagatgacaatttacaaaaggtcgaatcaaggttgccggatatgctgttaccattgatagacagataggtgaggttggtgcactgtccccagtcagaggacagctcaccggtaagcttgttcccggagacgtccaaatattgcaggatgcggtggacgccgaaggcctccgagatgtcgccggtgaagtggttctcttccagccggacccggtatagcgccgtgcaattcttcaggcacaacggcagcgtgccggtgaagttgttgtagttcgccgtgagttggtccagcgcgaagccgtcgcagatgtggcgcggcagctcgccggagaagctgttgttggtgaagctcacgtgctgcaaggctatgcccttgccgaggtccggcggaatggtgccgctcatgtagttgttgaacacggagaggtactgaaggttcctgagggacgagatggtggcagggagctcaccttgcagacggttggtgttcacgtcgaagctttgcaacgctgtcatgttgccaatctcaggtgggatcgtaccggtgaggttgttgaagaacaacgccaacttagtgagttgcttgagcttgccgagcgagctggggatcggtccggtgagcgagttctccgacaaatctagctctaccaggttctccagctcgccgagctctaccgggatggaaccgctaaggttgttgctgaataggtaaaggaattccagtttccttgccttgctgagctccgatggaattttgccggtcaacgagttgttctgcacttggaacactatgagctccggccagctcgtgaacaacgccggcgggatctcaccggtgaggttgttcgtggaaatgccgaagtaccgcattgcccgcatcccggcgaactccggcggcaagccaccggagagccggttcaaggacagctcgaagaaaatgagattcttcagatttcccagctgcgacggcagagttgagacaaggccggagttcttgatgtcgagccgctgcagcatctggagccggccaagaaccggcgggatcgccccgccgagctggttgtcgccgagttcaagaatcctcaattgcggcatcgacccaaggaactccgggatgccgccggtgagattgttgccggccatccgcaggtcctgcagcttcatcaacttcccgagcgacgccggaatcgagccggagaacgcattgatggacaggttgaggtacctcagattcgggagcttctccggcagcgtgtccggtatcttcccgaacagagtattctgcgacaggtcgaggtaggtgatgttgccgctcctgaggacgaactccgggaagctgccattgaaggagttgaggtagagcgacatgaacgtgacggtgggcatcggcgagaacttgccgaagtcctggtcggtcaggtagtttgctcccaggtcaaaatggataatattggggagacggcttagctggtgcgggatggcgccgacgaggttgttgttgtagaggcggaggtcgacgaggccggagaggtcgccgaactgcggcgggatggagtcgctgaagccattattgccgaggtcgagcgaggtcagcgagcgcagccgcgtgatgctcgcggggatggcgccggtgaagttgttcccgttgaggtcgagctcggccagcgccgggagcgccgcgaagtcgagctcgtcgaggccgccgccgagccccagcccctggagccgcagcttcgcgacgcgggcgccggcggcggcggaggcgtcgcaggccacgccgcgccacgcgcacaccggcgcggcgcggctccacccggacagcgcggccgcgtcgtcctgcaggctggccttccacgccagcagcgcctccgcttccgtcggcgtcgccgcattggccagcgcagggatggcagcagccgccgccacgaggatgatcagcagagggaggacgaggcgtgccatgtgggattgtgggcagtcgacgccttcattggcgaactgttgtgatacgacgagtggctaaaacaccagcaaatgggttcgtcgcacctccaaagccacgtgcgcgtgaattcatacgagcgtcgccgtcgcttcccgccatattggactctggctaggtcaatcgttcaaaatgggaggatttcttccacacctgcgtagctatctctcttacagcaatgtgaaaatcgcaagaatcactctgtaaatgtcatttgagtttgagattttttttatataaactaatttattacaaatatccccttctaatttaccttggttattttgagattcttcctcagttgttgtcgctcgcaccttttttttctctctcctcaaactcaaggtaacatttaggatggttttttaataattttccaatatatctttaccaattcataagtaaaactcgatgcaggaaataaaaacaacatgtatttgttgttaaaaattcaaaatgtctctgcagtttttagtgtttaacacctttaaatattagacatatatttgatcatttatcttattaaaaaaaataaaaaataagtcatgctaaaagtatatttaataataaattaaatcacaacaaaaataaataataaatacatatatttttaaataagataaatgattaaacatacgtgacataaacattaaaaactagagggaatatcttttattggcttctatctagttttagagcacattgtggctatgttaggagatttattctaaaaaataaaaaccaaaatatatttaaccggaacttcctttttaaataaaaaataactagcacggtggcccgcgcagattgcgcggctaacatcattatattttctctcatataatagcatatatgttttctcaatgtatcattcaaatatattaaaataacaacataattttaaattttgtactaactttacgaaactactaatgtttaatatccata

SEQ ID NO: 9536 - DNA, 55074 bp, Oryza sativa
attcttcttaatacgtgccatatttgatacttctccagttgtagcctcgacttgtgcttgagaagtctccccttgatctgaaacaaggtcagcttcatcgaatctaacatcaccctgaccccaaaggcttgcctgcaacctggcctccctttctttgttatatatggactgcagctttgacttgaaatatggcaaaacaacctacaaacatattaagaacaccataaaaaaaatattccaaacctgagaaatttcatcataacataaataaaatgtgacacccattttttatgagcattttgatagtgatatccatatgtttgtcgttttacttgagtcactgaggtagcacatgaaattgtatcataaatgccaaaaataacaacttcatcaagagcatcgctaatacatttaacaactacactaagttttggtgctgaatacgcattaaaggataatagaccaaagcaagattgaagactcgaaacttttttttctaatctgcaccaactttcaataagaaaataactgaacacagagatccagtaagagcatcgtagcttgtaactaaagcaaaaggacattctgtattcatactggagtagtacatagtaaaaatagactaggcattggtgtcagttgtaaaacgttgataaacaaggccagctttaataaaagagcagctcagggcacataatagaaccatgcaaaatcacacaaggttaacatatgggttagatttgtttctaggtgttcaactcttgaagtcatgataaaccaatttaatcaaattggtagagagaggtactgttttcgtagattttgatagtagctgcatatgcagagtagcaagacagaacagctcaaaagtatttaccacgaaaacaacaaagccaataccaaaaaaaaaaagcagtaatatttgacactaaagctgcttgctgctaaacgacatcataccaaaaaaacaacagaaaggactttctggcgcttccttagaacagaatcataggctttatcattggattctgcaccagaactacttctctttactgaaaccttaacaggtctccgcctgagaccatacaatgactccgaaaaagaaccatctgaaaaaaaaaacctggacagttataatcacagaggcgttgagatgtctcaaagaaaagttagtacaaaggtcatgaacacagcaaatcctttacagcaaaagaaccttatgtttctgtgatgacaaacctgtcgttcgcaaactatgggactcaaggacagccattaacaaggcaaagaattcatcctcgtaatctaaaactttatgtaacaacggccgtcttagtgcaaaaacctgtgagtaatagtatgagttagttagaactctatttaagaggcatgatgtactaaaattaaacacacacacaaagtgatatgttcaagaatttagagaaagcatcagctgaaaaaatgactcctctagtcacaagtttttccccttattaaaaatggtgcatatactacattaaactctgctttatcgctctccattgttgagacacttttttcaaacaggtagtagtaaaagcgcaattacatacttaactgcctgtgcaagaatcacaaagcgcaattacatacttaactgcatgtgcaagaatctttgtgaaccagatagagcagaatttgtatcatgcttttgacagtatgttgtgctaggtaaaggtccaaccttgtgtagggcaatccaaaaacttccattccgcatgtaatcctcttggctatttcgtgcccagtgcacactgttttttagtactttttaacagtattattggagtttcttcgtaatatacttctacatacgttccacagatgctctacaaaacacttcaccttcagtttgttgggatgctattctaattgcatcatttggtcacattcaatttgttcttaaacatgtgatatacaacaaccaatttaatattatttgtatagaaaaatgaacagcatcatgtgagctcaatgtcctttaaaagaagtttgctcaaaactacatatagcaatgatcccaatgaatcaacccaattcagtgcagctagccaaacaacctaaagagctgtaatatccatcagcagaagaaccaacttctgtgactgcgaattgcatatacaaaactagcactgatcaactatactccgagcttgcaccagtaaccaacagaatctggcacagaaacaaataaaacaacaacccagagcccgcaccattcaatcatctccaactcctcaagctagaccactacaatgcgcaggaagccagcatcgtcgagtgacactataattttctatcaccccctagaaaccccagacatctaaacaaattacagccacgaagtcaaaacacccttatcccgagcgatttggatcgaatttggaggagatgaggagaggggcgggggcgaggcgagttcatccactttaccccgagcgagtaggagagcgcggcgcggaggctggccggcagctgctgcgcggccgacatctcgaagaaggtgggccgcgccccctgccctcccacctggaacagcatcctgcctcctcctcctcccccgggctaggctcggccggctagggttcccgctgcctcttccccggcagcgcgactcggcctagctgcgggtggatccgccggagttgccgccgcagccgccggttagtgtagtcctcggcgtccacggcggtgtgtgtgcgtgtgggagagaaaggagaggcgaggcgcaaaagagaagccttgagggagacgggacgggggtggtgacgtcacgaggcgacgatgggccgggcttagagaggatgatgggctcttctgtcgatgggccttctcaggaaaacgatgggctcttcagcaacatccagttcatgcaaatacaaaggggctcattaattatttgagggcaactacaaaacgggatcccgttgcaacgggacaggcatattaactattctcttgcacgagtatcacaggtatcaggttttaggtatcacaggtaccgggtaacaggtatcaggtaccatgcagctagtaccacaacagatatcaggtatccgatactgtcttatagaaggtatcgcgttccaacgggataccattgtcttggttttctgtaattatttcgcttatatttatacttataaagctaagattaaaaaaacttaattttaaatttgatttttattagttcattattgtttattttacagcatttgtttttaattcactaagaatatatacataaaaattttacttacaaataactttttattcactaataagcatttcggataaacatattaataagcgaaacaatggagaatatggtgcttgaaagctgcagctaaagatttttttaaaaaagtaaaaatctccattagttttgtgaccagctagataagtactcagacattgcactgtctaatccatggcaatagcgacctgtatatatatgaacaatagtacaatgtgtacaaaatcacaaatgtgctagcagaacttgtattggacttggatccccctgactctagcaatggcaagaggcagaagaagtttctctagctaactataagatataggagccagagaagcgaggccgtcatcgaagttgcgggagtagctctccaggctgtacccgaacctcgccgcgccgccggctttcttccccggctgcgtcgacgccgagctcctccactttgacctcagcttccggtacagttgcctcaccggccgcgccatcgccaccgctgccaaccgccgcctctccacgccacccgtcgacgacgcggccgtcctcctccggctgccacagccgccgtaaagccccaacagaaacaccatctcttatatctagctccacagtatacagactacagtgcgggatcttttttttttaaaccccacggggtatatttgtattaaagaaggggaaacactgtacaatagccaaaaaggctaggagattacaagaaaaaagaaagtgagaaaaacgagggtgggtggggtgtagctactagaagagacgtatgattttgattagtcgattacgtggcgtcgtctgcacttccatggttgctcggtagtaggcattggaggctttttgccctgcctgcgtgccaaagccagatctcgttagtcgctcggtcaatgattccctgcagcggagtctctatgcttctgaataccctactatttctttctttccaaatttcccaggatagtagggtaaggattgatttgacgcccttccttttctcctttgtcattgcgcgaacggtctgagtccaccagtcctcaagggatgtcgtcttggtccaatttactggccgtagttgggggacaaccagccttgtcgctatagcatctcatattgctcttgtgatcgggcattcatagaagaggtggtgtgccgtctctaggttcctaaagcatagttggcagaagtagttgtttggccactccctctgctgcagcctatcagccgtccatattctattttgaaggagcagccaggcaaaaaaattgcatttggacggtgcccaacacttccaaactgcagttgccgataatgataggatgctgcccaggaactgcatttgataggttgacttttgctgtataggatccggttggtgtccatttccattgtatgctgtcttggacaccttgggatagggtagtgtttgattcccaaagtatctcgaaaaccttgaagaactccgtgacgagcattgatgtcaagttgtgtctgatgtcattgatccacttattgtcctgtagggcatttgcaacagtccttttcttccttctagcatgacggtagaggtttggtgccattgtctttagtggggagctggatacccaaggggattcccagaagagcgccttcctgctgtccccgatggtcaccgttgtggatgctgcaaagagctcggcgtcctgttcgtcacatggggttggcataccaatccacggtttgtctgggaaggtccattcgtaccacagccatcgtaaatggagggcccgtcccatcttggtgaggttcgagacccccaggccaccatacttgatcggtctgcaaactcgctgccaattcaccttgcacttgccaccgtggaactcatcgccaccgtcccaaagaaattttcttcttgctttatcaatttcttggattatttgctttggaatcttgagcgctgtcatgacgtagattggcatggagcttagtactgagagtactagctctcttctgcccccggctgagaggagtttctttttccaactggcaagtcgtgccttgattcggtcaattaagtattgtaggtggaccttgcgcagtctgcttacagtgaggggcattcctaggtactgcattggaaagactccacgtgggcggtgaaattgtgtagaacctcgtcgaggtcaaccgcgtcgcagcttattggaagcactgagcttttttgtaggttgacttggaggctggttgctcccccgaaaccgtttaggatcaagattaggctatccacatcttggcgagatggcttgatgaagattgccgcgtcatcagcatctagggagcacctgaagcgcgcgctgcgatccgctagctcgcttaggtggccttcgtcagttgctatcttgaggagtctgtgcagagggtccattgcaaggatgaacaggtacggagatagggggtccccctgtcttaacccccttcgatggtcgatcctttccccctcaataccatttagagagactctggaggaggaggctgagaggatcaacgccacccagtcgcgccatttggcgctgaagcccattctctctaggagtattagcaggtattcctatgagaccgagtcgaaggccttggcaatgtccaacttgaaaaagagggtgggtttcttggatctgtgcattttccttgccaaattggagacgtaaaggaagttgttttggatgcaacgcgttttgataaaacgcactctgggcttacgagattagaccgttgatctgtctggacagacggattgccaggatctttcccaacaactttgccagggatcttaattaatttcttcctcacggctcactcagaacagaggtatttcctccgtttcaaaatgtaagacattttagcattttccacattcatattgatgttaatgaatctagatagatatatatgtctagattcattaacatcaatataaatatgagaaatactagaatgacttacattgtgaaacggagggagtagctaactgcaagtctgcaactcgatggcctcgtttcttcgcctccttccacctgcggcttatataaagctcgcacttggctacgacgacgacgatgaccggattgttcggagaatgtcaccggccgccggcctggcccgccgtggtcggccactgatgacaataatggcacgggcaagagtggatttctgcaggtagcttcttctttctccctgggggccagatgctgaatgtgttgcgacgtactgttaacgcgcgtgaaacacgtgatggtacggagatgtataccgtgtgcgtagtacatgtgttagcgtcgaagagacgaagactgtactagcagctacagatcaggtgtgaaatgtgacatgatcatcaacatgcgtatgcatgatccaatagctagctacgaggtgtggagctgccacatgaaaaatgagcttcatgagtatactcattttccgagttccgaccagctaatcgatcagatagatctcacagattaatgaacgacgatggctgacagctcggggattatggcgaccagcttcttcgcgcatcatctaccatgcatgatgacaacacaagacacatgcatgtatatatattcttaaagttcatcagcgcaaaagctcgcaagaaacaaaaaaaaaaaagcttcacatgatctctctctctctgttcagatttcatatctcccatgcaggaatcaactaataacattgctagtcaactgggcctttaattaatcgatctaccaatgtgttcatatggatcatgcaggattattatacaacctatgttctgaacaagcagttaaagggaaactatttttatccctcgaggagacatcccctcattatttgcatgtcattcaaatggttataaaaaaatgtaaaaaaatttgaaaagatgtattatcatgtgatatatcactccacaaacatgcaagttcaaattcaacttccatatctcacaacaaaaaaaacaaatttgactgtgaatatacgttaactagttgtagtttaatttttttttcgttgcgagatgtagaagttgaatttcaacttgcatgtttgtggagtgatatatcacatgttaatacatcttcttaatttttttcatattttttcataaccatttgagtgacatgcatacaacgataggatatcccctcgagagataaaaatccactcccgcagttaaatcttgttaactcgtttatcatgttttcgcatggggttgacccgatgtacgatagatttattcagttcacttaattaaagagctcattattctcgcttcgttgaacacgtactaacactgatggatcatttagatcctgtttgatataacttcgaattcaagatgttttgaaaccgggcattcctaatactataaatttatagctctgcaatcacgctgataacatttagatgaatcattttatttttatttaaaatagaatatacatttttaatcactataatttaacatataaactttaaatctaatgtgaatctgggatttgatgccagagaaattccccgtggcgaagaaaccgccgaactgaacgttgacgagggcgaagtggagacagcagagcatggtggcgagttttgattttgttgcatgtgcttccaaaattcaaaacgattttgttgcatacagcatatctctactacttaaaaaatttaaaacgttccgacgtccgtgacaagaaaaaaaaagggcgaaaaataatagattcgattgcgatgcgaaaaaaacagtccgtaatacaaaagtcatctgttaaacaaacgaaaatgccttaaaaaacggttcgtaccacaccacgcaaaaaaaagttcgactccgtaatagaaaaggctgaaaaaaaaaccgagaaaaaaaggcatccaccacgcggaaaaaaacacgtttctgcaaaaaaaaatattattatgtttttttattttctttctcgatttccgatttttccggcgcaccgtttccttcccgatttctaatttttccatgcaccgtccatgaaaagcagagttgtttctggttgtgtttatatacagatttgatgggccataaactacttcatgagctcggctaggttacgagctagcccaaacacaagattcggcccgattaaatttgagtcagataaatttcaatatatagagaagtccttgccattttaggatattatgaaacacaccataatctcaacatatgattcttcatgaagatttaaacgagagtataaaaaggcttatataatttctacgatctatagagtagaagtattcaaacggtaacatgctataaatgttgatgcgtcatcaagcaccatgtaaatttggaaatcatgcttacttcaaaactattcttttaaattagtttatcatgagctatcatattttccttcgtaatttgagatttattttagcgagcaaaagcactgggtgaaaatagcttcgattaaaaaaaataatttaagttttactttaattattctaattttattatatccgtagcggagcacggacattttgctagtatatatatacgtaaccaagttttagttcctccattaatttagttatctatggcaatataaaaaaaagcaaatctgaccaaattgtatgaagacagaacaacactacaattacaagtagatctaacactaataccacttgcataattattgcaggtagaccagaatatattgcactctccggtctccagcaatggcagggcactcttctctagctacctagctacatgagcctagaagcggtagctggccggagacgatcgatcgaggccgccgtcgtcgaagttccgggaatagctctgaaggtcgtacccgaacctcgccgccgcgccgccgccgccgtgccgcttcgacgacgacgaccgcaacctcgacctcagcttccagtacagctgcctcaccggccgcggcgccgccaccgccgccgacgaccgccgcctccctgcgccggcgcccttcgctgtcgtcgccatcctcctccggccgccgccgccgccgtacagtccgtccagaaacgccatctcgatccgcctttctccggctgcaggccggtcacaactcacaacaacaaagatcactccgagatcagtactcaaagcttgtccagagatcgagttaatctgcaaactcttcttgctctgcggtgcgagagcgtctccctcacctgcggcttatataaagctcgcaggatggctgtgggtatcaccgccggcggcggggccagcgagccactcaccggccggcaggaatggtccgggctaaagtggatttcaggtatcttttattctctctctaccccattgccgctgtggtcaaggaaagagacgatggagatagccacgacgaaagaggagggggagagcatcgtccttttgctttagaggcggtagcgtgagcagtgaggtggcaatggcgaacgcggccgtcaccctcgcccaaagctaggaacaaaataaatgaaaggattggaagagatagagttggtcgatcggcctggcctcgaatcctcgatcgactatggattctctgtcataatatcacgatcattatattaattgatctatgctattttttattattttatatgttaatgtttataataatagtattactataatagagaatgtgaaacccgtatgagtctctgatgctccaagctcgctcggtgtatgtctttctgctcgatcggagtggacggcgaaagcggcgcgaccagatgccgatcgatgcgtgcgtgtgcgcgaaactcatgcagagctaattaagagctagatcgatcgatcgatcaatgtggtcatttctatgggcatgtgtgccatactgagatgttcgtatacgtcacatgaacaatgagcttaatttgtgtaggtaacgtacaaccacaattaacgtactacttaaaaaaagtgatttttctgtatgaggccccctcatttttccatgcggaccataactagtggcgtctgtaaaaatcgagagtcatttttccatacggttgcttaagtggcccgtatgaaaaaatcgattttcccatacggacctattaagagggccgcatgtaaaaatgagctcatttttgcatacggctcacataagcgccccgcatggaaaaatcgatttttccatacggaccacttaagaagccgtatgcgaaaataaaatttgaaactagtgtatctcactcatatgaactccaaattgaataatttttttctaaatgtttctaaaatcatgatagaatatcgtgttcttactggtattattttggctgttttttcttatgactttgttttatcaattaaaattttgaatttcaaaagttcaaataatattttgaagcagtaaatgatttcatcggaaaaagtcatcaataacaaagttatataactcatcaagatctataacttctatttttgtcatttcttcatccgacaaagtgattttctttttcagatgaaatcattttcccaccactttaaatttttttctacctcatctcctctctccccttttaattaatttattacactcccctctctctctctctcctctctctccctctccctctctcagagcagccgggcggcggatggcgacagcgtcgatggcgtcggcgggtggcggatctggcggcgctgccctcaggagggccggatccaccgccatagggagcggctacagcggcggcgggcggcgcgtctacggcgatggctcggcatagcagctacagcccctgctccgtacgtcgatggcatcggcgggcggcgtggctacggcggcgactcggcggcccgccaccccctcctcaccgccgccgacaacgacgacgatgaggcgaccctccccccctcctcaatgccgcggcggcgggggcggcttggccgcctcgggtggcgccgccgcaccgcgcggatccggcgggggcgacgacggcgggcggcgggggagacggatccgccgccagcgacaacgctgggcggctggggcgacggatccggtgccaccgccgacggatccggcgggggagacggatccatcgccggcgacgacgccgggcggctggggcaacggatccggtgcagccgacgacggatccagtggggacgacgacggcgggtggcaggggcgacggatccgccgccggcgacggcgtgcggcatggatgcgtcgctccggtggcgggctagggtttgggatttttttgatatttatttttttggggggttttttggattttattttttttgtttgctgaatttattttcgcatgcggccgatataagcgaccgtatgcgaaaatcccatcttcacatgcggatgcgccggccacatgcaaaaagagtggtttttgcagacgatttcgtccatgcggttggggcaaccgtatgcaaagatgcttcccaaccgcatggaaagagcctttgtgtagtagtgacgagctccactctaagcgcgtgttatgatctaattaacaacatgtggtcgagttagggcgtgtttaagtggaagtgaaaagagaagagatgtaagctattagcgtatatatttaattatgtattaattattttaaaatttaaaaaaggattaatatgattttaagtaaatttttgttgacgaaaaaatcgaatacaccggtctaggagatctgcttagctcctgtgcaggtccaaagattaatgagatgcaggtgtgccagtcagtttgatcctgcaactgacaagatttgcaaataatagatcaaacactcaatcggctgacaagccgatggagtagttccagccgatagccgataatagccgatgccgataccagccgatagcggtagggtttaagcaatcggctatatgtccaatgtagataatgatataaaggcaatcggctgatgataatataatatagcaatataatccagtagaaaccaatcggctaacaatatgaaacagtaaaacaaatattgatccgatggttaaagcacatatcggctggaggtccgatgtcacaagatccacaagattagattaaacagtgaaacctttgttgtcatcggctaaatcgaacttatatgtattgcaatccttatgagccgatgcaacgtccacataactcaccggctgaaaccccgatgaaacccttattggcaatcaagaagcaggctagagattatggttctaagcacgacttagtagatcaaactcaactgatgcataactaagtatgaaaagaaacataatatttagacaatcaaaccgttgactgagttttcagggtggtagatgtctaagctaatctaatctagcaacgcgatttagccgataccggcagaaaccctaaaacaagaagcagccgatagagctaaattgatatgctaggactatattaacagagacatatgataaataggtagacaaatatatcatccaaaccagagcaatccaagtggtcgaatgtactgatgcagccttgaacgacgccgacgtagacgatacaattgcctggaccgacggaacattagacttaccccttcgccggagatcgaacaccgatgcagccccgcgtcaggtgccaagtcccgccagatgataaaataaagtagaaaaggtaaaaggtggcgatgcgccgaattgtattgatcgtagcgattgatagattacaatgaccccgggtgtacatatttatacccatagggagatactagttcttgtcggacaagaaagaaactaaaaaggaaaagataaagtccttaccggacactaaacacactttcctcaagataaaaggaaactaacaaactatacctaattaatagataactgtcatgtcgcatccttcttgaactcgaactcttctagataagcttcctttgattgatccgactccaccaagaacacgacatcgtggcgacttgactcccatcgactgattctagaactttgaagccgatactgactctaagccgatggtaactttgggcttaccaaatttcactgttaacaattttatattattttttaagaaaaatacattgtttagcaatttgagaagtatgtgaaaaactagagaaattttttctctttcaacctcactagaacatagccttaggggagatatatctgaatctgatgcatgttctgtgtgaatcagaatactctaccttcgaagtcacgtgattttatccttgacatatgaatctaatactgaactatgggggttgacaagaaaaggagtaaactgatactggttgaagcttctgccatttgctgggctttatggttgagtagaactgatttggtttttaacaaatcaccatctattttatttatgcaggtaattttcagggcaacgcactggctccggttttgggcacagctgcaaaggtgtgaggatgatgcggagttcctaaaggttgcatgccgcaagttggagtcgatggttatgcaactatttgccaattatgaatggaggttcataaatagacttcaataaatgtgttctctttattttggcttagtttcctctgtttttgtttggtgtgttctatttatctgaactacactcttggatgctactgtataataattggttgtagctcttttttagcaaaggctgggacgttaaattccattatataaaaaaatatatgaatctaataaaccttggataatccacatctgagtgataaaatgtacggtgactttaaagatagaatatctcaatccattttaagagggttttatgtctaagtgcctgatctcacgaccatccatcaccatgtaattcagcctgacatgcatggtgacgataacacacgatccacgatccttgctgcaaatgtacggcgaagaccctgaccgtccacgtacgacgatgttgcgagagaaaggttgaggtcggtgatataatgtaattaattaactaaattaaagcataagcacttgagcaatatatagatcaagattataggaagcagctacgaaatgatcgtagatggataggatgagaggaaagtgcagggagatgactgcatcgagacgctttacgcgcatgatgaccgatgggtttgtgtgccatatccattccatggatcaacctgacgtgtaacgtgtaagccgcgagttctaaatcaatttctgacgaacgcactggcgctgattagcgccgcgtggaacaaccgaatcctttgcacaaaagagaccgagaccgactggctaattactttttgcttaactgaacatctgctgatcgatctgtggctacgacggtctaccatataccaactttcagcatgatcattacgatatcaaaagaagaacaaaactagtactgtcctgtactaagctgttaggagatggagggaaggaaacacacctttttttaaaaaaaaatggaaaagcatactagtgtcattgaagacatgacccaatccatttccgctaaatgacagtccttccatttttagtatatttaaacatgacgtttgaatatttgtcttatctttaataggaagattaatataagttatacttaaattatctttaatgctaaaacaattcacaataaaataaataatactgaatgagatgaatgataacatcgtgtcagaagtgataagctggcaatatcatactccttccgttcaaaaattttaacttatagagtttaaattttgtcccacaaaaactaacttctaccatcatacatatccttaacacgtaaaacgagaatctttatctcttcaatactctttatctacttatcacttttattacttttttttaatgattaaggatattttagtcattctcactctccactatttcaaacgagaagctttatcccttcaatacctttacctacctaccactcttattacttttttttaatgattaaggatattttagtcattatcgctctccactattttcattttggaatgctaggaatggttttttttttacggagggagtatatatttaaacggttgcagtactctacaacagtgcatctcgtgtgagatttcagacttggaactaaacaagtgatcctagtcaggcttcacctcagaccaaaagctctaaataatttcattcattattaattcgtcaacaagaacagaactgtcattgcagtaagatctccagaagaaatatccatcaagtttaattaaatcagtggtggtgatgctaaattaaagcacatgcatgcatgcccaaattaaagaggataaacacatatctacttagtgacatgatgtcatttatctagtaatcttatgatcttatctgcagtactcacttctaggtataaagtaacacagtaagcatcgcaggaaaacgatggaaagcaaaaaaggaaaaccactaagtgctaaagctaaatctacctacgagatcaaaggggattagctgatgagctgatgactcacccacctgatcggctgattcacagatctcacaaaaggacggccatggtgtggcatcttttaattatgattgggaaattcaaacagaaaacaacggttgtcaaattatccgagagtcaccggcgtccatggcgaaccagcttcgagcaagagatcttaatttcatcagagattcagagagacacacataccaccttaattaacacagctgcagctaagctctgttcagatttcagatatccctacatgaacccaacaacaaaattcgcctaattaagaaaacatgtgctatcaggtctcaagaaaaaaaattaatcactgaatacaataatttcttcagtagtttcatgcttttggcaaccagatatatatgtacgctcaattgttcatgtcactccaaattgacatatacatgtataatacacaaacatcttcagcttcaggcttattatggcaaccgaatatattcatgtgtcacgtacgtatatatacatcccataccatactgtccatacagtatatgtacacaatacatgaacaagagcgtgttaggatcgtagtttctccattaattttgccatcccagatgagcactatgaaaaaaaaacagtagtacaatctaacactaataccacttgcagagttgcaggtagaccagaacaataatctccggtctccagcaatggcagggcgcgcgatctcgggatcgaaccgaatgagctacctagctagagagcctagaagcggtggccggagacgacgaggccgacgccgtcgtcgaagttgcgggagtagctctgcaggtcgtacccgaacctcgccgccgccgcgccgccggcgtgcctcttcgacgacgaccgcaacctcgacctcagcttccagtacagctgcctcaccggccgcggcgccgccaccgccgacgacgaccgccgcctccctgctacgccggcgcccttcgctgtcgccatcctcctccggctgccgtacagtccgtccagaaacgccatctcttctcactgacaaaattaagatcactctctcgatcgacttgctgtactcgagatcaaacacaagcctaggagtttttgcaaatcttgtttcgccgcgctgctgtgagctaagctagcgtccctcacctgcggcttatataaagctcgcaggatggctgggcatcatcgccggtggcggggcccgccggccactcaccggccggccggaatggtccgggctaaagtggatttcaggtatctttttttctctctctctctcccattgccgctgtggtcaaggacagaaacaatggatggagatagccaagaaagaggaggagagcatcgtagatataggctaagccttttgctttagaggtattcctccgtttttaatgttacaagacattttaactttgattaaaattaaactgctttaagtttgactaaatttatagaaaataataataatattttcaactcaacataaatttattatgagaatatattcaattgttgatttaatgaaactaatttgttattataaatattactatatttgtgtatagacttagttaaatttaaaggagtttaacattgatcaaagttaaaacattttataatttaaaacagagggagtagctaattaacctaggtagcgtgagcagtgaggtgggaaatggcgatcgaacgcggccgtctccatcgcagcataaattaaaggagagcaaaagctatgttgatcgatcggaataatcgatcgtttggagatagatcagtcggcgtgtcgaggcgcgatcgatcgatgctcgctgccgtcctgaaatgttgtagtggacggcgaaagcggaagcagccagatgcatgcgtggatacgtggccgagatcgcgatcgaactgctgccgaattgaaatgttgtgcgtgaaacttagggtttgaaagtccggccggaatgaaatttcggaccccatacattattatttcggccgatttttttaatttttttaatttgataatattttgttcaaatttgaccaacatttgttcaaaatttcagaaatttcggatcaaaattttagaaatttggtatatccgtgacctccgatagaatcggtcaaaccgaaaaattaaaccccgtgaaagatatctatgcagatcgatgtagtcattatattcccggccgtacgtaggcatctgagcgccactagctagcgtctgaggcatattacacatctacacgttttacaattgacacagcaaaacgtgggggaaatataatgtcacatgaacaatgagagagcttgcagctacagtgagggttgtacaatggtcgagtttaggcgagatatctggatgttgccatgctacgacagggcttaatttatgcccgtttggctgacatgacggtgtggccgtgtctcttgttcaaacgacgacaatctgtgtgttcagttcagatatcgcgtggtcggtcgttgctgcgaacgaatgcactccaaacagggccgtgcacatgggcatgcggcccatgcgaccgtatagacctccaaatttttagggcctcagaaaatcagcccaactgaataaggcccatgcatttgtgtgaggccagagcgccataaccctgttcgagtccgcgcgtgtctccgcgcggcgacttcgcgtgcgtggcgcttcgtattctcaactccgagccccgagaccccacggcgttttgtattctctttcgtttttcgtatctgtgacttattcagttcgtctcgagtctcgacgtcttgtctcctccgagcagcaagccaccagccggctcatccaatttcaaattttcattcaaccagcgaatagcaacttagcaagcaaccaacaagtaaggcactaggcagcaagccagcaacaacaacgaacattctccattttcaatttgacagtttctgattatgcaaaacaagtgataaaaaatatactattcttgatatatcgcatttgctctgcagtatatatattattttagttatagtttgtatcctcacttagtgttttgtacagggcctacaaatttaacggcccggccctgacttcaaacagctagctaggaccatggctgtccacgttgccgatcgagaaaggttttggtgatgaaactgaattagtacagtaaagcataactgcataagcactctgcactcgttggagcaatatgcatgacagacgatgatatataggcagagagctaggaaagacaatcgcgatgaggaggaaagtgtaggaaggtgactagggttcaccataccaccggtaaccgcgtggttaccgcagttaccgggtttaccgcgtttaccgtggaggtatggtaatgtaaataccgcggtaaccttcttaaatttaaaaaataatttaaatttttgatgaattttacacggttttttacggttaccgcgataaccgtgcttaccgctggggcgcggtaaccctggccccggcggtttgggaaaccctaaaggtgactgcatcaaggcgctttacgcgcgtgattgaatattgatggatggttactgcttcctctggccggtgtatttgacgtttagggagaatctatctatctattatattattaaacagctttgaaaggaggcaccacgttcgctgtggaggctagaaattcccacattaatcggagaaaaagaaaaaaaagaaaaggagagtccaagtagaaatacaatttaaaaaaagctgaaattcggaattaaaagtaagcaatattgaaagaagtttctatataggaacccaatacgagattaatcaaaattcgaaataaaaataaaataaaatccgaaattagcgaaaaaaaagagtctaagtaggaatacaatttaaaaatagctgaaattcggaattaaaataaggaatattaaaagaagagtccatacaataacccaatatgagattaattaaaattcgaaataaaaaaaataaaaaaatcgaaattagaaaaaggaaaagaaaagaagagttcaagtaagaatataatttaaaaattaactaaaattcagaattaaatataagcaatattgaaataagagtacatataagaacccaatagtagattaactaaaattcagaataaaaaataaaatataatctgaaattaggcaaattaaaaagagagttaaagtagaaatacaattttaaaacaactgatattcaaaataaaaataaaaaaatctaaagaacacaatacgaaaaataaaataaattctgaaattagaaaaagaaaaataagatatcagctagaaatacaatttataaataactaaaattggtgataaaaaaataaagattactaaaagaaaagaccatctgaaacacatgacgagattaattaagtaacatgcctatataggagaagagtggtggcggttgatgggacatctaaaaactattaataaaataccaaataaaatcctaatgactactaaaaagaagtacaacgggcaggtcgtgaagcaatcggtcaaggcgtttggcgggacttctagaaagtaaaaaaaaataaacccaatgataatcatatttgatttttacgttcactgtgggggctagaaatttccacattaatcggagaaaagaaaagaagagtccaagtagaaatacaatctaaaaatagctgaaattcggaattaaaagtaagcaatattgaaagaagagtccatataggaacgcaatacaagattaatcaaaattcagaataaaaataaaataaaatccgaaattagcaaaagaaaaaagagagtctaagtaggaatataatctaaaaatagctgaaattcggaattaaaaataaggaatattgaaagaagagtccatataggaacccaatacgagattaatcaaaattcggaataaaaataaaataaaatcggaaattagccaaaaaaaaagagtccaagtaggattacaatttaaaaatagcagaaattcggaattaaaaataagaaatattgaaagaagagtcatataagaatccaatacgagattaattaaatttcggaataaaaaataaaaaaaatcaaaattagaaaaaggaaaagaaaagaagagttcaagtaggaatataatttaaaattaactaaaattcagaattaaatataagcaatattaaaatataagcagagtagtggcagttgatgggacatctaaaaactattaataaaacaccaaatacaatcctaatgatgactaaaaagaagtacaacgggcaggtcgtgaagcaatcggtcaaggtaggtggcaggacttctagaaagtaaaaaaataaacccaatgataatcatattagatttttaaaatctcaataataataaaatgagaggcagcggccgggtcgtataggagtacaatggcaaagtcgccgatggttggtgggtcttctataaagtaaaaaaaatgaattccaatgatagttatgtttgacttttacaatcctaataaagagtatgcggcggacgggtcatagaggagtatagtggtaacgtttgatgggatttctaaaaattataaaataaaaatgaaacccaacaagataataaactccaatttttaaaggttcgggcttctaaaaagtaaaaaaaataaaccccaatgataatcctgtttgattttaaaatctcaatgacaataaagaagggcggcagcgggtgagccgtagagtagtatagtgacaaagtcgctgacgttttggagaaacttctagaaagtaaaaaaataaacctaaaggataattatgttcgatttttaaaatagcaatgacaataaagagaagatgcaatggacgaacatagatgagtataatgatagtgtttgacgggacttctagaaattataaaaaagatgcccaataggacaataaactctaaaacatataaagattctaaggagaatgaatagaaaacggtggtagatcgagcaagcaaataaagaataatatgacagaagtaaggggtagcagttgttgtgactttagaaactaaggaaattagaaacacgaggataataaggtttagtctttaaaaatcttaagacaacgagataactatttaataaatttgaagtaaaatcatattaaaaatatataattttatatgggtgctagccgcgcaattgcgcgagccacccagctagtttatttttaaacaaagaaattcagaaattattggtggccaaagttttaaaattaagtttgattaaatcctattttaaacgttaaatatttataacttttagagggagtacgtcctagcgtcctactaagctcaagctgctagctatgacgtaaaaacacttctgtttaattatagtgctatagagtgataacataaccacacatcaacggtcggatttcagacttctggcaaaggaattatacgcagctagtacaactaaacagttccaatttcaggccaattgctgctggatactgtttgaggcctagtgcctagcttttatgttttgttattcgaaacctatattgcgagcttaaatactcagactatgtatctttggggctgcgtatatcctgctgcaggatgtataggtcgggttttaatccattattaaaaaaaattagttatattcattcgtcagcaagaacaacacattcagccgttgcagagtgtacatatctgcttagtgacatgatgacatttatctagcctttccttacgatcttatctactcataattaacaaatttctaggtcgtagtagtgagcatctcaggaaagcgaaaaaaggaaaaccactaagccctaaagctaaatctagctacgagatcaaagtgacattagatgatgagctgatgactcaccgacctgatcggctgattcacagatctcacaaaaggacgacggatggccggcagctttaggattaggaaagtatagttaaaaagcacaagtcaaattatccgagtcacttggcgatcagcttcgagcatggcgatcagattcgagcatgacatctttcttaagctcatcagattcacagaagctgccaccttaacagcaacatttatatctgatcagatagcaccacatgactacaacaacaaacaatagcaatggtgctagttaatcctatgggatttgtatgggtttttttttaccaatttacttatgcattatgcaggatctgtatgcattctatgttctaaacagatcattaaagtttgctaaagcatttatctggcatgtcatatatgatttcactttttttgaatctctcattttcctctgagcctgttggacggaccgagattggtgcagtccttactataagccctatcattttgcttattcgacgatatatttacaaacaaaaaatagtttgtgaataattttttattgtatatgttcttaacaatttaaaagcaaaggctaaaaaataaactatgataaaaaatcataaaaataaactttaaatttaaggttaaaattttaaattttggttgataagcataagcataagtgaaaagatgaaaccatataactacaactttagcagttgcaccgcaactgatggatcaaaaaccaacggcttagatcataaaaaaaatattgttcatgaattactgtagcaaatctacaacggtgttgctataattatgtcaacacattttgtgagtaatcacagtcgatttcttgttcaattgatctcccttgagattcgtgctacaattgcaataccatgtgcattgaacgtctttacatatttcgtgttgcatcgtgaagccaatcaatttaaatttctcatctcgtcagcatgtgttttcatgaaaaaactactacatatataatttcaggacttagatatgtaattttagaacttacattataaatatactaaaattacatatgtaatttagagacttacatatataattttagaatttacattgtaaatacactaaaattacatatgtaatttagggacttacaatgtaaatacatgctgactattttttggtgaaaaatatggcgacataaatataaatatagttactcccaatctacaatgtaccgattactgtagcatcgatggtgcggcatgatggcagagcaaatccgagccgttggttccatcgatccaacagttattatgtgctccttgcagtcattactactacagcaccgatctcagttcctctcgacactgatggatcattcacatagccaaagccactttagggctaagtactgttcctagtaatctaggcccaattaaaactctaacattagcagtaaatgggccgcatattgagccgaaagcccaaagcccaaaggcccacatgcctctcgccttataagtagccgaggcagtgaagccctagccgggtcctcgtctcctcgcgccgccgccgccgccgcggacgccgccatgtcgaagcgaggtacgtgcgagccacctctctccccacctccgctccgtctccttcctccgccgctgcttctgcgtcgctgatctggtcttcgcgcgtgtcggaaatggtggcgcagggaggggtgggtcggcggggaacaagttccggatgtcgctgggtctgccggtggcggcgacggtgaactgcgccgacaacaccggcgccaagaacctctacatcatctccgtgaagggcatcaaggggaggctcaaccggctgccgtcggcctgcgtcggcgacatggtcatggccaccgtcaagaaggggaagcccgacctccggaagaaggtcatgcccgccgtcatcgtccgccagcgcaagccgtggcgccgcaaggacggcgtctacatgtacttcgaaggtacgcggaagctgcacccaatttcgcccatgccgatctgtgaaatcgtgatgctctctagtgtcttgatgattagtgttgcattatgacgtgttatgagctgcgttaagtttggtttctaagtattttagtgtgatcttttagtccacctgcataaattagtgtcaatttcattatgggttacacgatttaccatattgagaatgctgatcagttgtggctgctacgattggagcaatgctctatttttttatgcttacgtcattacgtgattaagttacacattcttatgagctacagtgagcttgttttgggggctaggctttaggttgattttacttgaactatcatcaaatctaccagaaaacaccaaatatgttagcaggttttttttagtttggtgaattatttttaagcaaaaatttatgtgtttgcttattgtgagtttgtaacatggcataaaagagggtacaaatattcttctatattttactgtcttcactaggaagatgttttagatggggccttttggttgggaacatgatctttattgcctgacatggtgctggtcctacttttaataactatggtgttctcaaaatatttttcaactggaagatggctggcattacttatctgattgcgctgtataggccaattgctgaattttgttcgttggagcttgttctgttattttatttgcactgccgtaggaaatacacagtgacgggaggactgcaaggttcttcagctttttctggagcaaacttatatacatgtttgcatattcctaagtaaacgtcacaaacaaagcattgttggatgtagaggttttcttataaagattttatcttcataagagttcctccatctggaagcggtcacatattccattgccctaggtagtggcatcgccgctatgaaactttgggactggccatgtgacatatatttttgtcttctgatgccataaatataatacattagcttttattcattctacatgttttgtgtgcttttattctttggtctcttttacattttgagcagcatttcatttgtacactattcccttggctattttgtcattggttttatcatttggagctgccatgtggtctatcgaattaataccggttatgaaatttgatgtgcagacaatgctggggtgattgtgaatcccaagggtgagatgaaaggtatggcgagaacactactatactcccatatgttatgtgttattgtattttctctcgaagcctaccaggcaataatttactcactgtgtattcttttccaggttctgctatcactggacccattggtaaggagtgcgccgacctctggccaaggattgctagcgcagcaaatgccattgtctagagcttgtttggagtagtagttttcagttctgtgccggatgtgataatgtgctccagttcttttttgtttccaaccaagtttaacctgaacttgaagcaaaccttcagttaaattttcagtgcggattgtgtccttgatgaatggaaaatggcatgtttgcttgtttaccttgctccttttaatcagttcacagtcagcaaccagatcgtattctggagaaactagctgaatgaacatcaatctcacctttctgccacctgaagctgcctgaagatttaggctttgttctatgcttccctacctaatctctactcgctcattttcaatgtgccgctgcacaacctctgcgatcagcgacggcccatttgactcctttctatgtacgttctgacgttatgtgatgttctaggatgatttcctctggggttaattggattcatgccactacaaatatgctaaattagaaaaatagcactactatttgtgatatcggttgggtgccactagaatttggagaaattagaaccgtgttactccgttggttttccatccactcctcgttaatttcccaacttcagtgcttggcctcgatgcggcagcgaaggaacttcggtgcttggcctcgatgcggtagcgaaggagctcggtggcagggaaagcgatgacagccttcaagcatgacagtgacaatgacgtttcccaactctggcggcgagcggagcttcggcgacgagcgactagagcggcggtaacttgggtacgcggggaaggcggcgctcggccttgatgtggcgaaggagctcggcggcaggaaaagcagcgacggccttctccgctctcaaggggcacgatggcgaagcacgccgagagggcgaagcggcggcgacgggccatggctgtgcgcggcaagagggcgaggtgatggcgaagggtctctaggggcacaatggcaaagcacgccaagagggcgaggcagcggcaacgggccatggctgtacgcgggcggcgagaggtcaaggtgacggcggcgggtctcaagggggatgatggcgaagcatgccgagagggcgaagcggcggcgacgggccatggttgtgcgcgggcggcgagagggtgaggtgatggcggcgggttgtgactctgtgtcggaggggagaaggagaggcggcggcggactgtggctgtgagtgggtggcgagagggcgaggtgatggcagcgggccgaggctatgtgtaggcggggagagcgtaaggctgcgccggttagtggggcgagggcaaggcggctcggttgtgcagggaaggcggtgctcggcctcgatgcgcgatggtgatggtggggagtttcgacgatggtggaggagatggcagcactcggcacaaacgaaagatggtggcgccaatggggagtagataacgcgacggagtggcatggatccaatttccccaaattttagcggtactagtcgatatcacgaatagtagcgatatttttctaatttggcatatttgtaatggtgaatagtagcgatatttttctaatttggcatatttgtaatggtatggatacaattaacccttttcctgtagcatagtaagagcatcactaacagtccttatattgttcccaaaactgatttttatgtttttaaaactgatttttatgtttttaggtgaaaaatcggatccaacataaccccacacacgttttagagttccttcaccatactgattgtaagggttttaaagtgaaaaatcggatccaacacacgtttcagagttcccttcaccgtactgattgtaagggttttaaagtgaaaaatcggatccaacagatcatctacacacggatataacagaaccctgtttcttccaaaactgattttaatggttttaggtgaaaaatcggatccaacatatccccacacacgttttagagttcctttaacttactgattttaatggtttttaagtgaaaaaatggattcagcagatcccctacacacggatctaacatatctcagtttcttcgtgatctattcttataaaatttaggttttctatgagagagatcagtttttttttctattttcagtttagaaaaccaaaaacaaaattttctattttcaatttagaaaaaaaaattgggagaagattattcgtaatgtcttgatgatgctctaagttcctcttgcgtaattttccaatattctcaatggatgtgcattgttacgacgataaatggtaataactgttaaaatttctgccaacaggattttcaaaagattcagcctttggtaaggaatttcttttttttatctgattctttttttagatagtcgtgtttttagatgccacagatttcattggtccctcacttgtatttcctaatgaagtaatgatatatctggagaacttttgggtcatttttttattttttatttgtgatctttttgggaccttaattagttgattgtttgaatcaggcattctgtgtaaacaaggtttgcataacagttttattcggtgtgcttctacttagcttaattttattcagccgcttatattttgactgaatagattaggtttcttgttcccaattacacgacatgtagaaattactttgacacgcaaaaggtttgcgcgttcgcgaaaaaagacatatagaaattacttcatccgtattcaaatatatgatgttgttaactttatttagtttgttttcagaaaagaaaaagaactttattcagtcaaacttttgaaagcttgatcattaatagctctcataatatttagtttgaaaaataccgtatgtgtagatttttctttactggagcatttacaataatacagttttgttagatagttttgttgtattctaatttaaaaaaaagtactgctcagacttgaacactagagaaggaataaagtcaatagtataatatattcatatagaggtattataccgtcaaacatttgcaaatatatccttttcctttacaccctcagattgctaaaggcctaaatctatattgattttccctgctccaattttctcaaccgtttccaggaccacctcaaaacatactaggcatttcaaaatgccttctaacatcgttaagtacacacgacatttgtatctatacaaattatgcaaattaactctatctatttcattcacctgcaagaatgacaaacaagtgaaaagcagattgatatgacaacagaccgaccctacagcaactccagctgatcaacatacatcaaatttctacaaaattattcagaggtttgaagtaaaggaccggttaaatctgcacaaaatagggtggaaaaaaaaagaaaaagcaattcgagagagtttctcagtgctgtgtcgtatgagtttatatccaggattccactgtgtgattgtacatgtatgagctcatcccgctgatatgcgctagagcgtcagaatcaagcatgtcttctcccttcacgccgccctgcaaattcaagacaaaaaaaaaaggacaaaaagtcctcaaatcattgccaaatttcacttcgtaaatataatcccaagtttcaaaccgataatatcactttgttttaaagatttttttgagggcgttcttggcatttgaatgcttacaatttgttcatactcttcgtgattctgcgagccgatcgacctggatgcctcgcagtagtcgtcgttcttggcgaacctaccacggacgcgaggccggctatccgcgagggtttttctgcaagcgtactgcagattttttttttaaaaaaaaaatctgagatgtcagtaacgtggtcggcggtgaggtgaaattcgtttgaaatatgggttgggggggggggtgatattttgaatttgaatttgaataatttggaagttcttgcctcaccttgatcttcttgctgaaattcctctcgttcctcttcttgatgtacctgtggatcttttccttcctctcctcgttggagaggcggacggtcttgaagctcgtgtcctccaagctcgtcgtctccgtcgtccccgtcgccggcagccgcgctgggctactcccgcctccgcccatctgtggcaccacgaccaccatggtgaaacggtcatggcgtcatgctgcgcgtgcgcgagaggttcttgcatggcggcaatgtcctacctgcaactctgcggcggcggcgttgccgaaggccatgtcggcgccgtcggcggcgtgggtggcgccgagaagcgcgccgccgcattccatcatccgctggtactcgccgatctcgtccattcccatcatcgacatcaccatgcttccgccgccgccgccggccgcggcgaagaaggcggcctgcgccgcgtgcgcgtccttgctgaagaacgcctcgccggcggcggcggcggcggcggggagcatcgcgccggaatgctgctgctgcgggcagagcgggtcgtccaggcccatgtaccctcccgccccagctccggctccagcggccaacgccgccgcgaagacctcgtcggtgaacccggcgtactgcatcagctcggtggcggtgctgctcagctgcgcctgcagcgccgggtgctccgccgccgcgccgcccatcaccgggagaggcatctgggtgaattgctgctgctgctgatgctccggtggtggtggtggctgcgtctcgtcgacggcggagaacgcgtagtcgtcgatggggaggaggagctcgccgtcggcgccgggcggctcgtcttgctcgaggagagccgagagcgtggagtccagcgacggcagcggcggcgacagggtgtcgccgccgccggcgatgggcgcggtggccgtcgacgacgacgaggcggacgcgtcctccgaggaggccgtgaacatgtccgaccctgccgccgccgccgcgttcaccgccgcgaagaggtcgccgccgttgccgtcgtcgcagaagtcatagatgtgctgcgctatcgggctcgagatgccatcctgcaaaaacaaaaacaaaattcagacaaaaaccatcaaaccaccaactcgtaaccatttctttcttcagaaaaaaaaactgtattcttctacaggcctgtgcaatgcaaacattcatcgccaaaatcctgaattgacaaaacggtgatttacagatttgtattaggctatttaaacccatttctatgattcttttataatctctttttttgcaaggaatcaaatgccatactgttgtatttgcaaattatactgttctatctgaaatctgaaatctctgaagatgtcaagaacagtagaggtataggtccgtatgccgtatgctggggggaatgttactgttaggatcaggcaactaatcaaaaattccaatgcgcaatgtcataaagctcgtggagattaggaagcagaaactatcaagtcgaggcatcgattcccatctgtactgcaagaggtccaaaaagcagaaagattttcgcaggatctggtgcccctttccgctttagtatgatagccacctaacaattattgctctagcaaaatctgatcagagcattagcatttgccaattgccattgctatggaatcctaatatgcatgggcaagcagaatgcaaaataaattatcagaccatatgcatgcagaataacaacagcagaaactgctgaaaacaaccatgctgaaactgactgaagcttgcaaataactgcagaattgagcctaatttgctttcaggagatttacggcgaaaggctcgtcgtcgacgtcgtcgagcatgatggatcttgcaccaaggaatgctctaaattgatactgagaaggtagaggctcatcaacggaatgggaatttgaagaggagaaaagctcacgacccatgctaatggcagtgtgttctatttataagcccatgaacaagaagaccaagcaataatccaggctaattatagagccataagagccggagacctaacaagaactagatgcgaagtaaccgtagcacttaattaggacaaaggacaaatatatttacatgtcacatggtgaaaatgtaagtacatatgcccaaagctaaagaagaaaaaaaaaggggaaaacacctatttttgtgcatgttctatgccgtaattcggctcctaacgaacaattaaaccgccctttgtctctccaagattagtttccccttactcctagatcagtttttgaccgagacgtcgtaattttcttttgcgagaaaaaagggatattgctatctagttgattcaacacatgaacacatgatcattaagagataacagtatgtgatatatataggttttcatttttttaaaaaaaaagaatgaaagagttcatggtcgcacaagatataggattccagttcctattgtctttctttgtaattctgttcgtttgcgatgtactcaaacacctcattacgtcttaatgatgcgtattcgccaaaaaaaagaatgtaagagttttgcctgatatattgtttttttatctctgcaatactgactcgatctcagaaattgtactccctccgtcccataatataagggattttgagtttttacttgtaatgtttgaccacttgtcttattcaattttttttgaaattattatttattttatttgtgacttactttattatccacagtattttaagcacaacttttcattttttatatttgcaaaaaaaattgaataagatgagcggtcaaacgttgcaaacaaaaactcaaaatcccttatattggtacggagggagtagttgattcttgtaggtacaatgagaattgctttgaatatgttattgatgtgcttatctctaatttgatatgctgattcaatggttcaaacggtgtctatcccgggtgaaattttgacccccttttttaaaattttcttgtcaaatatgatacatattaacttatcattgcttcatgaatccggaactaaaaggcggaaagcgaaaagacacactattactttagagacctctgcatacatgcaaggttggtcacatatctaactaagctttggatgtgcgtttatagatatttcaggagaactggatgccaaacgtcatggaaaaaagcagccaagtacatgcatgcctgccagagatgtatatgctcttatgtggcaaattggggctgtaaaatgatgattgatcaataactgtttgcatgcatgaagttgttctctatctaaaagaacaacctggtcattccgtacaaaaagaacacttcatgtaactgaaaaaaaaaatggataagaatagcaagaaactcaggtctcacttgcaggaatagcacacaactcttgcatgcagacatgcagtcatccatgctgtgaagcaaagtcgccgcggcgacgccaagcagatggatgcctgacgaaagaattgaaactattctgattccagactgatcgaatgcatgtctgtcagactgtcaggcgaagatgcacctctatctaatcccacagtgcatatgcatatcgatctccatttgatcatgttcaacgtagtgatcatcggttcgtcgttatatataattgaagtagaaatactagtatccaagttaacaaacacactctgattatttatgcatgtatgcagattttattttttgtgtgtgtgtgtatgtaaaactggcatgcaaaggagttaaaagagagaagttagaagagttacaatggcagaaggcagcatgccgatgaaatcctgatcttgaaacatcatcatcatctctactgatcactgcagaaatgatcactactgtctagctgaaaattttatgtatctatagtctatgagaaatatgtatatgactgaattgggtgaaagggctgagaagaaatggtgtatggaattcaggtgtgtaggagtagtactctgagtgaagtctctgaagtctgcaagccattcagaaggaaccatttgagtatatatagatcatatgagaataaccaaagttgtgtgtgtgtgttgtgggcgtacatggctatagagatttagccctagacgccccccaggctaggtaccatctttggcatctctgaatctatctctaagctagctgcacagcttgtgaaaaaaaatgttctgtccctgacggtgaacagtacgtacacgaaaactcaactgggtttttttcacactgctgctaatggggaatagtgatagtggagatctaggaatctgtttctgctaatgaaaggatggtgtggtatgatatgaggaagcaaatgcttatctgattctgattcaggccaaccctgcacacactgagatgtgtagttgcagtactggtttttctttcttttggtgacagtttgcaactttgcatgacctgctctgtctattgtcggatccctggctgaattttggtgacagaagttaggaaggatcgagtgcggagagttgactatgtcctctagaataatatacaggaaatggattttaagccgagatcacacgctcctttttcttttggcacgcacaacacaacaaatatagtttcggaagaaattcataaaccatggtttattgtgttataatctttccacaaacatgcgtgatcaaatctgatctaaataagcaaaaacagaaatggtaaatacaagtgccaatgcaaaatgcactttttatagtcaatgttgctatttttcttcatatgcagatcgaatttgaccttgattgtacgtcgaaggatttgcaacacaatataaagtatatatttttcaatttaaaaattttaataattatttgcttcacatacaataaacttagagcatgtgcctttgagagcttaaagccaccaacgtacaacacctcggagatatgctcctgtctctgagacaccatgtaccattaagctcgaagctctttctctaagaataagttctcatatacttttttgcttgttggcttatcagccgcaactaaaatttatattttagaacttaattttagaggtaattttaggttatttttcatctattctatttttagctttaattttaaaccactaataacatagatataagttttacgcgtaactttttttccttcgttcgtttttctatggcttttaaaccaacaacttgacacaaatgtgattcttccttacttagtgatagatcactagtgtcgtcttgagcttgatgtgagaaattgttgcattccgctctacccaaactaaaatggacatggagtcaaacacaacacttcaataggttgtgagtgacatgtggggtagtctctaatctaaagaaaaagcactaatgaacccttttagtgggagatatgtctagtaccttgtaagtaacataaaaatgtcatggtcattcctattttgtagagtagaggcacatgtacactgtaaacacatctcttttttgtagtaagaacaataaaaggcgtgtttaggtgtatgcactcctattctagcgcgtatgtcttatccatgctaggcttgacctgattagatgaacgcaaccatgcaagagaggttgcttagttggttagatcaattgggctaggattaaacgagattcaatttggttggttgcatgttggatgaagccgatttcgatcgtctcggtggttgcatctactgatcatgcacgggttacctcttccaagttccaacaggtgatgaggtatcactccaataaaaaaattggtcaactaggaaaattcatcaattctaaaccccttttctcaagttcccatggaacagtgtcgatgctaaaaaaaatgaggtcttctgttaagaatatgtcaatatacaaaagtaaatttcactttaagcaatgtctattgaattattgaccaaaatagcataatagataagggctagacccatcttttcaattgacgctaggaatttcgccattcgttgggaggggactccaccgccaatgctctttgctcaattcgcatgccagtggctctctatctagagtaggagagcaagcgatcaatctaacgctcctctctctagctatgcattgatattgaatgagtagtagttgcccatggctaacaacgaccggagctataccaaggaagctcaccagtcgataacggtggtggtgctaagcccaggaagaagaattgcatgattatacagcggaaagaaaatcgtatcttcaacgtccacagcgtgcatccacattatcatagtaaaatacaactcttttatatgacaatgattatcatcaaacccttatcagagccaaggaaaataagctaagttttagctgaacaagtggagacaggagatagaaacttcgaaaaattgaaataagaaggtcctaaaatatattgtaacacattggcatggattgaaataaacattgccctaatttgttaggcatgtgccatcacccatcttgcacttatcagccatgtcgtttggcatatgttgattataagccgtaatggcttatgagtgataaaaataattcgttatatatatatatatatatatatatatatatatatatatatatatatatatatatatatatatatatatatgacactaaaagctaatgctgaaaaataaactacaattaaaaaaatcttccaaaatcaacttcaagattaaaatttaaaatttaaatttgataatggcttgtaagcggaaggacaaatgatagggcttttagtttttgtaccttactgtaatttgagaaagtcactctatccaattgctcatactatggggctgtttggatgggactaaaaattttagtccatgtcacatcggatgtttagacactaattaggagtattaaacgtagactattgacaaaacctatttcataaccctgaactaattcacgagacgaatctattgagcataattaatccatgattagcctatgtgatgctatagtaaacatgtgctaattatggattatttaggcttaaaaaattgtcacgcgaattagttctcatttatgtaattagttttgtaagtagtatatgtttaatactctaaattagtgtccaaatatccgatgtgacagggactaaagttttagtccctaaatccaaacaccacctatagttgctagcttagaggcttgtgcgttacaatggaaaacaaaatcagtttctacctcattagatcaattaattagcatttatttaccaagtaatatgatgatttttcttattaacaagtaggtgattttgaaatttgaggagatccaatagtaaaataggagatgactcataaagatggtgtaatagtacagattaggggacccacatatcaatggtagtgatgatgtgggaaaggacacccactattataacattttaagtagtaaagagtatagatatttgaaagtattttttcaaaaaattgtggaaagttgtatactacctaataccattacatatagccagttttattatagagtactagtatcataaatatcagagtactatgcattagtgttcgacacctaaggcggtgcaaaatctgccaaagaactagatcaacgtgctgattaggcaggtgtcaatccatcgagaattcgatcgatcgagagagagagagagagatcgatgcataatctaatcaccaaatggtatgtaccgagcggagccccccgattcaccaccgttttcaccatcaccggctcacgtacatatagcagagtctaaccgtgcgtgccgatcgatgagcgcgagcgatatgatccagcgcccacgacgatcgatcgacatgccgctgctccagtgggggaatccggtcggccgcccgcgtctcgtcacgtcgatcacctacgcgaatactcctacgcgataccagtagtgtagtactaggcataagccgccgcacgcgctccctactcgtacgtcgtctctcggatcggtagctaattaagctagctaagctaggtagccgcggccgggcagagtagacgatcgagtagctgagatgcgaatgcatcgttgcggcatccggccgggcgggcgtttcgtgcggtcaccgccgtgagattactggcgatctcggggagatatatttgttgggatcctgggtagaaaagcctcggcccttttgtctacctagccaagcatctccagctaaatttagccatgagtaggagagtaccatgctatatggtgtaggagacctgcactgcataatatacatgagttcaacacactaatgagttatattttcaagcaataatgagttatattacaagcatatgtgtgttagagatcataacccggatcgaaggaagcgtgaatcaactgtacgatctcaaattaagctaatccatttcttcacactaggaacaaattaaaccattaattgcaggtgtactgtacacacctgcaagtgaggaaaggattaaggatcaaaggaaccacgtacgcgcgagatggatgcgatggcggcgtgtaatgtccaagattaaaaatcaatcctgtcagcaacacaacaacaattagcacccaaaggatattacattagtccatgagatcgaacagataaagctataccttagcctaccagacagaactaatgcccatcagtcccccaaaagcagcttcctccccctcttgtcacccccatgagggcttatcttccagcttagcttagcttagctttgccatagctagccatgcattgcacggcccgtgcacaacacacatccatcaatcgtgattcttcacaacgttcttcacaacgccatgcacgctagctagtacccttttgcaagtagctaggtagatacatatatacctctgataggaatcttgtatccgttcgtcaataggccaaatcgccgtgggccagctgccgactacactagctttttaccattgcgtatagtagcatgtttaatgcagtaaggcatacgtcgaacctgtgtttgctgtcgcctgccgaaacgtatagaaggcgatcgaaagtatggtgtctgagatcgaaagtgcaggagtagtgttagctttaccactagctatggaatgtgcataggccaaaccgggggatctgactgtcgccgctttgccgcaacaccggcacacaccgctacgtcgatcatcctcgcgcgcgattcccggatttcttccacgtagagaggccgggtagctaaggataatttggtggagaccggatgcaagccccgtcttctacagcccagctctggattattgacgcgtggatgatgtattgatcggacggggcgctccgctcggctccaggctcacccgagcccgatctatgcgcatgcggctgatggcgcttgatccgtcccggctcgatctgagcgtgagcggctcatgagcaggaggacgccgcctgcccgttcgccgtcaatcctcgttcaacctccatattgagggagtcgttgtcgctttctgcctccaccccgggttgccaccgcctaccaggctaccaccgctgctctaccaagtagcgttagatgtgcagcttgtcaccgtcggcggcgtcgaggagaagcatgcgccggactatggcaagaatgggtcaatggacacaagaagccatgacggccgcgaaggtggacatgggaaggaggttgtctcgtattactggccaagggaaagatggagaattacagatgttttggacattttcgaagctgctgctgtcgttgattgcaggaggtgaacatcgatcgaggagcagccgctgctccggctgttcttgaattcttgatggggattggggaagatgaagatgagcctgcgcgactgctgccggccctactggggagtggggatacgtcgagctcgtcaccacattcgaagataattgatgtaaaccaaattgtggctcaaaatcataaattgattggtgtcagtgtcagatgtgcatgccgatgctatgatgtagtctgacatcgttgttttgaattttgattttcagaacaacacgacgacacaccgcacacagcacaggctagcggcgagtacggtggtacggccaccgcgtgcacatccatctacaagctcgagctcccctcgccggcccgttgtcacgatgatgccgacgccgctgtcgccgccatcgagccgcgggaggccatgaacgtggattcgaaggcgtcctacctcatccagatcaagaaccccgagcagccgccatcctccgatggtcgtggcggtgacaagatcaagccgcgcgggcccagatcaagccgggatgggacggatcgagcctcgagctccatcagccgcacgcgcatagatcgggctcgggtgagcctggagccgagcggagcgccccgtccgatagtccgatcgatacatcatccacgcgtcaataatccagagcagggctgcagaagaaggggcttgcatccggtctccaccaaaattttttccggagccgtgtgtgcgcgcgagctgttgatgcggtgtgtttttctcgcgcaaaacatggtggaatcgcgcgcgcgcacacgcgcacggccggatgggggccggggccatatatatggcacggcccgatcgtgtactcatgtcggctcaaggccgtgcgccggcccgcgcgagcgtgcgtaggcgggagcggaaaagggagtacctatgcatctttcgaaatatttttataatcgtatcacacagatttttaatctttagattaaaatctgatagatataataaaaagcaaaaagcaattaagaaacaccataatggacactaaattaccatatcctcaagaaaaagaccaaatccaatacaaaatttaaaatttacatgcgaagattcaaaaattacagtgtaacttacaaaagttacagtgtaagtttcataaattacactgtaacttacaagaaaatgcactgtaaatttgagtgagaaaatcgagtgagagataagaaaaaatctttcgtgtgagatatagcaaaatcgagcggaaaatatgtggacctgtttggtacagcttcaactcttaaatttagctctaggagttgggtctggagtggagttgtggagctgcctaaacccagctcaacaactctagttcattttgtgagagagctccacctagggaagctgaaactgtttggctgagctccagctccacccctgctaaacaggcccatacggagcactacgggtctatttgataaagtttcaactctaaaatttagcttaaatggttgggtacagagtaaattcatagagcagcttaaatccagtttcacatctcgttttgttttattgagaatgttccatctagctccgctttatatagagctgaaactgtttggttggactttagctccaaaaggcactacatctcgtgaagcctagatatcaggatggcgatgcggttcaggtttcagctgtgagagaggggccgtgtacatgtcaacatggatgcacaggatcagttgcgactttgtgcctttaggggtgggtcatgctgtgaggtgtcgatgcacatcgacagggcgagatgcagggaggcgagatgcatggtgtcccgtttattaccatcactaggtgaaactccgtgcatttctgcgagaatttagtatgataacaataaaaaaaataacgtgtaaaatagctatataacatcagattaagtgaattaatgtggtttatgataatttaaatttaaatagtatgtagaatggtgattcaaacgtaaaaagtaaggtggtatgactttatggaagaagaaaaatatggagatagtttggacagtagattaattatctaaaggctaaaaacaattgatgtgatatgacttaattagaggaaaaaaggagaagataatttggaccatagattaatcatttaagcactaagtgaggatgaactatatacctatatcataaaacataataaatatatacattgaaacattatgtgaattatgttggatgataatttaacatttttgtatttgaaaagctcttaaattataaaaactataaagatatagcatatttgcatgatgtttaaatgtgatgattgttagtggatgatgatgtggcatcttgttaattagtagatgatgatgtggcatctttgcatgttaaggttatggagttagtgggggataactttatagtaagataggattcccttcaagcctgtacgatgatactccttgaagatttttggctgtgttcggtagtttgggatgaaaactaatccctctcatatataaaacgatgtgactcattagtacataattaactaagtattagtattttaataatttttccatagatttttttttgaaaaaacacaatctatactctctataaagttacaacccactaactctaatgcttaatatgcaaccatgccacattatcacccactagcaataattacatactcaatctcattcaagcatgcaacatcatctacaatctatttaattctacaaatcattatgtatagtataaatccaatcatcacccctcacatcatttccacaatatttttacaaacctatcaatcattcttatgatatttaacataaacttatcaattaaagtgtgagttttatttgtttgtttcatgataaaaactgataagccttggtatttcatttattttttttacccctagcttgattgtagtgaaaatatatatattaaaaattaattttcacatcaaagcgctgaaaatcaactgtctttagcaaattgagaaccgtgcgtggggtagaggaggggagaagctgagaaacggtatcgtaggtaccgcctacgtagccgtgttcggccagatatttcacaagcctacaacatctatagcccacgaagtatttttcaggacccaaaatgcggcccaccaaacttagccggcccacgcagttaaagcccaatcacccaatggaaacggttcaacttgcgcgaccgatttcaggcaccgcgagtggaccacggcggaaggaggagccgcacaagcgacgagattttcgcccccgcttcggattaaaaccctagccggctaaacctgctccgctcccccccgccgccgccggcgccgccgccaccaccactgccggagagagagagagctgcctgggaggagcagcctcggtgcgcgcgcgcgcgctaatcccctcctccactctccgtcgccgccgccgccgcagccatgatctgcgcaagtaagcttctctcactgtctctccgaaaccctagctgttctctccgtgcgtgcgctgatttgtggcctccgcctgttgtgaagtctccggcgaggtgccggatgagccggtggtgtcgaagaagtccgggcttctcttcgagcggcggctcgtcgagcgctacatcgaggtcggttagggttattatagcttccgtgggtttagatctcgcgtcgcatttgtgtgtcgtgctttgagctgatgtttcttgtggtggtcatggtcgtggccatggcgcaggaccatgggaagtgcccagtcaccaaggaggagctcaccatggacgacatcgtggcggtgaagaccaacaaggtaaggcttcgctggaatgctgagaaaattattgtggagtggcaggcttcagcagcgtgtggcgtggatttacctatgttttgtacaagtaactgatggtgctataccttttagctgaaaaacttgcataatcctcaaggcctcaatcatgttatactatttgcaggttgtgaagcccagacaattgcaggctgcaagcattcccggactcctggggatgttccaaaatgtaagtggttccactaacttcatagttatctgtgttatagacagtgaagatctgattctttttctttgataatagttctcacattgttttgtttattaaatgtatagtttgttaatttaaaactgtacctgaaagtactttttatctgatgtttgaattaaagataaacacgttgcataataattgggaatgattcagtgttaagtgtctttctccattgcacaccagccagtttgacagaacttaatgcgctgtttccaagcatagtcaggttactagagggagtaaactaatcttcataattggagcttggcaaactgcctgctcattggttatgtttaaagcagattcagagattctgtggtagagttaaatttctggtctttgtttcctaaaatttgcatcgccctcagtttaaatgatctcatgtaactattaggaagagtaatatagtacagtgccttgattttgccacaaataatcatggaactaaaaatgtcttgtgagaacccatcatgattcaccctagctctcactagaacaataccatggcttttacaggagtgggatgctatcatgctttctagttttgctttggagcagcagcttcatacagcaagacaagaacttagtcatgcgctatatcaggtatgtcttttacctatgcagaatttctattacatattgtatcatgttaagtacaaaatcttcccttttcttttgacaaactatgaatgttattatagttctacatatgctagcagctttagctgatgaaggatctgctcagaggattttgagcttttccataggtctattgttggggcatgttagattgctatggaacagtgctctcttttaggaactctggtggccattttgtatttgtgtatggttagagcagatgcagtaggatgttgaacgtccttacataataaaaattcgaatttttatttagaaatgctacttgactcttgattctagatgaatttatccctgtaatcagcactgttgattcccaatcttgagtcactcttttgactcttgataaactaccccctccatccaaaatatagcaacttcacctattccttcatctcaaccaatcacacaaccatctctcatttaatatctccacatacttcctcatatccactaattacagccatacctcattaaattccacctactttcttaatctccctcaaaagctctagaaaaccttatattttgggacggagggagtatcgtctttcttcttcttctttttttgtatttgacatttgtcttttttttatcctgctggtgcttgtgccttttcacttatagtaccgaagatggctaatgatgatttacagattatttttccttctatgcttcttgttgtgcatatgtacaaggtatagttgttggcttatttcctggcactaatcctgtggtgaagtgggcaacaatgttagccctgatctgtttacccatctaactaaagttcgctaatctgcaaatgaccactagttttgtacgggcattgttaagttgactgttaaatatctatccttgttcctgctcctgttcgagttgtactgcaatttatattttcataagctgaagaaaaaatgcttataaaatcaatcattcactgaccagtctagaaatgtgtgatgctgttctgggttcttgtgcataccatataactggtgatatttaggttgtttttttgctctaggcagtctggtttgagcttgaaaacaatagccctgtttggagaactagccaaaagttattttgagagctattttttagcacaaggaaatagccctccaataaaatagccctaagttgtttggatcaaagggttattttgagagctatttggcctttaatgtagcttcccatggagagagatagagagaagacactttttcagtgggcccccacccgaaatagccccaattagcaccccttgggtgggatagttttttttgggtgggttatttccaaatagccctcaaatagctcacccttttggatctttttgggctatttgggctattggagggagggctaaaaaatatcccttggatccaaacagggccaatgaagtattattactgcaagttgatatgttaaaaaactacttgtaagttattgaggaaaaggtctgaagtaccaagctttgttaaggcattgcttgtctttacagctacatttttttttcagcgcttgattaaacagctctattatgggttaaatgctgaataccgttttaatgaaatgctcttttagttaacacttttgcttttaagaacattcattatcctgtaatctgatctgtttagttgttttatgtcccttttccagcatgatgctgcctgccgtgttatagctagattaaagaaagaacgagatgaagccagagcacttttggctcaagctgagagacagattcctgcatcgatggcaggagctgcacctacagctgttgtctccaacgggaaaagaggtacctactttctgactgtttgaagttgttgaagtaaatttctacatataatttcagccttctcatagttctgcattgttggattcagcatttgaagatgaagttggaccagacgggaagaagattcgtcctggtatcaaccctgtgatgattgatgaactaacagagtgtaataccatgctctctgcgcatcgtaagaaacgacaggtacatatctgtattcatagttatgctacaaacaaggtctaaaacatgcattaatgtttttatccaatagttaagattatctcaagaatgctagctcatctcgccaggacattatttctcagtgtttgttgccatctttacaccttacttttgaaatgagataacagttctctacattttctcacaggttcctccaactttggcatcaattgatgcaattgagagatatacccagatctccagtcatccacttcacaagacaaacaaaccaggcatcttatctatggatattcatccttcaaaggtctgtcttttatgtttttagtgtaccttgctttgaatatcatatactctgtggtcttatccttttcagttcaattaggtgtaagatttcacattaattgaataattatatcactaatacttctatttgtacctgcaacatgatgctctcctgaaaagcttggttcacatgtagtttgttttattttgtaatctgtttgattcgtcttggatttaatgttgataatttgatggcaaacggtgatttaaacacttattattttactttgttcttattctggattaacaggacattattgcaactggtggcattgatacaaacgcagtgctttttgacaggccatccggtcaaatcttgtgcacacttactggtcactcaaagaaggttttccctcattttattttgatgatttagatgcactcaattgatttttaatctatctctaaaatttatgttaacattggaaccttcatatatatagataaccagtttgaaatttgttcctcgggatgagctctttgtaactggatcagcagataaggtatgccattctctgatagattaattagtcacataaatttgatgcaataatcaagttttgattttgctagtaaaattgattgcatcatttcctgcagtacttgattaggttgagcatgtttgcagtcactggtccgactatctgatgattaggttgtgctgtttattcttctctgagttgtttgcaaattatgcagactgttaaaatttggcaaggaagcgaggagggaaattacaattgcatccatacattgaaagatcacactgccgaggttagcaattgcgtggatattcttctgcaaaataacttcacattctttgccattttatgtttttggatattggaattacagattgctggatagctggtattcttcttgcatgcatacagtcatatttcctttctgtggcttctaaatttctgttacagtaaaattgaaaatatttatgaaatttctatctatcaaggatttgtcacaaatatgattataacacattttggcatgttgagctatgatactcaaaactcaagtcatactgcaaatgcagttctttcatcaaattttctttatcatttgtaccgtaagctactctggtccattcatgtttcacagttacaaaacatgtgaaaatgccccaccattgtccttaaaggccctcttcacagttacaaaacatgtgaacatgccccatcattgcccttaaggcccttgttctttacagattattctctgcactggattattgaaatggattatttgctatatactttggaaaatacatcttctcaaaaaaatttcttttgctgcatttcttagataacttattttaagctatttattgagtttatttttaaaaatatttaatttatatagataatccatggtaataactcagtaatataaatcaaacagggcaacttttaccatattttatattgtaatatttcaattggtaatataaaatgtttcaattcaaattctattgtttcaaacttatttgttttacaaaaatctgtcaggttgaagctgttacagtccatgcgactcagaagtactttgtgactgcttccaaggataatacttggtgcttctacgatattccatcaggatcttgcctcacacaggtttactccattatctttctcatgtaacctgctcccattcatccatgtacttatacatgctttgtctgttagctcccaagatgtttatgagttaatgaataccttttctttactcaggttggcgagtcttcaggacaagagggatatacatctgcatctttccacccagatggtcttatcctggggacagggaccactgaagctgttgtcaaaatttgggatgtgaagacgcaggtgtgatacttcggcaactcattcaagttcttttttcaggtgttcatgcatgtctgctcttgaaataccttgctaacaatcatcttttttctctagtcaaatgttgcaaagtttgaggggcatgttggaccagtgactgctatgtccttctctgaaaatggttacttccttgcggtatgaatctctccatagtgcaatctgcaaaatgttgactttcttttttattgtgatatatgtatcatcactgtacagactgctgctctcgatggagtcaagctttgggatcttcgaaaattaagaaactttaggacgatatcaccttatgactcagacacgccaacaaattctggtaaggaactttgcgcatgctccacactcacagtaaattgtgaatggtgcatgtgcttcgatgtgtgtatagatatagccaacaagcgagattatgttgatcattcaccctagatatatcttgctttctaggattttgattgtagctggaaggacatctcattccatttttgttatttgtactggagttccattaatcatatgatgcatgaatgtttttttgtttatcttacagtggaatttgactttagcggaagttatctagctgttggtggttcagatacaaggtattttctcaaaacctgcaagtctgaccttttggtgcaaatgttataccgtaaacttttatatttgatacctcctctgtttggccttcagggtttaccaagtagcaaatgttaagcttgaatggaatcttgtcaagaccttaccagatttgtcaggcacaggttcgtccctttcttatggcccacattctcggttcgtgattggcatctgtgcttgcacttaactaatttggtttctgtggcgtacacttttctcagggaaagtgacaaacgtcaagtttggcaccgatgcgaagtacattgccgtaggttctatggatcgtaacctacggatatttgggcatccgggagaagatgatcaaatggacgacgcaaagccatcggaagagtgatgaaaccaattgtacttcatttggcctgcgtaaattgctccctgtttgtgtgttttgacggtggatgagctggctgagattggaggcacataacaacgggagacgagaagttccttgcaggagcaatttggtgggctttggtcgatgtaaacaaatttgacattgttattgtatttgtaggccttactacctaatgaggatacggtttgttttggagatgaatacaatgctgaagtgctcgacttgcggacatgccaatgaaatctagaatgtgtttaaatttgtggttacgtaatgtccatgcactaacgctcgtttattcatttctcaaagttgctggcgcgatattaaggaatggtttgatggttaactaattagtcgtctaatctgagaaatctggcagcatccgaattaccttgaacagtacatcaaggcagactaagtatattgaggacctttccgtgccaccgacaagcgtggtcacataagctcactgaaatgtgggcaaggagggtaaatcctcaatttcaaacaaaagaataatgaggactctcccgtgccactaacatgtggggtcataacaagctcaatgaaatgtgggccaggaaggtaaatccttatatgtgatcaaattttaattcaaagatcaaactatggccgttggatataaatcggatggtggatgaaatatgttctggcatgggctgaaattgtcgagtggatcagtaatgggcctcgtgtgggcctcaactaaaaccctaacaaagagagaggcgcagccatcccactcacagacacacaacaagtcgattcgatccatcccggaggatcctccgccgccgccgtgccggagcgccgccgccgccgccgtcgtaccggaggtaccactccctcccctctcacatagcagccccccttcccgtcttcacctaggtcggattagctcgtggtgctctccctctctcctcgttggttctagttactctggtggtttagggcgtagagggtgtggaggggatcgggttggttgattgcgcttttttttctgtgatgtttttccttctgtgctccgtatcaaatagattgaagtgataatatgtgattcttgtggaaatgggtatggttgaaaccgctatgtccttaagagagagattggtaaggaactctgaaaccgctgtgccttaagagaattgatatgaatatataattgaagtgctaaaataaggatagtttgtagctttctttctttcaaacagctcatcattttcagggtttcggtgctgatttacctttctatagtgaagtcccttgtataatgcagcatagaggtgacaggagacgatgaaagtactcctttctgaagttttaactcctgagaggcattagaagctgtgtaaattaatgacaagttttttcattcaataatagagaagttctctaggagaatgccaacaataaactcccttgtataatagaagtctgatgttgcgttcgagttatcaacaaatatttctctgacttctctttcatgttatttcctgctggtttttgttgaacattaatggttttgatggagggtcttgtttcggttcagatcttcataagcctacggcatggcaaccactctgaaagatgcagttgcacggaagcctgtgttggcaacaatccgccttatcgttccagctggtgccgcccgccctgcgccaccagttggtccagcgctaggtttctacaggctgaacctgatggcgttctgcaaggatttcaatgccaggactcagaagtataaggcagaaactcctatgcaggttaccttaactgcctacaaggacagcacattcgagtttgtagtcaagtcaccatctgtctcatggttcctcaagaaggccgccgggattgagacagccagcggccgtccagggcacactgtagtgtcatccctttcacttcgccatgtctacgagatcgcgaaattgaagcaatctgatccctactgcaagcacatgtcactcgaggcgctgtgcaagtcaatcattggcacagccaactccatgggcattgagattgttaaagatctatgagctgcttggccccatctttgtcatgaggggagttggtgagttgcttaatgattttgtgtattactaatttttagttggggaagtaaattgtgtcctggtttattgagcagagatcttgagagttccatgcctctgaaattgccttcagcacagccttttttctctctgcaattctgatctgaaacatgtagttcccacaaatcgttctcaccgatgtcaatttgttcaatgtggtgatggtacaatgaaaataatagatttctctgatgatggactcatcaagtctgggtgaacctttgagtgaacaacctgtaatgcagcatttgctcatataagcaggatagttttccagttaatctgtgattcttccggaaatctggtcataagattcatctagcttgccttccactgcccattatgatgtgcttgcagtttcaactttaatccaaatcttcacgctgttttactacaaagaactcaatgagtaggttgtcgggtttttccaggtttttctttcttttttttttttaaaaaaaatcctccattctacaacctacattcattgttcatcttgctgtccaagtgagtttaagagaaaccgagcaaatttattttttgttcatgtgagttgaagagaaaccgagcaaaaattactttttgttcttctttgaaaagtcatcttgctgtccaagtgagttcaagagaaaccaagcaaatttaatttttgttcatatgagttgaagagaaaccgtgcaaaaattactttttgttcttttttgaaaaggaaatcgaacaaatttactttttgttcacctagtgagttgaagaccgaacaaaattactttctgttattttctaaaaaaaggaaatcgagcaaaaattacttggtagaaaacattcactgggagatcaaacgaatgtattccccagaagttcaaattcgtatacattaatctgactgccctttatctgagataaaaatgaactagaagaacagaatctattcacccagtagcggcttgttttcgggttggctctaattcataaatagacatacattcaattaaggatgcagttctcgtttacaatgaacacatttgtgccagttgaaattgatactcttcgtgcataccaaactagctggaacagtctttttttctgcttctccaaggttatgattgtacatgtttgggtactgggaccaaacagtagaaaatatgatctatccattgctgatatgttcaagcacaagatattgcagtgctattgagtacttggctgctcttccttccctggacccacaatctgaactgctaatgctcttgagtatgtaggatccatgcccatcacctaaggaagccaaattaaatcgtgcaaacataacgggaagaaacaaaaagatttagattgatagccatgaactatcatagactagaaactgacatagcacaaagaaatgaaacaaataaagtgaatcagtcatttacagttttggacaatttagttggtattcatagcagtctcatcaaacaaaactttctaagacggatacaaactaaaatgagaagtatcttgactgtcatgccatctatgtaagtgcagtgaatgaaaccaagagggtatctcatctatatattttgttactacagtgaatgaaccaagagggtacctcatcaaataagatttcaaagatggatataaaatgcaacgagtaaatgtccaaactaaaaagaattatatgcaagcacaagatgttctctgttaatgtgaaacaaagagccgatgaatagcaatagaaacaaaaggtttacttaacaaaatatgggtgaacaataaaatgacaaccggcactgtacatcagatatcttgtaagatttaccttggattgtatatattgaacttatccacctcttgtaaatgaacatggatcttggggtgtcaccttgatgaacatcagagagcaagagattacaagacccagggactccgagctttgtgctaggatagagattgagatgtttattctcaggaacataggaacatgcagaagtttaaagatctggcattgaatttatcactcactttgcatgcgcaacagcattttgacacagagctaatatgcgaaccactgctagatcccgagccctagcatttgcatatctttgctgacagctcctatagtttcagtattgtcagaactagtcataccaaaaattgggaatgcacaccatacataattcaagtcaattactatagtgtataaagttctcgctttgatgatgtagatcaaacctagttttctcagaaagatcagaaaatccctaaaataaatttgtgcagcaggtggtctaatgcatcattcagtagaacaactaatagccatatcataatggagcatacagacctaacagaagtctacaccaaacattctgcacgtaaggacttggatcatcattatcacaactacaggtgcccagaattctcagctgagattattgagaccaaaaaaaaaaaaatctagaatgatcaagcaggacgacaagacaaaattaaaaacacacctttctgagaagaaatctgcaaaatcatcaataattactgcagcagggaagctgccaagcagatgaaatgccgcgaagtactttctgatgccctcatcatcttcaatgtatctacaagcacggagtacataaattagagcataaatccccatctttttgtcatgaagtaacacaaataggcatttcaatacgatcacagaccatatgcttagctgacaatagcatgcaaatctcacaaatcatcaatagtaaataaaatgtaactagagagatctcatacttgatatggattctctgaagcacgctgtgtgatagatcaataccctgaaagaaagaaataagagtaagatttagcttcacaaatgaggagcaggtgagattttgtaacccaagattccagagcacgagtagagaacaatcgctcacctgggacaagaacggggggctattctccagtctccccttcctgcagatgaacaccacgcctcgtccactctccgtcgcgcggtttatcgcgaactggaagagaagcgacgtcttcccgctgttctagcaccaggagaggcggcgaaatcggagcaagagcggagtgagccaagccgcagcatcggggatgggacacggaacgcacgggattcgacaaacagcttcggtttgattcatggtggaaaaggagctgtgagacgagagtacgagacgcgtaccagcacgaagggcccgagacgagggtgatgtcagcgttctcgggcgccggcggccgggtggcgcccgtgcaggagaagaacctgtgcacca

SEQ ID NO: 9537 - DNA, 47880 bp, Oryza sativa
ataaaataattaaaggaattaagttttgatttgattaataaaattaaatagatataagggagaagtgtaaacttataaaataaatatggtagaaccaaagcatctagaataaagttcatgaaagatattcctaattacttaattaaatcaactttgaaattaccattttaccctcctatttttttcctttttcctttccccgtttcttttaggcaaaatttgatacaggacaatcaaaaatcgtgtaattggctgagagacaccaaaaaatgtgacactgccgatggacactacaaaagttgtgtaattagttataggacaccgaagggattattttataattttcgggctaaaagaggggagagaaatttcgaattgacgggaatgtcccctctactccttcctcatggccgccatcaagcgctcccaggccaccttccacttctaccactaggccaccaccgcccagactcccgccgccgtcaaggtcgtcagccgcgtctttgccgaggccggattccgtagcggggacatcaagctcaccatcctccgcccggctccatccatgccgctcctcggccgcctccccacgcgcacccgcccacagcctcgccgacgagtatgcctccttggcacccttcaccgccacctacggcaccacatcaccgccgccggcgtcgtccttcttcactgtctgaaagccctgcacggcgccgccgacgttcagcatgttggcgaggccgatgggcacgaagctgatccgccgctccaacaagagctcgtaggtgaacggctcgagggtgagctcgaaggactcgttgcggcggagcagctgaagcttctgtgcctccacgaagtagacggtgaagcagtcgacaccgtcgccgttgccgccaccgcttccgtgcctccacgaagtaggcggtgaagcagtcgacgccgtcgcctttgccgccgccgccatgcctccactcggacttgtgcctgtatagctcgttaattcatcttctcctctctccttcacatttgtttctaggtagcttacttgctctaagcgatgataaattagtaatattcaattatccaccaaatgagcaattaattaccacatgactactgatatacaaacacagtccatctccttggtattcactattacataaaagcacttatgtgccgcttgggaaccgatcataggtaccggatatcccaaccggcactcagcaagtggcacagatgactttagtttggccatttgttgcattaattttgacaaacccatctagtagtcacatgcatgcaaagagattaattattacctccatatcaaagtacatgtcactcttaagtatgatttatcccatcacatttcatttaaatttctctctattctacccccccccccctaccactacactctaaccattacttccttcggccactcactaaggcgcacacatattttaaattgtaactctttaatatttgatctgcaagactttattataaattaaatttatttgatgaaaattatattattggattgtcatctatatttacttttatatgatatgattttgctgttacaaacattataatatatgagaaatttaaagtcaacgattttttttttttagtgcatcaggtctgaccgggtcttagtgagtgggagagaacgagtatcatttaaggatagtataaccgtctcttaaactttaatctatgctaaactgctaagttattcagaatgacggatgaattatctgagagacagatcgatgttgaaccatcctgtcaccttctgctagcttttgcaacagtagttaattactactccctccatcctataatataataagttttaaagttagacacggttactaggtagaagtgaatggtggagggttgtaattggattagtagtaaaggtaggtgggaaaaatgaacgatggagagttgtgattggttgagaagagaatattggtagagaagttgttatattttaggataaattctgagagctaaaagttgttatattttggaacggatggactacttcattatagcccatagttagactgatgattgactaattgttagagcaaggtttatagtatagccagctaaaagctataaaaataaccacatcagcaaattatagttagtgctaatagctagtgcatacaatagagatctactatcttctattgctacacagttcccatcaaccatgaacaaatgcattcggtagaatgaggtgaccccacccagcttcttgcgttgccatagcgtgcagccaacagcacttaaatgctttgccttggatagagtgagcagctagcgactaattagtcgcctgtttaatctctctcaccacctttttcacctccagctaagcatcaacgctgacatggtcatcctatcgccagcatctaccgtcttactgtacctgctctaagtacatgtgtgacagctcaggcatgtctcccgttctgctggacacgcatgattcagctgaagaaaaaaattgatataattggagcttttcctgctatcataccacgcttgcagttatgagctcgctaatccgagtacaactcgcagcatattctacacacgcaatatatctatctattatattattaaagaaatagaaaaagaagcttccacgttcactctcatggcttagaaattctcacattaatcggagaaaaaaaaaagcagagtccatatagaaatacaatttagaaaatagctgaaattcgaaattaaaaaaataaggaatattagaacataatagagtctatacaggaatttaaaactaactaaaatttggaataaacataataaaattaaaagtagagtttagagtccgtataaaaatacaatttacaaataactaaaattcaaaattaataaaaacatgggaagaagagtttaaagtcaatataggaatacaatttaaaagtaactcaaattcgaaattaaaaattaaagaatattgaaagatgagtttagagtccacatagaaatacaattagaaataataaaaattcataaataaaaataaataatattggaagaagagcgtagagtctatatagaaatataatttataaaaaattcggaattaaaaaatattaaaatacgagtctagagtccatatagaaatatatataatttacaaataactaaaatttgatattaaaaataattaataactaacacgtatataaaatacaatatgaatattactacacattagtagttttgtaaagttattgcaaaatttaaaattatgttgtcattttaatatatttgaataatataatgagaaaacatatatgctattatatgagagaaaatataatgatgctaaccgcgcaatctgtgtaggccaccatgctagtttataagtataacaacaacaataatagtccttgcacccacatgatggtgactagttagattaagcaaagtcttcttaaaacaaagaatgagtagtgataaaccaaataaatcgatcaataagacataaatgaccaagttggctgttaattaaacaaacatcatcacgtacgtactccccgtgaactcgtagtaggtataccggacggaacatgagtcagccattctattagatctgtcctcggaagatggaatccatgcaaaaaaaaaaaattcaccgacctgcacagccggagacgatcagctcgatatatcgatcgtgtcttcctccgtgtgtctgctcgctacgtacgcctctgccatgaaagaaccgactgcccgcatggccggcgtcgtccaccgtttcctcctcctcctcctcttcgtggcggccgccgtcatgccagcatcaaccaatgccgcagcgtcgtcgcagaccgacgcgctgctggcatggaaggccagcctgaccgacgtggccgcgctgtccgcctggacgcgcgccgcgccggtctgcggctggcgtggcgtggcctgcgacgccgccggcctcgtcgcgaggctgcggctcccgagcttgggcctccgcggcggcctcgatgagctcgacttcgcggcgctcccggcgctcaccgaactcgacctcaacgggaataacttcaccggcgccatcccggccagcatctcgcggttggtatccctcgcgtcgcttgacctcggcaacaacgggttcgtcggctccatcccgtcgcagatcggcgacctctccggcctcgtcgagctccgcctctacaacaacaacttcgtcggcaacatcccgcaccagctcagctggctccccaagattacccacttcgacctagggaataattggctgaccaacccggattatcgcaagttctcgacgatgcccaccgtcaagttcctgtcgctctttgccaactccctcaacggcagcttcccggagttcttcctcaggagcagcagcatcacctacctcgacctgtcgctgaacaatttctctgggtcaataccagacttgctgccagagaagctcccgaatctgacgcacctcaacttgtccatcaatgcgttctccggccgaattccggactcgctcaggaggttgacgaagctctagcatctgcgaattgagtacaacaatcccaccggtggcatccccaagttcctcgggtcgatggggcagttgagagttcttgtacttggcaacaacccgctcggcggtccgatcccgccggttcttggccagctccagatgctggaggagctccaagtaatggccgccgagcttgtttcaactctgccattgcagttggccgatcttatgaatctctctgtcctgaaccttgcctataacaagctctccggtaacttgccgctggcattcgcccggctgcaggcaatgagggtgttcagaatctcatccaacaatctcacgggtgatatcccgagctcgaattcttcggtgtggacagcaacatgttcactggaaatatcccaccagagcttggtaaggcaaggaaactgaatatgctgtccatgtacgacaatagattatccggcagcattcctccggcattggggagcttgacaagcttgaagtatcttgatctgtcagcgaataatctgacaggaggcattccatatgagttgggtcatctcagcaatttgcaattcctcaatcttagccataactccatttcggggccaattatgggaaatttgggaaacaatttcaagctgcagggagttggttcatcagggaattcctccaattgcagctctggctcagcattctgcaggctgctctccctcgagaatctagacctttcaaacaacaagctcactggtaagctgcccgactgctggtggaacctgcagaatctgcagttcatggacctctcccacaacgacttctcaggtgaaatctctgcactcgggacaagctacaattgttctcttcattcggtatatcttgctggcaacggtttcactggagtttttccatcaactttagagggatgtaagacactggtctccttagattttgggaataacaagttcttcggtaatattcctccttggattgggaaaggatttccttcgatgaggattcttatccttaaatcaaacaacttcactggtgaaattccttcggagttgtcgcagctttctcaacttcaactactagacatgagcaacaatggtctgacaggatcgattcccagatcttttagtaacctcacttccatgaagaataaaaaacttaatatctcctcaggaattattacaatggcttagttccgatgaaagaattgatacaatctggaaggggcaggagcaaatttttgaaataaaaatttctggattaaatttttttcaactacttacgggtatcgatttgtcaagtaactcattatcacaatgcatccctgatgagttaacgaacctccaaggccttcaatttttgaacttgtcaagaaaccatctgtcatgcagcatacctggaaacattggtagtttgaaaaatctcgagtcccttgacctctcgtcaaatgaactttcaggagctattcctccaagccttgccggtatatctacccttagcattttgaatctctcgaataataatctatcgggcaagataccctttgggaatcaacttcaaacccttactgacccatcgatatacaacaaaaatcctaggctatgtggttttccgttgaacatttcgtgcacaaattcttcacttgcatctgaagagagatattgtagaacatgcgaggaccaatatctatcctactttgtgatgtctggagtggtttccgggctttgtctgtggtttggaatgttcttttccatcgagaccttaaggtatgtcattatctgctttgttgatgccatacagtgtaaggttacgcagaaggtgtcctatattaatcaatttctttctagaggaaatacggcttagcatctgtgcagctgtgtttccgtaatgttaccttatgatgaagaagtatatttagctttctgttgttctgtaattggcatgtttcctttgtatattaagactaagaggaatttaaaatgctactttatcttatccaaaatcttatggctttattctggaaatactctatccggcagtattccagaaaagataggcagtttgaaacccttgtggtgttattcctccgagcatttcaaattcgttatgctttggtatgttaagtatctgaaatagggtgaggtaaccactgtaagtcaacttcagtcaattgtggatccatcagtctatagcaacaatctgcttctttgtggcttccctccatgcacctacactggataaaaaaatgaagaccataaagaaatctatgcgccattactttattctgtaatattattggcctttttttttgtgtgttttggctttagtttggagctctggttttacttaagccactgagttttcatttttcactttaccagatagaaagaagttgtgcataagcagtagacattaatgcactcttcagttgcaaatcagcaaccaaagaatcatacagttttcagtttatattggccatttttgaaatagttaattcccattcaaaaattaagtatattagatgcatttttatggcatgcatgtgttcacctgaatgaacagctgtgttctagctactctagtgtactatactcattcctactactattcttgttgtggttgtccgatgtctgcagccagcaacctcaccaattcgaattgaacttttcatgcatcatgttttctggaatacgcaaaaaattgtgcatttttgtattaaaactttgaaaaaagtgaagtattacaatattataattctgaaatgctatactcagggaaaaaaaaagaaatacactacgtcatgtcccacaccaccaccacaccctaagaaaacacagccacgaccaagaacctccaaaaggatgcctctaaaaaggttaagacattaaaaacaccaccatcgcccatcccaaaagatatggttttcgcctaaaagatcttattaaagaggggaagagaggcacctcgacaacaccttcaagagggttccggcgcctaaaggcgttgccgctgtcagcttaagattgggctggctttcgcctggcggaaccaaggtatccgatctggaaggtgcggctggatcacctccttttcagggagagctaatgcttatgcttattgggtattttggtttgacactgcttcacgcccaaaaagaaggcagctacgtctgagctaaacttggatatggaagtcttctttcgtttagggtgaagtaagaccaacctcatgagcttattatcctatgtcggaacaaattagttaaacttgcacctttcttgttgctacctcaccaatcaccaatcttgctgacacgtgactgcaatagcaccaacgccgcttcgccggctgtcctccatacggttgtcatgctgccgacacgaccacaaccataaccatgaccaatcttgcgaccaaccactgttgcactatggcgaccaattattagccttcttcccatgccatcacctccatcagctcaccaagaaagggaggaggtgtgaccgccaccaaccgctacatgttggcagcctcgaccttcctttcctgtcgccatcttcaccgtcttgccatatgggactccccatgaccaggtaaacctatcaagaaggtgaggagctccatggagatgtgaaggcaccatagatagagagcgacccaccatcatcgctgcccgtgatggcggtgctatgtggccaaatccgggctcggggccccagatccagcttctgctccacccaacaccagctacgccgccacacgggttggcaaacagcaaacctccgtcgttgccatgcacgctggtgctccggtcgagtcgtcctcaaggcgtgttaaccctccgcctggcaacccctgtgcatctccatgcgcccaaggagaggccccatcgtcgccaccactggccagccgagcggccgttcgcgaggagaggcaagggccgccaccgtcacctgcgtaggcttccaccatcgtcgcccgtgccgacctcctcgacaccagctgtcgcggcatcccactgtcgctagccatcatggccttccacgcaggaacccgcgtgggactcccgccgttgatgctccatcgtgccagcaactccaaccagatctggttcagaggcggcggatccacctgacggaagactagatccggctacggcagcattgaatctgtggcctacacgctgcgtcatcttcccagcgatccatgcgccaagccaccttcgtcacgctgaaggcgaggcgccgccagggttcggccccgctgccgccatcccgacttgccgcacggttctctgacagcggcgaggagagggagaggggagagcggcggcggcgggtggtaggattcgccacccaggcgtggacgacacggagggtgctgcttggatttgagttttttttttttcatacatcatgttgaacgaaagagcagaagcattgccactcatttacagcatcacatacatttccgtcatccactgaatattcttctaattcacattcatagaaggaaaagggactgctgcagtgaacagttctttctaagatatgttgattttctctcagagaattatatggcaaagtcataaatttctccatttctcttctctgtcttacatttacaagtttattgtttagcctatgggggaaaataataatattaccacagggatagtaacaacgagcaatacaattgtacaaagttgatgaaagacaggttttgtgattcagtgtacagaataatttctatatatttatcagcagttaatgtaatatactatcctaagcttacccttggcattaatataatctgaggatgcatcttacaaatcactaactgcgaagttcccttcctcccctcctggtgctttacatctctgcacagatatatattcacttctggtagtctgttagcttgctaattgtgatcagtttgaatggttcagagaggtaggcttgagtatgcgcagaaatctcctgcgctacagatctcatggaaggcctggattcagggttcacccttgtgcaaccaagcgcgattctcacgatgaacacgacctcttctgcgagctgccctgttggagcatccagccgctggtctagtatgtccttgagcagtagatcatcttcttctgatgatgagatggctggcagggatgttaagaggtcacctgggtgctttcccatcatgacctctagcgcaaccacgccaaagctatacacatcgcacttctccgtcaccctcatcgtgtatgcgaattctgcaagaaataatcgaagtcggtaagtgttaatggtgcggtgccgtacttgtcggaatttgagcagttccttttcccaatgacaatctttcaaagttctgcaaatcttcaggacaggagtatgtggcaatctattcaataatgaccactctacttacagtaatgacttcagtactttcatgaatcacaataatgtgcaaaacaatcttaaatagatcggatctgagtttctttctctcattttttccttttttaaacaacagacaattcgacaactatatttcataactactgctcttcatttggtagttacttgcacaaaatgttcttttatggtcagaaatgtttgacagtttatcatacactacattactacctgggagtatcgaactaaatttagccatctggtttttcgttaattatgactgaaacatcccaaatgctatttggtgctaccataaggatctcactgaagcactttgaagtataactaggatttgatattataagctacatttcaaaaattgtatgcataagaaacatgtgacattttaaggaaaaaaatgttcaaatttaagaaaagtacctggagccatgtatccatatgatcctgccacagaagtccagttcgtcgatgcacccccaagcaacttcgccgtgccaaaatcacacaagcgcggctcaaagtctgactcaagcaggatattattaacagtaatatcacgatgaacgatggctggattgcagtcatgatgcaagtaagccagggcatgagccagcccctgcaccaccttcaccctcatgccccaatccatcttcttcttcccttcctccccatacaatgtcttccccaagctgcccctttccaagtactcatacaccaggtacatgtagtcaccactggtgcagaagccatggagcttgacaatgttgcggtggcggacctccgtcagcgccttgatctcgttctcgaagctcttcttgttcacatccggtatgtcacccgtgtcggcgacatggaagcgtttgacggccacaacctgcccactggagagctcagcccggtagacacttccgaaccctcctttgccgatgcagaaggtttcattgaagttgtccgtggcgttcacgatgtcgaagaatgtgaacttgccttccttttcccagattgtggactcatatgaataattggtgttagattccacctctttcttctctctaggcctcctcctgcataacagtatgatgcaagtaacaacggctagtagtaacaccactccaactactgacacaactgttgcaatgactactctcttgtgatgcccagaagatgatccggtagaactgatgtcacaaggagttagaccttgcacatcaccacagagccccgaattcccaacatatgcagaagctgaagcattctggaaaacattccctgacggtatactcccggtgagtcgattataagagaaatcaactgattcgaggcttgacatgcgagaaaaccctgccgggatcgaaccactgagctcattgtgtgataagttcagtctctgcagagttatcagcttctcaagatttggagggatcgcgcctgatagagaattgctgctcaaatcaagcaggatctgcagctgagccagattaccaagctcacttggtatctcccctgacaacctgttcttgctcaaatcaagcaatatcagagcatcaagcttgctaatggcaactggtatcgtcccatcaagcatgttccctgagaaatcgactttctgaagcttggaattgttgctcaagctcgccggaatcggcccggaaaaggagttatggctcaggttgagattgaagaccctgatatttcccaacacaggtggaatccctcctgtcagattatttccagccaaattgagatccttcaagcttgtcatgctcccaaatgccgccggaatgccgccggatatgcgattgccgtcgagatgcaggagtgtgaggttgatgcactgtccccaggcagacgacagctcgccggtgagcttgttcccggagacgtccaggtacaccagcttggggtgcacgccgaaggcctccgagatgtcgccggtgaagtggttctcctccagccggacacggaccagcgccgtgcagttcttcaggcacggcggcagcgcgccggtgaagttgttgtagttcgccgtgaggtggtccagcgcgaagccgtcgcagatgtggcgcggcagctcgccggagaagctgttgttggtgaagctcacgtgctgcaaggccaggcccttgccgaggtccgccgggatggtgccgctcatgtggttgtcgaacacggcgaggtactggaggctcctcagggccgtgatggtggctggcagctcgccgtgcagactgttggtgttgacgtcgaggctttgcaacgccgtcatgttgccaatctccggcgggattacgccggtgagattgttgaagaatagcgccaactttgtgagctgcttgaggttgccgaacgagctggggatcggtccggtgagcgagttcaccgacaaatccagctctgtcaggttctccagctcgccgagctctgccggaatggagcccgtaaacttgttggtgaataggtagaggatgttcagtttgctcgccttgccgagctccggcggaatcttgcctgtcaacgagttgttctgcacttggaaggatatgagctccggccagctcgtgaacaacaccggcgggatctcaccggtgaggttgttcgtggaaatgccgaagtaccgcattgcccgcatcccggcgaactccggcggcaagccaccggagagctggttcaaggacagctcgaagaaaatgagattcttcagatttcccagctgcgacggcagagttgaagagagccccgagttcttgatgtcgagccgctgcagcatctggagctggccaagaaccggcgggatcggcccgccgagctggttgtcgccgagttcaagaatcctcaactgcggcatcgacccgaggaactccgggacgccgccggtgagattgttggcggccatccgcaggtcctgcagcttcgtcaacttcccaagcgacgccggaatcgggccggagaacgcattgatggacaggttgaggtacctcagattcgggagcttctccggcagcgtgtccggtatcttcccgaacagagtgttctgcgacaggtcgaggtaggtgatgttgccgcttttgaggatgaactccgggaagctgccattgaaggagttgaggtagagcgacatgaacgtgacggtgggcatcggcgagaacttggcgaagtcctcgtcggtgaggtagtttgctcccaggtcgaagtgggcaaccttggggaggcggctgagctggtgcgggatggcgccgacgaggttgttgttgtagaggcggaggtcgacgaggccggagaggtcgccgagctgcggcgggatggagtcgctgaagccattgttgccgaggtcgagcgaggccagcgagcggagccgcgagatgctcgccgggatggcgccggtgaagttgttcccgttgaggtcgagctcggccagcgccgggagcgccgcgaagtcgagcgcgtcgaggccgccgccaaggccggcgcccctgagccggagcgaagtgacgcgggcgccgccggcggcggcgtcgtaggccacgccgcgccacgcgcacaccggcgcggcgcggctccacccggacagcgcggccgcgccgtcctgcaggccggccttacacgccagcagcgcctccgcttccgtcggcgtcgccgcattggccagcgcagggatggcatcagccgccacccctaggatgatcagcagagggaggacgaggcgtgccatgtgggattgtgggcagtcgacgccttcattggcgaactgttgtgatacgacgagtggctaaaacaccagcaaatgggttcgtcgcacctccaaagccacgtgcgcgtgaattcatacgagcgtcgccgtcgcttcccgccatattggactctggctaggtcaatcgttcaaaatgggaggatttcttccacacctgcgtagctatctctcttacagcaatgtgaaaatcgcaagaatcactctgtaaatgtcatttgagtttgagattttttttatataaactaatttattacaaatatccccttctaatttaccttggttattttgagattcttcctcagttgttgtcgctcgcaccttttttttctctctcctcaaactcaaggtaacatttaggatggttttttaataattttccaatatatctttaccaattcataagtaaaactcgatgcaggaaataaaaacaacatgtatttgttgttaaaaattcaaaatgtctctgcagtttttagtgtttaacacctttaaatattagacatatatttgatcatttatcttattaaaaaaaataaaaaataagtcatgctaaaagtatatttaataataaattaaatcacaacaaaaataaataataaatacatatatttttaaataagataaatgattaaacatacgtgacataaacattaaaaactagagggaatatcttttattggcttctatctagttttagagcacattgtggctatgttaggagatttattctaaaaaataaaaaccaaaatatatttaaccggaacttcctttttaaataaaaaataactagcacggtggcccgcgcagattgcgcggctaacatcattatattttctctcatataatagcatatatgttttctcaatgtatcattcaaatatattaaaataacaacataattttaaattttgtactaactttacgaaactactaatgtttaatatccatattgtattttatatatgtgttagttattaattatgtttaatatcaaacattagttattggtaaattatattcctataaaaactctagactcgtctttgaatatttcttttttaagtaaaatacactagcggttcttaaacttgtcacgaggtttcacttaggtccacgaacttgtaaagcgcacatcgagatccctaaacttggtttaatgtatcatcccggcccaaagcgttgtttgaccgtggtcttgcctacgtggatgatggcatggtggctcttttttcttctccactttactttttcctcctattcttttatcttcttcctccactagagctacctcgagctcccccttgtcgaagaggtcgaagaagagagaaatgaacgaggaagaagggagaaaaaaaataataatgtgccatgtcgtcgtctacatgtcatgccacgtaggcaagactatggtcaaacgacgctttggaccggggtgatacaataaaccaagtttagggacctcaatacacactttgcaaattcgtggacctagatgaaacctgcttacaagtttaaggaccgccagtgcaatttactctaattttattatgtttattccgaattttagttagttttacactcctatatggactctatactctacttctaatattccttatttttaattccgaatttctattatttcttaattgtatttctatatggaatctatactctacttctaatgttccttatttttaatttcaaatttctactatttcttaattgtatttctatatggactctatactcttcttctaatattctttattttttaattctgaatttcagttatttataaattgtatttctatatgggctctagtctccttttccaatattccttattttttaattccgaattttaactatttctaaattgtatttctatatggactctgttttttctttttttccgattaatatgagaatttctagaccgtgagaacgaatatggaggtttctttttctattcttttaataagttaatagattggacaatcaaatttgtctagtcatccatctgggtgagggaacaactataagggttttgttataaaaaaaacaggttctattgaacgcttctagcacagttcaaacgcttaggagccgggtgcatgtaagtaattattcagcgaagcttaagggcttgttgatttgatgtcattttcaacccttcagtgatattttatggtaattccagagctttccactctcaaatattctaccaaattttggtaagatgcacaaaccaaacactttcatccacaccttattaccttaccaaaaattggtcatggcaaaatttagtattatcaaattttggtaggtttattttcgattttgctatatctcactcgaaagattttttcttatctctcactcgattttctcacttaaatttacagtgcattttcttgtaagttacagtgtaatttatgaaacttacattgtaatttgtaagttacagtgtaatttttgaatcttcgcatgtaagttttgatatttgtattggatttggtctttttcttgaagatatggtaatttagtgtccattatgatatttcttagttgctttttgccttttactgtgtttatcagattttaattcaaagattaaaaatctgtatgatacgattataaaattttttcgaaagatacataggtactcccgtttattttagtgaagtaagcaagcactgaaatcctacgtcagccataccctgttgaccatagaatctcctatgctggtagtagataaatacattcacatacattttttcagtgatatttcgtacaaaaacaaatgttcttaacacaaaaatcaaacaaatggccctcaacaatagacaaaatgtgaaaataatttgtacaatattaggtgtgtaatcatcaatacagaagttacaataaaattttccttccaaaaacacaagaaggtaaccgggcattcacacggccttttttttttctcctttgtactttatactaagaaagtgagaattttacattattgacagtttaaaaaaaatatagtaattaataactatgtacacccacactaatacttcttccatgcttttaatatctcaatttattatttaaaaaatagaaataatagagttatatctgtgtttgagtctcaatttagcatattcatgatttgataatttcgaattttggaattaacaaaaaccgagctgtcctatgcttggtctgtcaatcatattttctataatttaggtcctatttggcagatctcacatgcacgctggagtagtagtttaaaattttgtatttcatctaaaactaaagcaaaatgattcatccaaatgtaatgaatatagtaattcgatttcagatgtaatgaatatccaagcatagcagcatttgttggtagtatataagatggacatgttccatataattttggatggatgcagtaacttcttacatcttagtcttgatacaaaggaagtttgttgggggtcctatgactcctgccaattacagaacactgacaaaactaaccatgctacatcttcagatggtacagaaagaaaacacacagctacaaatactgatcagtatttcctcttgaaagaaatttatcaacagaggagactttctgcataactttacattgcatgccatcaacaaaaccgaaaatggcatacctccaggttccgatggaaaggagcattccaaaccatagccaaaaaccgaaaaccactccagccattacacagtagtagaaatactggtcctcgcatgttctacagtctctctcatctgacgcaactgaagcatttgtgcatgaaatgttcaacggagggccacagagccctgaattatggctgtatattgatgggtcagtgaaggtttgaagttgattcccggtgggtatcttgcctgatagatgattatacgagagattaagagtgctaagggtagatataccagcaaggcttggaggaatggctcctgaaatttcatttgacgagaggtcaagggactcaagatttttcaaactacctatgttttcaggtatcccacacgatagattgttccttgacaagttcagaaatcgaaggccttggaggtttgttaactcatcggggatgcattcagacaatgagttacctgacaaatcaatacccgtcattaattgaagtgttttttggaaaattatctcctgccccttccagattatatcgattctatcctgataggtagacccatctaatgatcccgcactggatacaatttttggattcttcatggatgttaagttgccaaaagatgtgggaatcgaccctgtcaaactgttgttggtcatatctagcagttggagttgagaaagatgtgataactcagaaggaatttcaccggtgaagttgtttgatctaaggctaagaatcttcaaagatgaaaggcctttcccaatccaaggaggaatgccaccaaagaaattgttgttcccaatatctaaagtgaccagcgtctggcatccctttagcgctgatggaaaaacaccggtgaagccgttgccggcaagatgaaccgattcaagagaacaattgtagcttgtattgactgcagggatttcacctgagaagcggttgtgggagaggtccatgaactgcaggctctgcagattccaccagcagtcaggcagcttaccggtgagcttgttgtttgacaggtccaggatctggagagaaagcaacctgcaaaaggccgagccggagctgctgttggaggagttgccgttcaggacgttgtacttctccggcatgactgcgccgccgtcgtatagcctccgagccggcctgctggagaagtctacttcatcattgcggtagtagttttcgtcgtcgtcgccgtcgtatattctccgtaccggcctgccggagaagacgtcgtcgtcgtcatcatggtagtagttgtcatcgtcttcgtccccatcgtaatggtagtagtgatcgtccacatcggcatcgaggctcaagctcgtcacccgttgaggagatgataacagcaagagggagagggagatgcagaggaagagacagaggcgcagcacgagaggggccttggctgccatggctggatttggtagagtgcaaaggagcttgtggaactgaagtattgaactccacttgtaaagctgcaggagtatttctttctctctttcttggtatggctatggacagggggcgaggttgaccgtgaccatgggggtcgtcgggtgggggtgctgcggattaggaatttggagcgctcgccgtgtcgcggtcggcgcatgtttcacacggcacagcgacagcgatggaccagccggctccaccatgtgagatgacttggactgatgacccgagaaaggcacaatggcacagtatccagccagagtcaaggatggagccaatggcgagcagtgcgttttgcagtcaaaatttcagaacacacggtggagttgtcagagacgaatggtaccttgatcatgagaggctcgcccgatgatggcgctcccgcgcgagcgacgtcgcccgccgcgctcctgtcccctcctcgccgtcttcctcccgccccgagtccctcctcctcctcccaggcatttcctcgagcacatcatgcgcgcagcacgccggcgagaccgagacattcctcaaagcgccgccgcctgggcaaaacccaggctaggtgggggaccgagctctggccgccgcggatgctgcagcgcttctattggagccacgacggcggcggcggcgcgcgacggccgggaccctcgctccgccgcgtcggagacagaagccgacgccgacgcgagcgcaaagtagctcgttctgacgcggtttcgtcctcgattcgcgagcccggcccaaacaaaacgaaacgaagtccgcttccgtcatctatacggcccattattacatactccacacggtgcttttgttcatgggcttgatccatttagtacggcccagcacagtcctcgtctcgatggcccatcacctgtaatgggccgtacttctccacggtgctactagagatggcaatggggacccaaaacctgtgacccgacgggtttttactctattaggagctaattgtgttctaactcttatacccatgggtctactaatgggcaaaactcttacccattaggtacgtgggtatgggtccgttctttacccacccatacccaccaacccgtgggtgaaaaaacctattgattaagcctaaaactataagcaatataagtctcaacgactactaaatcataatatgaaactcctttcacatcttaagcattgttctattctagttatatgaaattattatttgatttcttgattatgtatgtggttgtataattttttttactcgcctttgtatgctaatgttaatatattattgctagagaaaatattgatggtttacaactctaatatgactaattatagtacaaaactataaatgctacaagtcaactatatgggtatgggtacccgttggatacccgttacccgcacgggtgtgggtatggggaagattttgtacccgcgatgggtgtgggtatttaagtgggaaaatttagacgttgcgggtgtgggtatgggataaggaaacctgatgggtatgcacccgttgccatctactgctacacgcgcgcctactaacgagcggagtcgtcaggatgatgaccagctgacgtcacgttggcttctacttactctctccgtcccataatataagggattttaagtttttgtttgcactttttatcactcgtcttattaaaaaaaatttggaattattatttattttttgtgtgacttgctttattatccaaagtactttaagcacaacttttcgttttttataattacacaactttttaataagacgagtgatcaaacagtgcaaacaaaaactcaaaatcctttatattatgggatggagggagtaacattttctgaacttcatcgggaaaagcaaaaaggtttattccgtaattccgtatgaaacaagtgaatagcgatattagacgaaggcagcgacataaaattgtactaggctcatagcaaggaattcatatcaagttcagttatacttgtaagaggaggtgcactaacatactgttagccagctataaacatatttgtcaaggagtaatcctctctagcgggagatcgtgagatcccctttttgtgagttcggccgagggaaaaggctcgcttggggagatcgcgtattcgccttgaacgctgctatatcatgtgtgagccccaagattatacaagttcgggccgctatcgagcgtaacaccctactcttgtgtgtgggattatggctgagtgttagaagggttcctaaactccggagagcgctcccgcttctcttctcctagagttcaggtttactgagagtcgtccccttttctcggtgggcaaggtcctccttttatagttcaaggggataccacatacaccgcctctacctactctttcatgggaggggcacccactctatcttgaccgggccacgatccgtgccttcgcccggaagctaagcagcagtccgtccttgagcgggacccagtgctgccccccgcctgacacgggggacagccctttcattccctcataaatgggtgaagacttgcggtggtcctcctccacggagggaactccaaatgacgcttcgatgggacaggacatacctatctccactccgccggagacagaaacgacgtgggggcacggccgcccgtcaatcggacgtgaccggcaacaggccggtcacagattggtcacgtccgactgacgtgggtcagtcaggcggcaccgcacgtctgcccttaccgcattaaacgcggtgagggatagttggggcgccgcgcattgatggctgttcagcccgggtcctctccccactcactccccccgccacatggcagctgggcgagagccttgaggtgaggcagcgcgaaggcccgaggggcacgacatggcaccccgaggcccctcggctgcttttgcgactcgcgaggtgcgggagtagggccaggctgtagagccacgcggcaggataggaaggtaacttcccctcactttgcatacccccgggcccatatctccgacagtagcccccagcaccacgtcggacattggtccctcgaggacagtctgacgtggcgcctcacgacttctcgtgccgtggttgtgggcccgacgggaaatccagacggttgccggcgagcggccaggttggcacattagccaaaatggcgatttgaccgccgttaaccgcgctgatgatgggggcgcctagggcgcgaaaatcagggggtcggctagaccacgcctagaatcgtcacccacgccgcctcgactccctcgccctttgtgagttcggcggggggcagcgggtgagatttgagggcttggtgggcaaagctgtgtgatcttgagggggttcaatcccccaaagacgatgagacaaaagggatttatacaggttcgggccgctaagaagcgtaataccctactcctgtgcttgattgattgagtgtagaacacaagtgcttggggttgcaagacccaagtgccagttcgctcggaagtcccccctccccccttctctcactaggactggacctccttttatacctcaaggggttaccacataggcccaacaacctaacttcctcgagaagtattacaatctttgcattaaatgcatgtcttgttccttaacttggaagccgcatacacgtcgcctcggtcgtagggcctaccaaaccatgccgcctgacacggggggcgcccatgtcattcaccatttaatgggtgaagacttctgggctcctttacaccgggaaaacgggagcctagctttaaccagagcgggaggaccgactctggctgggataagaggatgagaacctctcattatcattatttgatgggacatgtcaggctgcacgccgcctgacacacgagcagcgcacaggcgtactagccagtcccatcggtcattcgaccggtcacagaccggttgagtacactgacgccgcattaaatgcggcgtggcgcgaccgctcgagtcgccataaatgcgggtaggtgggcacctgtaggcggacacctaacccaccgtacgtggtgacctagagagggggtcgggggagcccaacccctagtcatgggagggggcggtcgccgcctgacctcgggcccgatcccccctcgggggagggccacgtggcgcctggggcagccttctctctctagtctcggccagggagtggccgccgccctacctcgggcccgaccctcctcgggagagggccacgtggtattggggggcagcctcctccgtccaatctctgggagggagtggccgccgccctaccttgggcccgatcccccctcgggggagggccacgtggcgcctagggcagccttctccctctagtctcggccagggagtggccgcagccctacctcgggcccgaccccccttgggggagggccacgtggcattggggggcagccttctccgtccaatctctgggagggagtggccgccgccctacctcgggccggactcccctcggggagggccacgtggcattggggggcagcctcctccgactagtctttgggaaggagtggccgccaccccacctcgggcctgactccccttgggggagggccacgtggcattggggggcagccttctccgtccaatctctgggagggagtggccgccgccctaccttgggccggactcccctcggggagggccacgtggcattggggggcagcctcctccgactagtctttgggaaggagtggccgccaccccacctcgggcctgactccccttgggggagggccacgtggcattggggggcagccttctccgtccaatctctgggagggagtggccgccgccctaccttgggccggactcccctcggggagggccacgtggcattgggggagggccacgtggcattggggggcagcctcctccctctaaacatgatacccccgggcctatatcaccgacaatattttaatgagataaaatatgagagagaagagcagcgggctacagatctgtagccagctgcagcacggatttcaagacgtagtgtgtgtatgataggtaggacaatatattaatagtatagtaagtaactactgtataaattggctattgtattggctatatgtgaattagagctagtagtgggctattctcctgaatttgctctaactgcaacgcacacgtggacccacaatccagagtcacacggatcgagcctacataaattctctgtatttattgtagaggataacatgtcataagtaaaataagagtgtgtttaattcacgttaaattggaatgatgtgatagaaaaatttaaagtttgtgtatacaaaaattttaatgtgatggaaaagttgaaaatctgaaggaaaagtttgaaactaaactcggcctaaatctcaatgccatagtgaattgccgtaaattgttgtatcgtcattagtgctagttacgacggcaacataagtaagtactcctaaatttgttgctgttgctggcttgctgccgcggcagctatacccagctggtgcaccatatatagacagtttttttctttactgttgcgattcgacgtactagtattatttgatccggagagtccacacaactgaacaaaatggctaaaattgatcctaattctgcccccatgttctttcttttctacgtttattagtacttcagaaaaaactaaccaacttcaaatattaaaagatggagggagtatatatcaacctgttgtattgagctttacattagctattaccgcaaattatcctctttttttcttaaacaacaagtacaatatagtatgacgtttctatcgatattaccggagattatcctcattatgcagaagcacgtgtctagcattagtatgacttttacgcgaacattcgtgtattagacgtaccctcgactcctaccgaaatgtggtgggaatgtgagatgatcaaagcagtagcttgacagtcttttttgctagccccctcaattatttcactccttcagcaaacttggacacaatacgtcaatatcttgttatgtttttatttcttttgatttttttttaaaaaaaactactcctgcatagttatcgtgttatgcatggtggtgatcgttcggttcaaagtttcaaacacacttgttcacattaatggaacccaccgcagttaatagcgctggagagggccatactcctgtgtgaggcagtacagtttgttgcgtgtcgtgtagccgtacgagctaccagtctaccacagctatctatctcgcggagtaataatgacttggacttagagcaggtacattagcaggctataactgcaaacatattttaagaatataaatgaggagagagagaggagcggtgggctacagatttatagccatgtgtagcacatactccaagacacagtgtgtgtatgataggtgggactagatactaatagtgtattatataactattgtatgaatgaactattatattggctatagataaattggagctagcagttggctatactattaaacttgctcttaggaatgtactactagtattattttctgttcctaaatatatacatcttgattgtttaacaaaaatggtactactacattggttgacaaatcaaaatattttttattacctcattggttagattttaaattgtttgtactcttctgattgatccatttaaaattgctagagatcggaatcaatatctcataaataattatataaggagaaccaactagctaggttcattatggtgtaaccagcctaccctcgttcaagttttaaattttagacaggtgttcgtatttacagctaattattgtttcactgataaatgatgtacttattagtaatgaggtgcatggtagggtgtacagacgaccgtggtgaattcatcaagtttatagcatagttattaagaccggaccggtgaatgaaccggttgagctctcggttcactggtttagcggtcgagccagtggttttaccggtccaaccacggtctgattactattatagaatgaatgtttatgtgatggcacaagcagcaggatggtggcatggctagcgcgtgaacctgtcaatcccgtgaccagaggtcgaatcctcgtctccaccaatttttctcgggattttgcgcgcgcatgcacgggaggcaactagttgggccccccattagccggtctttcccggtttgaccagccaggttaatctccggtttatataaaaaccgcccgagttaaccggttttctccggtccgattatacgtgtatcttgaacgtctatgtttatacatttgtttttttataaaaaatttgaataattctatagatgtttacatactggagtactatttggacatctatctgtggctttgtttagttccaaactttttctttaaacttctaacttttccatcacatcaaactttcttacacatataaacttttaacttttccatcacatcgttccaatttcaatcaaactttcaattttagcgtgaaacgccaccctatctctcggggagtaataaatggctggacttgaagagtgtcgcagtactgtagcagggtcgacagcgaccgtcctgccaatagggaatcaatgcggcccccgtcttaagttcgcttctgccctgtcaggtttgcccagccactccccgcgcagcagctcagccgtcgctaccaccacctcaagctcccgcctcgcgtgcagctagctgagagcgagcgctcgccatggagaacggcgccggcgccggggacgacgagtacacgcgcgacggctccgtcgacctccgcggcaaccccgtcctccgctccaagcgcggcggctggaaggcctgctccttcatcgtcggtacgtgtaacgtgttcgtgtgtatagtcgtcgtcgccggcgagcttggtggtgatgtttgtgtggtggtggtggtggtggcagtgtacgagctgttcgagaggatggcgtactacgggatcgcgtcgaacctggtgatctacctgacggagaagctgcaccagggcaccgtggaggcggccaacaacgtcaccaactggtccggcaccgtcttcatcacgccgctcatcggcgccgtcgtcgccgacgcctggctcggccgctactggaccttcgtcgccggctccgccgtctacctcatggtcacatctctctctctctctctctctctctctctattcagctacataccctgttctcttctgcctctgtctctcctctctattcaacggaaaacaatattaaactctcgacaactcaaacaccacggttatggaaaaatctgaaaaaagtttcttaggaattttgaaacagttttactcctgcatgaacggagaaaaaaaaaattctgaagcatggtttgcaatttcggcgtatgcaaattatagctcagtaccgaaatttctgacgaaagagtaatttttttacacattttaaaatttagaattcgggtcttttaaaactgtttaagcttgattcttttgttttcgtgtaatctcatctgcatatatatatgtatgcagtggttaattattgacttctcatccaaatatgataatatatataattggaagaccctatcttgttttactcaactaatttctcaaatgtttgaaaggcatctaatatctccttatcataaatgatgttatattatattcaatataatttgtcgatatatgattagaagaggtaatgattaaagacctctcgtcagctaatagtaaaccggtcccttgtccctatccaaatttgcatagtagaccgtatcttcatgctacttcacccctgttaattaagaagctactactctctccgttttatattataagttattttgggtttgtattaactcggttctcttcaagttttaccaagtttataaaacggtcaaattagttttataaatgcatcattgaatatatttttatagtatatttattttgtgttgcaaatatcgtaaagtgaaatttactcttatatttttctgtaaagttttacttatgacagactcgaagttacgaagccgggtagtggtaatgaagcaatcggcaaaagaaaaccattctcccttttttttttaatcaagaaaaccagtcttgattggacaaaagaaatgtcataatactcacttcacttcatttgtcctgtttgcacccataatggggttcacttcacttcacaatgtcccttttaaaaaaggttttacaatgtcgacagtaaccgctttgttatcgtaaaccgtgttgcactcaccacacaatgttcataaaatttacctgtatacattattgatggtgtcaatatcattaacaatggggagagcaatatttcgacggaatcttcattttgaaggaaatgcctggatttggagataccttctgtacaatgaaagtgcaagaatgaatgccatgtgtgtgtggcatcccagtaggccggccgtacgtcattttgtatctttgcatttgtatcttcgaagacaataatctgtgtctttccaaactaaatccgacaaaaatgaaaccatcaggaaataataggtcaactaccatgaccccatgtgagatctggtcctgaaaaataggacaatggggtgtaagattgacaccaggttttgcttttgatataagcaagtaggggggtaatcctttccaaaatgtccaaaattagtacagaggattgatgtgttcatgttgtgacttcaagtccatttccactaaaaaattggagatttgggtaaacgtcacagctaattacgagagcatgctggaaaatgcatcttttgttttagcacactttgtactgttaataaaggttaagttctactccctccgtttcaggttaaaagacgttttgactttaattaaagtcaaattgctttaagtttgactaattttatagacaagtatagtaatatttataatactaaattagtttcatcaaatcaataattgaatatattttcataataaatttatcttgggttaaaaatgttactatttttttctacaaacttggtcatcaaaaatcaataattgaatatatttttataataaatttttcttgggttgaaaatattactattttttttacaaacttagtcaaatttaaaacagtttgactttaaccaaaatcaaaacttcttataacctaaaacggagggagtagttagtactaatatgcttttctaaagtagaatatcaacttcaccaatttttggtttggtgggaactcaggcttctaatttgggctttactggtgcaaactgcaaacccacacatgcttgacaggttaacctaacacaaaccttgttcatcacagtccaagtagaacttctagaaaccaaacccaagttcaatttcaagctgaacacatgagtttgaacattatttattcgttcaaattaaattcacctgaaatttggaaacacatggaagaattcctctctttcaaatttcttctgaatctgaaccatccaaattaacaaacgcagggcatgctgctgctcacactggccgtctccgtgccagcactgaagccgccgccgtgcgacggcggcggcggcgccgcctgcccgcgcgcgtcggcgctgcagctgggcgtctacttcggcgggctgtacaccatcgcgctcggccacggcggcacgaagccgaacatctccaccatcggcgccgaccagttcgacgacttccacccgccggagaagctgcataagctctccttcttcaactggtggatgttcaccatcttcctcggcatcctcttctccaccaccgtcctcgtctacctccaggacaacgtcagctggaccgtcggctacggcatccccaccctgggcctcatggtctccgtcgccgtcttcctctccggtacgccgctgtaccgccacaaggtgccccagggtagccccctcgccacgatggggagggtcgtcgccgccgccgtgtggaagtggcgcgtcccgctccccgccgactccaaggagctccacgagctcgagctcgagcactacaccacccgccgcgggttccgcatggacgcgacggtgtccatggcgttcctgaacaaggcggcggtgaagccgggcgaaggaggaggaggatcggtggcgcggctgcccgggtggacgctgtgcacggtgacgcaggtggaggagacgaagcagatcgtgaagctggtgccgctgctcgccacaatggtggtgccgtgcacgctggtggcgcaggcgggcacgctgttcgtcaagcagggcgtgacgctggaccgccgcatcgggaagttccacgtgccgccggcgagcctcggcgcgttcgtgacggcgacgatgctcatctgcatcgtgctctacgaccggttcctcgtccccgccgtgcgccggcggaccaagaacccgagggggatcacgctgctgcagcggatcagcctggggatgctgctccagatcgtgacgatggtggtgacgtcggtggtggagagccagaggctggggtacgcgaggaggcacgggctggtcgccaccggcgggcagctgccggtgacgatcttcatcctgctgccgcagttcgtgctgctgggcgtcgccgacgcgttcctggtggtggggcagatcgagttcttctacgaccaggcgccggagagcatgaagagcctcgggacggcgatgtcgctgacggcgtacggcgccgggaacctgctgagcagcgccatcctcgcggccgtcgagcgggtcaccggcgccggcaaggggagaacgccgtgggtgaccaacaacttcaacgcctcgcgcctcgactactactacgcgttcctcgccaccctcgccgccgcgaacctgctggcgttcgtcgtgctcagctgcaagtactcgtaccgcgtcgagtccacggagaccatcgacgtcgacgtcgccatggacaacgtcgcgcagggcggcggcgtggtgacggtcaaatcagaggcagccccaatggcatgacagcacttccggaattgtatcctgtctattcccgtctggattctgaagttgcaatgtaatgaagaaacggtgatgatacatattagcactttaaaaatgttaaatgaaaattttatttactcgttctgtaaaggaacggtaatacggacaatattcacagcttcacacaatcgcactagtagcaccatcgtttctcttatgcctatacttaagctaaaatgtgaattttaaagcttcactttagagttgattttgtgttttttttaaatatagtttattttacagtatttgctttcgaatcgataaggacacgtcgcataaattattttttaatttgttaataaacgattcgcatgaacgtaagtataagtaaaaggatggaaccataaatatctaggagtaatttggtgacaacgatggagatgcactattacagtcatgacgctagaggcaactaactccatccatcctaaaatatagcaatatagtacatgatgggacatgtatgtccatattcatagtactatgatatatcacatctcatattagattgttatattttgcgacggatgaagtatttgagagatactagctccgttttttaatagataacgccgttgactttttctcacatgtttgaccattcgtcttatttaaaaaatttacgtaattataatttattttgttatgagttgttttatcactcatagtattttaagtgtgatttatatcctatatatttgtataaaatttttgaataagacgaatagtcaaacatgcgagaaaaagtcaacggcgtcatctattaaaaaaacggagggagtatatcatatcggccgatgatgtaagctagtagctgatcctttcaaattatttatctttctaggtttggacttaagtcaagtatttccatctttttaccatcagatatatgttttaacaacatggaaattatgtaccaccagaaaacaaggcacgcttatatataacgtgttcatatgactaggtaacactctaactcaactggattgaccgtagtcagctcgccacctgagctgaaagcaggcacaatattgtcgatctcggatacttcgctactgtaaattgacgaacatgacatcaagacgagaaatctaaggaataagtccagtttgactcccttaactagtgaccgaatttgatctgtatccctaaaccacaataccggatatcttcgacccccaaactattgaaatcggtgcaatttgactcccttggcggttttggagggcagtttcacttatgtagggcccgctcacatatgggacccatatacgatcctccctttccttcccttattcctccttcctttctctctctcccccttaccttcccttcttcctcctccctttctctcccttaccgttggtgcaccagtagttcagcagcggtgccgggaccgggccgtcgtttgttgtttgttgggaggacgccaagtagggcgacgtcgaggagcgagacggtggcctctccccggaggtcctagtggcgtgggcgccgagccagccgcggaaggagacgcggatctaggtgttagagacggcggcgcggagaggaggagggcagaagggggaaggtggggccgggactccggcgagcggggcaatccccgttcacgtcgctcctctcgaccttcgttgcatgggatgctaccatcggttgcccactcatccgcgccaagctcgatgccatgggggccacatctaccaccagcggggcccaatgaggcacgcgggggcaaggacatgagggcgcgccacgttggggtgctcgtcaagatgtgctggtgtggacgtggatccctgacgcgcttgtttggatttctgcaggaagtcgaagctgtcccgccggcgccactccagcacctgcccgccaccactccaaaacatgctcctcgcacacgactgaagaaggggtagagagagggagagaggagggagacagagggaagagtaagaagggaaggagagagaggatgacatttgggtcccacatgtttgtgggtccacaatttttttttgaataacaagtgggtccacaatatatatatatatatatatatatatatatatatatatatatatatatataagttctaatgacatgtaagcgccacgtcaacgccacgttgtacgaacactaggtcaatactaccacgtaggcgctacgtcagcgaagctgccctccaaaaccgcaaatggagtcaaattgcgcccgttttaataggtgaggatcaatatatccggtattgtagttcaatgataggaatcagattcggtcactaattaagtgagtcaaagtgggcttattccgaaatctaaagtaagcttatttcataacaaaattcagctcagttactcttgggtcaataagctagcctaataaaccgggaagaaaagtcagaaaacaatctcgctagcttccacctctcatgctgcagcatgcttataaagcaaagacaaatctagggttgatttagccttcatactcaatggagttattcctatatgctccgctgagatatgttgtttgtttcactttcaatcggttaaacgttgactgaacagtcgtcatcatcacgatgtaatttctacctttcaatcggttaaacgttgactgaacagtcgtcatcatcacgatgtaatttctacctggaaaggaggcgtcgaaggagcttaatgaaacatatcaaatacaatgcaattagacaatatgagtgaactcttcatccaaataaatccttatccatgacccaaaaatcattctcttccattatctgaagaagattagctcaccaagttagtagaagtgttcatcatctatcctcgactagttcaaaagcagcaagaccaccttcccacggtgtgtaaatgaaccccaaaacagaaaaaaaactcccaaataacacgccacaaaaggtatggtaggtgtggcttgacaatattacattcactggttgttaggttaagcattaaacaatcacatgtctcagcatctgccactataaaagttcatttttaaggacagtcatatagaaactttaattttctgagtctaattattggtcttgataatgtatccaaacatttacaatcgttatttttcatgatccacacatactgactatgacctatatgaataatgagacgaccaatcaagaaaactgtagtaaagaataattaggcaatttgttttgttggtttgttgtgggatatgttatatgttaatcaagttagtccttcttattggagttgaagagatgacataaaaaatgtttctatgtgaacaaagtaacattaagaagataacccgttaaactctttttttcttatagtaaagcgttcaactttgtgttgcgactccaaagctttattatggcacaaaaactttacacaaggctctaattattcttttactataaatcttaatttgttatgatgatgatttttaaaactaacttttaacttttaatttgttgagttggacgacaagttcagttatgtaaagctccaaggtcactgatagaagtgagcaactgttagtattttcatatttacttttcaatgatttatatcctaaatggcaattgcggagttcattacatatatatcaatagctaaacttgttatatgtattacaggattgatcagttgcttaagcatcatctcttatcgcccttataggaaactatggctcaaaaataaaaacatttaaaggatattatttttttctaaataatatggttcattgcatgttgagttttttgttacaactatataagatatatagttcttattgatgcggcttaatacatgttgatttttatagtaatgactatattaagtgcgctataaatgcaaatgacatataaatgattatgattaaaacataagaaagattgaactattattattttctatattatggctcactgcatattgagcttttgattatatctactattataaaaattgaatatatttttgccgtcattcgtattttggtatgtcatccgtatttgagtcattttttaagttcgttcgcttttgaaaatgtagatccgtgtttgagtcagattttaagttcgtttgcttttaaaaatacaaaagaagtcatacaagaaatttctttaaaagaacttgcatgctaacttgggattaaagtcggactcctaactgcagctcatgtttttttaaaaaaaatatccaagcgaattcctgaatttcattctatctaaaccgtataacaataataagattaaaataacattcacccattgcaacgcacgggcatttttctagtaactatataaatatgatatatcaataatactctagcacatcatatcttcaaagcaggttgcggaggacggtcctatttatatttctataaaagtgtacggatgtttgacaagtggaaaatatccaaatcccccttaaaaatctctttagagtttttaatgctcatgagttatattcctatttaaatactttttatcctggtaaagggatttcttcttggacctctttaaggaatacctacctttttcccttttccatgtctagaatcatcgaagagaaattatattgacaattcaacgtatctttaaacctttccacaagcatgcatttcttgcttgccttactttgagtagtccgcgtgctctggactgtgttaacgaccaagtttggtaataccagcatcggagatggagatgggatcgaagcggaatcgaagatgatggttgttgcggaaacagagtaaaatcggctggagtccgggtcggctacgactgggatcggctaagtctgagttagactgggttaagtgatacagccgattccgacaatacgatctgtgtacgatgtcgggttcgagttgatgtgcttcaagatgattgccatgcatggatagagtcctgggaaggcaattgtatctattaattaggatattttatgtaaattccttagagatatgtttgggcaaaagtctgccgcaaagacttatggtatcttagagtttgttagaaatagtagtcgtgtccggtatgggcatatcttgtaattttcgggtataaataggccccgagccctatgtaatttttaacacacgcacgttcaatacaatttcggcgcatcgccaccttttgctttagttttatttcgacgagttcttactttcgggttgagctgcatcggtttcgatcttcgacaagaggtaaaacttgttgtgatgatttgctttctcgggattagtgcttccatctcatgatactctaatcttgtttatgtgattcgtcaagttatcatatatcttacgtaatctctggcaataccgttatctaacctacaattggccaacatctatcgaggaaggcagccgattaggttagatgtcgatgttgatttagattatataagatatctaccaccctatgaaatatccagcggcttgattgtctagatattgttcttcttttcatacttaatgctgcatcagttgagtttgatctattaagtcgtgcttagaatcataatctctagcctgcctttggttgccgatcagggtagtatcggagtttcagccgatcttatctgatttaactatatttgttttatatgcttaattgatatgttaagtctgccctttatatcaagatcttgtcgcatctaaatacgttaagcttctacttgagtattctacttgctttaatatcttaatataaagtggtatcggagtattagccggtacatactagatctatttgatcggctatgctataaacatatatagtcttgttattaatgtatattttgatctaagtgatttatattgtctcggtgtggtgaccgatctatcccaatcacttgatttaagtatacgtcgatataaagattatatattgttaatatctacagccgatcgagtagatttagtttcttgctacttattgatgatcgccgatcgattcacatacgacatcggctcggagataaatgatatgttatcggcacctagccgatcggctatcatttatagatttgaccacggtttctttgtctttgtttcttgttgattgcaggatcaaatcaactggcacgctcatacatccgaaggcgagctttggacctgcactggagttaagcagatctcccaggcctcgtgttttctgtcaacagactgttgaatagatcaaagtggaaagtggaaccatgcttcctctccttggtgagtttgccctccttcagttctagcaagatgatggtgacaatagagtcactaactcttccaggtgctagacatcgttactacataaattgacatatgtgacagtccaacatgacccatttgagatgatcttatctctaatagctatagagatccaaagtttggatccaaatttcagtccttttccatcacatcaacctgtcatacacacacaacttttaagtcacatcatctccaatttcaaccaaaatctaaactttggatccaactaaacacagcctaggttgaaaagtaccatgtttgagatatagctatagggaacgacctatcatagatgtgacctcacatctgtgcatgatgggtgacattgtatgaaccgtccaagatgagctctcactctaacagatctattatgagatgttacgtatgcacgggttttatctttaacctattagtcatcagagatgacttattcacttacaaacaacactaacctattatgagatgttacatacgcgctatggcgggtcttatattgaacccattagtcatcagagaagacttattcacttgtagacaacactaactcttgtaattcccgattctctcgtactctccacctcctagctactagcatcctcctctccacctcgagttgccctgcgttgacgacctcagtgctaatatagccaatgaagcagcaccccagtggcctttgcttatgctgccctacagcaggtattatactgccctgtaaattctaagttgaatatctaggaacagtattactgaatctggcagtgaaaccttcctgtgcttgtttctggtttgatgggatttggttgaagcaaacaaccatgactgctctgcttgtacaactcttgtccctctgctcagcttacttgaatgtgtactgattgtgtgcttcacccatctaactctttgaatttgcacttgagattgttttttctaggagctttctgttactgaatctgtagatgggcatctactgcatcatcgctttccatatggattgttgtgttcatgtctttcaagtttacatgactatatctcctaatcttaacatggatatgtatatcatataaaatttcaggcttcagaaatttttttgaacaaataatttcaagcatcagctatgcttcaagtcattgtatgaagtatgaaacttcagccatcatttaacagttaacattttggtgctaaacatattaactatattctttaaaagcttacaattattatgtctactactcttggtaaatattccctacctagcttctatattgtgttgctaagccacatataacattttggttgctaaacaacttctactactggatgttcttagaagacaaagaggtgcgtagagatgattttgtgcttgtggattgtaaaacgccaactgacacacatatgtatgtcctagcagacactacttctcgttcactgttatattgagtcagtatttcagatgggaagtttgtgtgccctgataaaattctgaaggtgcagtgccatgtggaccatcagaaagtagattatggcattcttgcgaatcactttgtgcgcataggatcaactttatacattatcccttcatctccaagcaaaaagatgggcacaattgagagcaggtgctattagccagctctaaacatattttaatgagataaacgatgagagagaagagaagcggactgcagatctgtagccagctgcaacacggactccaagacacaccgtgtgtatgacaggtgggaccatatattaatagtatagcaagcaactattgtataaattgactatttaattggctatagatgaattggagctagtagtgggctgtactattagacttgctctgatgatcaggctattacggtctgctttgttcgaacagaacgatctcctgtatctttcagttgatttcgtagttgaccatggtagcattgttggtctaggtgacactctgaagcatgtgtttatcctgcaaatggcgaaatggcaacacatggagacaatcctcgagttcatctctagatcgaactaggagcatcattgtttctgggttcgttagcctaggtgatacttctttcacagtgaccgatgccaagaccagtgacttcttctttccttgacttaatggatcaagaatggcgtgtcatcgggccacgagtaccctaaagcatctccaacagcctctccaattttgactctccaaatgtctatttggccaactctcaatctaatttggcaagtcaaactctttactccaacagcctctccatctatcatctccattacaagtcaatgataaatgaaacccatatgtcagcctcatcataccttcttccatctttttttccccacccatggccatactacatctcccttggcatgctgtttgggagatgtatattcattggaggatacatctacacaccatgggaaggtgaccttgctacattcaaatcagaggcacccccaatggcatgagagcacttccgaaattgtatcctgtctattcccgtctgaactctgaagttgctatgtaatgaagaaacggtgatgatacatattactgtagcactttagacatgtttaatgaaaaatttatttactctttatgtaaagaacagtaatacggacaatattcacagcttcacataatcacactagcagcaccatcatttctcttatgcctatacttaagctaaaatgtgaattttaaaacttcattttagagttgattttgtgttttttttttcaatatagtttattttacagcatttgctttcaaatcgataaggacacgtcccacaaactattttttaagttgttaataaatggttcgcataaacgtaagtataaacaaaacgatggaatcgtaaatatcgagaaaattgcatatctatcatcgtataagatgggattagctcaaataccattactcaaatgggcttcactgaaaaaacaatcctcaaccaagatatctttgctcaaataccatcccaggcgaaaatgccccttagcacttcttcttcctccctccctccttcgttgaataggttgacggtatagatggccataaggcccgcccggcacggcctagcccaggcactggctaggcacttcatgcccacgggctacacctcaggcccaggcacggcccaccagtagtcgggccgtttcgtgccggcctgagccctgaagacacgtgtggcccatcgtgccttctttaaaataagtttatttcccctccatcctttttgggttgtgacatatatatagctaaaataagtctattttacgtcccaactctttaggccatgccatataatatgtctattattcctccctattctttgtgccgtaccacacatagggttgaaataagtctgttttgcatccctgaacttcgtgccggcctagcgtgccgaggtagcagcccgggcacgacactgctgttgggccggccgggccaaatcactgggccttgggccatatggtcatctaccgtcgagggcaacgagtcagggtggggcggcaacgcgcgacggcggccagcgagtcggggcggggctaaagtgtgtgacaatgtccgagactacacgagcgacgacggtgaggcagtggagccggtggtggtcgccggtgaactattcagccactggagggagggagagaggaagaagaaaacctaaggggaatttccatccaggaaggtatttgagcaaaaacattttggttgaggatggtattctagcgtagcccatttaagtaatagtatttgagtgaatcccatcttatgcgatggtagatatgcaattttctcgtaaatatctaattagatgacaatgacagagatgcactattatagtcgtcgttgcgccaaaagcaactaactgatactacatccatcccaaaatatagtaacctagtacttcctccgttttacaatgtaagtcattctagcatttcccacattcataatctagatagatatatatgtctagattcattaacatcaatatgaatatgagaaatgctagaatgacttacattatgaaacggagggagtacattacatgatgggacatataggaataagttcacctgccgtccctcaactttacacagagtttttttgacatcccttatccacatactagaaatcttcacccctaaactatacaaaaccgtctaatttagatcccatggcagcattgatgcctagtttcgctgacgtggcatcctagtcagcacaaataaaataaaatgtggggcccacatgtcagtgagagaaaatgatgtgggccccacatctcctctttcttttcattttctcttctcttctctcgagcaagcgtggcgacagatgggggagaggcggtcagcggcggagcaggggcggtggccggcagagcgggcgcgacgggggcagagctggcccagcgggcgggcgagcgcacggagaagaagctaggcggcggccggcggagcgggctgtcgtaggctctccggaccttccattataattgagagatgaagtgaataattcaagtcatcaaacaagcataatgaaatatccgacgcctcgagagaggaatattggagatattgctaggcctttagcttgccagtcaacttcagcctgagatgtgcccgtcaaaccactcgaaggcggcgaccagatgtgttacacattcaggagacttgacaaaaatggctaaagttctacaacatctcaaatatttctaactcatactcatgtgaatctagttcccaggatgtgcactagattcacactttcatctcaagcatgattatacatagcaaacacaaataagatgaaagcatctactttagttacattggccgaccggccaaataaataatagaacagcggaagcttgtctacccaatccacaagcacaccgactaggggtttacccattatgttcaagtcctagaagaagcagtcgataacccgcatcactcaaagactaagtctaaatcctgcaagcaaaagttaattcaacagcaagagtcagtacattattagaaataatgtactggcaagcaccaagacaagcctaacaccctacttgcaaggtatataatcaaggaaggcatagtatggttctttttagcataaagcaagttttatttgcataaaacacattcaaaacggatttgctttcaaataaaatttcagcaagctagtacttagcatatgggcatcaaagtaggcattaatcatgtataaatattcacctcattgccatccatggcagcaaggagatcattctcaaatctcatcacaatttgaaggtaaatttcagcatttaggagaataaacacaagtctatactcaatacatatccacacgccgctcatgaccgcgagcacggctaatcgattagttttaactctgcagagtttgtacactttacccacatgatgcgaaataataatcatgcaagagcatggcacgcgatacataagtacccgatttattacccgcaacaaagcttttccaaaattcatgatttagccttacaccagcacgatacgtgttcctccatcctagtcatactggaaatatgacctagaaccgttaagtggcgggcccacgccttgaacttaacgccgtggtggcggacacaacgggaacccacccacgtggcacaataccgttgtattggacagacttagtcacctaaactaccacgtcggggtaaataggaagttcctctgagttatccgaactcatacacaccggcctaccagaatgtaaggctaaaccataaataatttactaagcttgggctatcccatactagcacatgtggttgtactgtatacgaaatgaactgatattgagtgaagtccttaggtcggtttgggcgcactctccccctatcggtacacaactaatcaccatatgtgcaccacttgaggcccaaacctaaaatccatgttttccaccattttatttatcaaaatcacaagtattaaagttttgtccagattaattaaaaatcaattttcatgtttgaaatgagcccataatgacaaggaagaccattctaagcatggctaagctttatagtaacctagtgtcaccaaaactcatatataaagtggtatagccatattgttcctaaggttaggaatgaggaatatggatatatgtggagttaaggtgataatgcaaataataggagtttatctaacaagtttaacaaaattttaatttattagtgtacaatcgacatgcaagatttgcaaacattttcaataacctccaaaagataggttcaaagtgatcaaagagagggaggtgggacttgccttgaatcaggaaaatgtcagcacctaaatcacttcttcaccgattaagcaatcatctatacaaagtatacgttatgcaattaaacaccgaaatatgcgaaaaatccaaaatgttctaaaatgcatgatttgtgcacagagatcaggtactggtataaaatgaatttaggtgaaagaatttctattttatctcattttatttgggagttatgaattttagaagtttcgtcggtatagtgtaggatttacttagttactattgtgaaatgctgttgtaaggtgattcttattaagtttatgttttctggggtgaagatatttgttttctaagactaacacatttggtttcataatttttagagttaatatgaattatttatgtattttacaagttttaacgtgttctaggcatatagtccctatgtgtacatggctttggagatttaggtccagaacttgctctaacttgctagtgttgtataaaatgagtattttagttaactaatctaatcttagtttataaaattttagtgttcaaattactttacttcacattttataagctaggggatgttctatgttagaaacttaagatatcaatctggagattattatatgagttaaggatactaagttttggtggaaggggatggatctatgccttcactggttcaacaagttttatttggatttatttggagctaccaagcatatatatactttttcatatgtattgtttaaccactactatgtgtttagtacctattctaccaaattaaggttcagagccatggtctgtaagagggtgctataattcactctactaggttgaagtatattacttactggttctatagaaaatttggttcacttcatttagactatagatgaattttctacaaatgttacaatttaaggtatgctccatgttgcttataacttacttaaatacttaggggttttcattatactgtaagtatgtctttttattttataacattgaagtgcacaaccctatgattctactgaatttgggtttactcaaaaaggatctaagatgaattttatataaacttctaaagttcagcttatgtaaaactagtcattttaaaggtaatagttttagaggcattcgatgtatagtatgtatactatttcattttgctttataggagaacataagttggtggatctgtagaaactgagtttgctccaaaatgagttgaaatgaattttgtatgcattttataaatttgtgcatgctttatgtgtgatttaacttggataaattttagaggctaaatttgtactgtgagtgcaagtttttattccataacactaaagttcacaatttggtgagttgacagaaatttgtatcatcttaaaatgagctatatttaattttatatggattttacaagttttaggtactttccttttataatttcagatttttgtttccaaggggtccactgtcagtgaaagatcaatatacaaaaagatccctgaggtttctaagaatcaacccgcagacctagcctcatatgtcagtgagttgaaaagttgcacattaatccttatagttgtttaaattctcgaaacaaggtccctgacttcttttctcatgcacagaggcagaacagccatggctgagctcgatctcgagctcaccggcgacaaacgatggctcgtttgggggtgcaaccaaaatacaaaatgaagatcatgttattgcgattccattcctctacttttctcggtcagtggacatcggagtaacgccggcggcgagtccgaaaggaggatgttttcggggggtgatgcatgtgcttctacaatcatgtattggttaattgggtgcatacatgtatgttctacaggctgaaggatgctcaccgagatgctagacatggctggggtagctaggttgatgacggcggctcgtgtaacggctcggcggcggcaagaacctccgggtgaacggcgatggctcaatcagctccaagaactatcatgcatgtgtgtccatgaggttagagaggccccagagatgctactgatgcatggaattgggttggtactcaccggagggggtggattcggcaacggcgacggtgaccggaggtggagaagacggtggacgatctccacactcgtagcaccatccttcgagattcttgaggggaaatggagaggaggttgaggcgaagacgctggcgcgacagcttggcccggcttggtccagataagcgggaacggcgatgatgtcactgcggcggtgcacagagcgcgctctagagcgaccatgacatggcggcgttcccgctgctgtagaagatgaaatggaatgggatcaaaaccaaagttgttcgtcatggtgagatgagaatggaacgagtatgagttagagatgaagagggctcgacgacggttggcgatgtccctcttcttggcggccggcgacgaaagagaggtggagagggagagctggagcttcctccctcggttggatcggtactgggatggtgggtgaagaatggtgacgcagatgggtggaggtgaagcctcggttcggcgctgccacgtcgaggccacgcgtcgtacacagccggcgccaatctctctctctcggctgtctctggtcggctgcaagatttgcacagggtgaggacgagccagagtggctgccaagtgggtccaggtcgtggcaaactaagctagggtgagagggttgggcagaaacgtgggtgaacaaaaggtttgaatgattttaaggattatttctctctcccactttagtatttcaattatttaatttgtgggtagaataatttagtgtggatttttctgaaggtagatgaagatacctagattccattttctttggttgcactcaaaaattatggatagattactcacagaaattagaggaatatgggttctttggaaactagttcgaatttttaggagacctaaacagagaagataaattctggaaaaattatttttattcatgataaattacctagcatttgaataaattattttacttatacacttttatgcagttaaattcacttttagacaaagtatggttttagccgattaagaactacagttaatctagtttttattagtttgactgatttatttgaggtaccaaatttagttattaaattataccaaaattacagtgagttgtatgtgttgattagagcctacatgaattttcccatgattttatcttgctcgcaggacttatgtcttatatgtgtttccctttcctaaatgcatgtaaatgtttataaaagttatatttggactctcattaacatgaggtgatgttgatatgttagaattacagtttaccttacacatgtcataagctccttccctatttatgcataagtttactttagtattaaattaagagaatgcttatagagatgattaagatagaatataccctatatgatataatttatttgttcactttcatgttcatgacatgtcttcagatggatgtccaaattagttttgtgaggcttgacattagccatgttgatttttttttaaggtgtatggtttctgtgtattattttccattagttagcactaggccctaatggtttagttgtttgtctagattgcaattatattcatgagacctattatgaaatgcaaatcgaaaatccaaatgcatatgaaggactcaagtcaaaatatgatttatgcaagtatgcatgctttcacttgggttgcatccaagtcctaggttaaagatgaaaaagtttttaatttgttctcaaattttattcatgcaagagttggatcaactccacctaggtttaaaatggaaatttttggtttacaaaattgaagaacttccctttcaactagttttgatggaaattccttaatcctagaattcaggtatgttacacgggcgcggcgggcaggcaagcgcgcgggaaagaagctacgcggcgggtggcggcaggcaaagcgggcatggtggcaagcggagttggcgcggcgagcgggcgagcgcgtggggaagaatctatgcggggggcggaggccggctcccctcgtgacttcgtgggcgtccatacctccgccgccgatgtccctccaccatcgccgatgttgtgctcgtcttgcatggagatcccctcgcgacttcgcggcggcgggcaagtacggtgggcgagcatgccggcgggcagagcaaccccgtcctcatcgtgctcctccccttcgtcggaagcgagagcagcagcgaggcatcaggcggaaaacgagcacggttgcgggctcgctgagatgaaggcggc

SEQ ID NO: 9538 - DNA, 49005 bp, Oryza sativa
cactccgattccgcgcgggcctaccactacgctcgcccgtgacccacccatcgccgctccgtatacctgccaccggcctccctcacttaagaagagaatagacaagagagaaaagaaaagacaagaagaagaaaagagaaggaaaaaaaaagtgcaactgacatgtgggccccacgtattttttttaaaagttttgctgactaggatgccacatcaacaaatccacccatatatactgccataggaccttgagtgcacggtttgtgtgagttcagaggtatacatttctgattttgtggttaagggacctcaaaaaatatggctgttaagttgagggacctctggtgaacttattccggacatatatgtccagatccatagtactataatatgtcacatcccgtactagtttgctatattttgtgatggatgatgtatttgagagatagatcatatcggccgatgatgtatgaacgccgatgggcaccatagtcccttttatggacgaagctagtagctgatactctccttttagattatttatcattctaggattggacttaagtcaagtatttccacgcctatatataacgtgtttatatgactaggtcccaccctaactcagctggattgactgcagtcaactcgccacctgagctgaaaccaggcacaatactatcctggatctcgggtacttcgctattgtaaattgatgaacacgttatattagtattacagttcaaaaattaaagtacgcgattcaaacacgacatcaaggcaagaaatctaaagtaaccttatttcataacaaaatttggcccaattactcgcttggggcaataagctagaccaacaaactaggaagaagaaaatcagacaacagtattgcaaacagcttccaccacctcttatgctgtagcatgcttgtaaagtaaagacaaatctagggttgatccagccttcatgctctattaggatacaaatctacatgctccgctaagatatgttggttactttcatgtccgatcgcttaaacgttgtttttttttaccaaggcgccgaaggagcttcagaaaacatactaaatacaatgcaatcagagacctcatttgtgccaatcaaacaatacaagtgaactcttcatctaaataaatccttatccataaccaaaaatcatcttctttcatgatccaaagaagatgggcttaccaaggtagtgaagtattcatcatcctcgactaactcaaaaccttctcatagtgtgtaaatgaattccctaacgtagaaaaatctcccaaataacatgtcacaaaggtatggtaggtgtggcttaacaagggttaattagatttatgccattacaaatttcacgattaaaatataccatcactattcacatatttgtaaccatgcaatcacaatttcacagttatttgatacataccactacttaccctttcatcttatttttcaaaagttttagaccaaaatgcccatgtcttcttccttcatcccctcctctctctcctgttcatctcatctgttcagatctagcctagccttaaccgatgcgcatccttgccggcggcggagatagtttgggcggcgccctcaccgacgttaaggaccaccacagcaacgagcgccttcaacgcatgttctagcaggagttcgacacgcatgttgtggaagaatatacgctcttttgtttttttcatttttattcataacgttcttggttttcttcatcatcaattgagaaggttacgcaaaaaaaaaagagatacaaaattcatgtgtgcgcacgtgatgaataatttatgctatgtcattgttacatgcatgtttcggtaaaacatacaacaaataaattctcttttatttgaaagaactagtcggtcgggatattatttcagcttaagaaacacaacgttgtccctcaaattgtcgcacaagcaggatgaccgttgcttgtgctatctcggggtcagatctgagacaaggaagaatatgaacaggagagagaggagaaaaggtgatgagggaagaagaagggcaatttgatccaaaaattaaaaaaaaaatagatgaaagggtaagtagtggcatgtatcaactaactatgaaattgtgatggcatggatataaatatgtaaatagtaatggtatatttcaaaaccatgaaagttgcaatggcacgggtttaaatattacattcactagttgtaagttaagcatggaacagtcacatgtctcagcatctgccactaagaaagtttgtctcaacatctgccactatgaaagttcgttgttaaggacagtccatctataaactttaatttttcgaatttatgtatctaaacatttacaattcttcttattcttaatccatacatacggcagggtatgacctatacgaacaataagacgaccaatcaagaaaaccatagttaaaaactaattttttaacttttaatttgttgggttggacgacaagttcggttatataatgctgaattataaaattaaaattctaccattgaacattctaataggaaatgatgacaatgtcattaataaaagtgagcaaattcaatcatttttatatttgcttttcaatgagatatatcctaaatggcaatatcctaacattgcggagttcatcactctgatgcgcaagacacaacgtaagctcaaatgttatatatatttaataaatcacttttaaaatttaagaatgagagcctatgcatcgttggaaattctaccattaaacattcaaaggaaatgatgacaaggttgttcatagtagtgagcaaatgtaattatttttatatttgcttttcaatgagatgtatcctaaatggcaagatcctaaccttgcggagtttatcactctaatgcgcaagatataacataagttcaaatgttatatatatttaataaataactttttaatatttgagaatgagaccctatccgtcattgaaaggggtggtggcagtgaatgtctttcttttgaagtggtaaaagtttacatatacatatatcaatagctaaacgttttatatgtattgcaggattgatcagttgctttcatttctcttatcgcctctaaatatatatcttatagaaaattataactcaaacatatagaaaaggcatctaaaggatattattttttctagataatatagttcattgcatgttgcgtttttttgttacaactatataggatatatagttctagttgatgcggcttaatatatgttgagttttatagtaatgactatattaagtgcgttataaatgcaaatgacatatcaatgattatgatcaaaacataagaaagatctaaatattattattttctatattatgactcactgcatattgagctttcgattataactatataaataggatatatcgataatactcacaatagcacatcatatcttcaaagcaggttgtggagaacaatcctatttatatttctataaaagtgtacggatgtgtgccaagtggaaaatatccaaatcccccctcccccctccttaaaaaatctactttagagtttttaatgctcatgagttatatccctatttagatacttttttatcctggtaaagggatttcttctaggacctctttaaggaatacctaccttttttccttcaccatgtctagaatcatcctagagaaataatattgacaattcaacatatctctgaacctttcctcttgcttgccttactttgagactttgagtagtctgcatgctctggactattgaatagatcaatgtggaaagtggcgagacggggaagcggcggcggtgtggatacggggtcctgcggcggcggtgaggtggggaggtggcggcgaggtggatctggcgtcccacgcggagctgccatcgcgtggcagcctctgcaccagcgcagcagctgaggacagccagtggcggccatgagcagaggtggaccctcgtcgtcgtctgctcgtggtgtatggctcatggcagcaggtttgaggaggacggttggccatctcctttgatgctggccaggcaaccccctctctgtggacatccttccctcctcagtggggagctccataggtggatggaggtagtggcttgacgacatgggatggcttaggtcaccgaagcggcgtggcccaactccgggctctccttggccggattcgacaaggaggctggtgggtagcagagtggaggagacctaagacaacacatagggaagttggtggcggggtagagaatgctggcggcgggcagggacgtctcccttgatgtcggtcgggtgtcgtctcgacttgtggagcatctcccgttctctatgggatgttctataggtaggtgggggtaacggtatgtcaataggggaaggcttgggctgccgaagctacatcgtccattaccgggctttttgccggattcggagctgaggtcggtggatggcagagcgaaggaagctagctcagcgttgcgggggagtgacaactggtaaaaggcgctggcggtgaggcgaagtggccagtcttgatgtcggtcggcggtgaggagccggaccggtacggcggaggacacacgctaccgaataccaatgttgggctggtggtattagatctggcaggcgacagaccacagaaacggggtgaagaggatcccaggcgaaagcctagcctagcgcttgattgggctggcagtagctacgcctttggacgcggtaaccctcttgagggtgttgccgaggtaccctccttcctcgacgggggtctctaggtgaaaaccgtgtccaatttctttggacggatgatgactgcgtcttttggcatcgcaaccttcatgggggcgttgtttttttggactatcattctatggtgttgctgtaagcctggcggcgaccggcatgcatagcggtggtcggtccgtcgttcggccctcctctctatagcttgtgtttgtgcggttggcgtgtggtgtcggggcgtgtgctttggtgcactttctttctcgagagctagctgttgatgaaaaactttgttgagactttttttcttctatctttataacatttggatgacttccttcactcaccccgacaaaaaaaacatggatatgtatatcctatagaatttctggcttcaggttttttttaacgaatttcaggcttcagccgtgctccaagtcatcgtatgaagtatgaaacttcagccatcatttaacagttaacatttttgtgccaaatattaactatatctctatctctactattataaaaattaaagatgtttttgccataattttgatacgttatctgtatttgaatcggttttaattttgtgtttcgactttaatctatatatagaaaaaaaataagtccgactcaaaaaaggttaaaaaaaagaaaggaaaaacgtccaaattaacgagcgataaaaaaaagcttccatctatctattatattatattattaaaacagccttgaaaggaggcaccacgttcgctgtgggggctagaaattcccacattaatcgaagaaaaagagaaaaatctacaccgttagatcgtagtggatctaaattataacggtatagattgatagctatatatatgtagtacaattgtagtttttaaattataataagttgtggatgaaatatagcaatctactactcatatttggaatcaggcatattagaatcggctttttttctttgatgaaaccgttaaggagtaggattaggattgcagccgcacgaattttttcttttctttaatgaaaccgttacggggtagaattgcagctgcccaggagccaagtgccgaccggcccttcatactctgtctggctgcacggctcttgtgcttagaattctagatttactgtgaaaagcataggctcatggtaaactgacacacgaaccccatatgagattaattaattttcagaaaaaaataaaatctgaaattagcaaaaaaaggaaaagaagagtttgagtagaaatacaatttaaaaataactaaaattcgaaattaaaattatgcaatattggaagaagagtctatataaaaacccaatacgaaaatattaaaattcagaataaaacaatagaaattataaaaaaaagaaaagaagagttcaagtaggaatacaatttaaaattaactgaaattcggaattaaatataagcaatattgaaataagagtacatataagaacccaataatactaattaagattcggaatgaaaaatagaataaaatccaaaattggacaaattaaaaagagagttcaagcaggaatacaatacgatattagttaaatttcgaaataaaaaataaaataaactctgaaattataaaaattaaaataagatttaaactaggatacaatttataaataattaaaattggtgataaaaaaataaagaccatctaaaacacatgacgggattaattgagtaacaggcctataaaatagtagagcggtggcggttgatgggatatctaaaatctattaataaaacactaaatagaatgataacgggcatgtcatgaagcaaccggtacaggcggttggtgggacttcggaaagtaaaaaaaaacaatgataaccatatttgatttttaaaatctcaatgataataaaaaggagaggcggcgggagggtcgtacaggagtacaatggcagagcggacgatggttggtgggacttctagaaagtaaaaaaatgaattccaacgataattatgttcgatttttagaatcccaatggtaataaagagtaggcagcggacgggtcgtagaggagtatagtggcagcgtttgacgagatttctaaaaattataaaaaatggaatccaacgagacaataaattataaaaactataaggtccaaatttaaaaggttcgggcttctgaaaagtaaaaaaaataatgataaaatctcagtgagagtaaagaagggaggcagcgggcgagccgtattggagtacagtgacaaagtcgctgacgttttggtggaacttccaaaaagtaaaaaaaaagaacctaaacgataattatgtttgatttttaaaataccaatgacaataaagagaagaggtagtggatgggccgtagaggagtataatggcaacgtttgatgggacttttacaaattataaaaacgaaacccggcgggacaataaactctaaaaactatatgatccaatttttaaatgttccaagaagaattaatagaaacagtggtagatcgaggaagcaaataaagaaagatatgacataattaaggggtatcaactggcgtgtgacttttaaaaactataaaattaaaaacacaatgatgataaggtttggtccaacgagataattatttaataaattttaagtaaaattatattaaaaatatataattttgtatgggtgctagccgcgcaattgcgcgggtcacccagctagttgtcagtaaaaaaaagaaaaaaacatctcgtcgtaaaaaaaatagtccgactccagtagagaaagggaaaaaaatctcccagtaaaataaacaaaaaaaagtcggtttggtttttttgcaccggtattttttccccttttttctttgcacgcaaaagagttttttatgcgcacacggtaagtcttttggttttttgtccggctttttttaatccgatctgttcatcgcgtgcctctcgggcacttttggttttttttcgtcaatcttttttgtcgctggttttttctcctgtgcactttttgtttttctcatccggttttttaatcccatctgtttgccgcacgcctccctaggtgaaccctagcgccgcgccgccgccatatcgatcatgcattttctcctccaatttgattacaaaatcgattccccactcctctctcatcatttctccatgattttccctttgattcagtgccagatttaatctctgttttaccgttgccgatgatgacggcaatcttccccggtcatttttatcccgagttttacgctctgatcttggggaagacagaaagagtagatcgagtggatcaaaaaccctcgaccaatttgactggtcgagaaagattctgccagatttgatggggatatttgctctggctaccgtacgggcacgggattatcttcgggaggttgaagatggtaatcatcttcccagacacgggactatctttgggaggttgaagatggtaatcatatttgggaggtgaaagatggtagtcatattcgggatgttgaagatggtagtcggctgtgtgagttgggtttacggctctacttatggctgggtcgaagagaagcagaccaaatggagagaggtagcggactagcctagggctgaaaaggaaggaaggctttcggacgaaaatccaggaaatattttcattaacttttttaattataatctacagcgatcccaatattaagatttttattaactttttcaattatagtgtatgttgatcataatatttcaatttattgctcagctcttaatatatcactgaaaaaacgtctttacccattgcaacgcacgggtattttttttattttttctagtcaattattatgtctactactcttggtaaataatccctatctaccttctattgtgttgctaagccacctataacattttggttgctaaacaacttctactacgggaggtttgggcctaggcccgttttccctttttttggtgggggcacttctttttcttgacaggcaatgtggaccttatggaccaaatgggtgttgcgttttttttaaaaaaaaaaacttgctttctaattcatcccaaattcatatgcataaaagcttcaaacaaatatatagttcatgggtaattttatcatctttgagaaagtactgaaaggtatcacattttctaatgtaaaatttggtacatctagatacaaaatatcttgatgcaccaaaaattttaatataaaatttaggtacctcgaggtatttttctcaagtactataaaattgctatgtttctatatcaatttttttatacggtaagtttctaggtagatagttcacgtagaaagtttctatgcctaggtgggtttgtctttcttttcttttattgaacttgccttttgaacttattttaaattaacgttcataaaattctctactgcggatatttctatgtagaaacttttgagtcaataagaaggaacacatcccgaagtggaaaaaaggaccttaaggccctggtcgattaatcccaaaggaaaagggatgagagaggatttattccacatatattatgatgtggaattattctcatttaatctcctccaaacaagatctagggactaaactttaattcatgtcacatcagatgtttgaacattaatttagactattaaacatagactatttacaaaactaattgcataaataagagcttatctacgaaacaaattttttaagcctaattaatccataataagggaatgcctactggcatcacatagactaatcatggattaattagattcaatatattcgtctcgtgaattagtccaaggttatggaataggttttgtcattattctacgtttaatatttctaattagtgtccaaacatccgatgtgacaggaaaaaaaaaatttttagccccatcaaaactcgcccaagagaaaacgaacgtggactcgatgcacgtgtggagtgaacctgtcggaatgcgtttttgcgtggactgaaaacgcacccacgctcacccgcaccattagacgcgcacccccaacaattcacatcatggctcgcttgtccatgcccatacacgttgaaagccaccagctcgtccaccgtggcaatatcctctaaaattgctcaacgtgaacttgccacaggtgaggtgagcatgcgcgcgccacggccgcggcggtggccggccgacggcgacacgttgtgctagatgaggtggtgcatgacatccacggcttcaacagttcaacttccggagttgaactgtgcaaaaaatccgactcaggaatgcaggattgtccaagcacacacaaacaatctccaaaaatccaaatgaatcggtcgcatttcaactaattaaggctgcgtctagttggatccaaagtttggattttgattaaaattggagatgacgtgactgaaaagttatgtgtgtatggcaggttgatgtgatggaaaatgactgaagtttagatccaaacacagcctaaactgttttgacttgaattttcgacgagtgtcctgcatgcacatgcgtgaacacctcagttggagttgggtcactccgattgaaccagcaattggggccaagtggccaacgttgattgcatcagtgggcacacgatgacttcgttgcttctactgtgcagcgagtgatatatatgcgcgtgatatatatgcgcgcgtgcggctgacttccttgcttctactgtgcagcgagtgaattagagcagctagaatagtagactatataagagcaggtacaatagcaggctataagccagctgcaaacatattttaagtagataaatgatgagagagaagggcagctggctacagatttgtagccagctgcagcacggattccaagacgcagtgtgtatgacaggtgggaccaactattaatagtgtagtatgtaactattgtatgaatgagctattagattggctacagataaattggagctagtagttggctatactattgaacttgctctaagccaactataaacacatatcgaggagagatgaaagaaaagaagaaaaacagcagctataagcacggactacaagaaataatgtgtgtatgacaggtgagaccatgtattaatagtgtagtatacgtttatggataactattgtacagattgctaattaagtcgactatagttgatttgaagctagtaattggctatactattaaacttgctcttaagctgcagctgagctttgtcactgtcgcgcatcttagccgcacgccggaattccaaacgagttgcagccacgcgcgtgcgacaatacattgcgatctcgtcgtcgccattgtcgatcgatcagccagagaggtggccgatagttggctgtgaaacagtgaaagttgcagcaattctggaagctagctgctgcagagagtcaatcggagagaagacgacagaatagtcgacggttgagaagaacgttcagaaaagttgcttccatctatcttttcctgcgaagaaatgaaaatctgatgtggaaattagttagcagctataatatcgtcacgtgcacatgagtggccagagtccatcgtttgtcctatatgaagtcaaccgttgtcaaattttgaatttcaaattttatttcgaagttaattaacttggtgtcctttttaccgttggtttttaatcactggaaatatatactccctccatttttgtaaagaaaatcattttggacagcgacacgatctccaaaatgcaactttgactccttctttctataaaaatattattgaaaagtgatatatgtatacttttatgaaaatatttttcaatacaaatctattcatataatttttacattttcaaactcaacaacttaagagttattcataatttatattcccaatgtttgacttaaacactgtcctaaacaatttcctttacgagtacggagggagtatattgtaaaagttttaactacaatttttttattgctaataaattgtttttgtttataatctcatcttatagccaacaaatgaggcccgaggatataagctgtcagctgtcatcacgatcttttctcttatatatgttgttaactgccgataagattgactcgtcacaccatggtgcatggtgatctacaggaaagaagttatcagggaaaacttgattgtcattttgtcagagttccagtcaaactcaaagctacgagcattctgccatttcgagtcttggaaaggcacaggttagtgtatctactcgcattttggaaagtggcaagaaaaatatttcaaagatctagaagagagttactccgtaccttcaaaagatgatctagaaacgagccagtgatcagtgttggaagaaagaaaaatgacatactataataatcttataattgaaaaagaaactcgaatgatgttcaatactaataaactaatgatatttttaatcaataaaacaacgaaatactattaacattattcactttaaaaaataatcaaaaacaaattccatccggttattgttttaccgatagtacgtgtgaacattttgttttctttttagaaaatagattaaaccggcctctattcaaaatagatatacacaacgaacgtgcgaacaatttagcgaatattcagtagtccttcagagagaattgtcagaggtacgaactgcttaatggtgatcgaatcgacaaataatggattaaagacaatcaataaagcgcgccattccctaaaaaagaaaagacgagaactagcatgtaagagcatgcccaacagctacccaagaaccctccagcgcgcgtgagacaaaaaccagatgattgggaatgaaatatcgcttcttggaagtggggatcgatatatacggagaagggaacgagatattttgggagcagtcatagtgaatctgttggattcaatttttgaccaaaaatcctaaaatttcaggatagggaatgaaaaagggaagctattggtaatgctctaagtacgttcaaatcagctatattaattcatatgatgtacaagggatatatactcaccaataacattttccacacgatatgtagtctagttaattattattaactctgtctcaaaatataagagatttggtccgtataattagttaagagatgaggttgtattttacagatagtacgcgtgaacattttgggagaaaatgttattattctaccgagagtacgtgtgaacattttttgggacaatttagtttcagagagaattttcataggtacgagttgtttgatggtgattgactcgatgaataatcgattaaagacaagaactagcagataagtacgtagcacaaatcagcgtacgcataaggtgttgtttcttatacacttgcacagctcgaatataaacgattaaatccatacatcttagcactctaattaattgctgatacgatgttccaaaaaagaaaaagaaattgcagatatgattatgtgtagctttcgtcgttgaataatcaacacaaactagtccaaaggcaatcttacgtacgtcacaggggttcatggtcagtggtcagagaagactatgtagctttgactaatttactccaattatgctgctccttgttctctgttctcactttgcttacatcggcaaaatgctaacccacacgtaattaacaatttaacatgcttgctgtgtcaatcaaaattttactacttgtgaaagccgtacaattagtgtgtcattctcctgtatatattatggccattgatgggttaggttagaacagaaatagattatatacaaattaaacactgcatttgtgtttgttttccaggtaaccattaattttctagaaattaacgttgtaaaatttatgtttttaatcagccatgagaaatactttcatagcatccatatattgtgaaaaaatatgaatttatagatactgacagtcaaaattaaaaatgtttgacgaaatacaaaactaaaattacaagcaatttataaagcggagagtcctttttctttctataatagtatcaaatcttacagtataaaatgtagttttcacggatttatgtattcctacctaaaaacatgaatgagatgaggattattggtgaggagcagtcaatgcaccaaatcagccgccacatagttaagtattaccactaccagttgtagtgctatatgtagctttccagttgcctgattttactggagaactaaaatatttttagaggcagtcttggactccgacaggatgcttaatcatcgagatcaagacatgatggaccggtacacaatgttagaactaattaatcatgcatttcgtgttaaattagtgcacatgggtcgatcaggatcagtattagccgccgtagattagtacactctttacctaccgtcttggaagtatgtccctgctactccctcttggaagtacgtttttatgtcaatataaaaataacaacattcatactaccaaaatattttcagtgtcagttttaatgaaatgatttggtattgtagatattaccaaatttttctataaatttaatcaaacttaagaattttttactatgagaaaacatcaaatcgtcaagcgagtagaagactattagctgagtggacaggggaatcgaacctctggtatgtccgacatcccggatagaacaaaaaagactattagctcatttctgatactaagcactaatttatttccattttccttttctttttgttggtttatggtattccggttggatttggatcagattcttcatctagaaacagcagtgttgagagatttgacttggagagtcttggtcaaacttagtgcgttgcaaagtcttcatcctccctaccaatccaaggatggctgcacatctggactttcaaagcatttccgtacacacacataatgcaagatcccgatccacctaatgtaagaggacagtacgtaagaggatccggttccgttacaaacagggcgtgaattcaaccgagaattatcactgctataatcgattacattatggatctgtttagttggtgaaataaaaatattttagtgtcacattggatgtttgaccggatgttggaaggagttttcgaacacgaatgaaaaaactaatttcataactcgcctggaaaccgtgaaacgaatattttgagcataattaagccgtcattagcatatgtaggttactgtagcacttatggctaatcatggactaattaggctcaaaagattcgtctcgtgatttacatgcaaactgtacaattagtttttctttttatctatatttaatgctccatgcatgtgtcaaaagattcaatgtgatgtttttatgaaaagtttttagggaactaatcaaggcctatatttacaaattactacctccgtcccaaaataagtgtagccgtggatatccgtgcccaacgtttgatcgtccgtcttatttaaaaattttttgaaaaatttgaaaatatttagtcacacataaagtattattcatgttttatcatctaatagcaataaaaatactaatcataaaaaatttttaaataaaacaaatggtcaaacgttaaacgtgaatattataaaactgcacttattttgagacggagggagtacatgtcctgatggcaggatggcaacatatggacgacgagcaacatcacgtatcagcgtcgcgtgtcaccgcgggcagagcatatatgcttgtgatgcccatcgacggatgattgacagactcatcaagatggacacagaaaccagaaaaagaaaaattccccccgaatcgcctgaattttacaggaaaacagttcgtttcctttttaaaaatcgtgaaaaaggaatactagtgaaaaaggagaactgcatatggcgcacacaacacgagggaatacgcttctgcaggagagaatacgctttccagtccagctctcccatcatcacgctgaacaagctaccggccgccggccggcggttggtcaggcggtggccgccgtcagtctggtccggccaagtgtccatgattctgcaacgcgagaatgcaagccagctgtggcgtcgcctcgcgacagacagacaggccgaccggccggagaattattccctggcgcctgaagcctccaacgcattcggacgataatctgttcttattgtttgtcttatgcttatacttatgcatataaaccaaaattttaattttagaattttaattttaaatttgatttttgtttttcatcgtattttattttacaatgtttttttctcttaaatattcttttatttatttgttaataagcgattcggataagtatatgaataagcgaaacaatggagcttctagatggcgtgactggtcgtgcatgtcttcttcaaaagttgtacagtgttccatccgtcctaaaatatagttaattctaaaattcaaattttaccacaaatataacaatctaagataaacaaaaatattttttcactaaactgcccacacaagcatactacctattggttttattatagtcttgatctacacctaacacctcaccatcccaaaaagacgaacaaatctctctatccgtctccttaatatatgtctaatgtcttcctttaaaattgctacattttaaaatgaaggtaataatacaacaacttgtaaatataaatttagataagtagttctctaaacatatagatgtagctatagaaatacttatattttgggatgaatggagtagcatataaactttgaattttgagagttgattttatgattcttttttcatcataggatattttctacttaattttcaattgataatgacacaaatataaacattttatccttatatcattttttatccgtttatgttgctatggctgggtcatagcaggcatgattgatttatattatagtatggattattattacagattatctacttaaatatagtgtcaattcaaaattataaaaaataaatttaaaaaataaatcaaaataaattatctaagcaatatcaagttcttttaaacatgaaacaaataattcaacttaataatatgtcgaataaactaaaaagaacatgaagttttggtcgctgataatggaaactattttaatcccgcgagctcgagggatgttctcattaattttaaaaatgtcgaaaaagttacgaaaatttctcaaaaagtttaacagcactcatacaacatatatattccaccctagaaaaatcttatgtccaaaatcgactcgcacatttagatataaaagaagacaaattcagtgtataaataatagtgtattattatttacgcgaagtgagtatagctcaactggttaggttccttgtggtggaaccaaaccacctaggttcaaatcctagatttcacacgggtgctcgcatttatggctaattattctttcagtggtaggcgacgtacccgtcgacagcgaggcgcttgtggtgacttcgtcaatctcaagatatgccggcctagtctttcagaggtgctcataggggtagggtgtgcgtgtgtgcgttcataggggtgagtgtgcgcacgttgtgagcgcttgtgtttgtactgtgtttcaaaaaaatagtgtattatttacacacgaatttgtatcttttttctcagtgtgttggtcgaatttgattttgattttttttaactgatagatgtcactatactctatttttctcgttattttttctaaatctttttagaactatttatattagattttaaaaaagatacacgataggacatcaactcggattggttatagaattccattcctcgctgacaggtcagccagagttgaggccatggccattgttgagcagcaggagaattttctgatggcttatttggtttagaggaatttgaactcataggaatggaaaaaagagagaaataggaagatatgcacatatcaatctatatgaatttttccaaaaggtttgagtcgatgaaaattcccctatgttatctttttacaacttggagggaaagaaattttattttgatttttctatacctcatccctacaaatctaatgacatttgtagaaattaattcttaggaatccaaattatttatttttcctttaaacccaataagccctgaatttgtacggagctgaactgagctcctgtgttccatcaatcgggtttatgctgtcgcaccggagtaccggacacgcacattcttcagatcaaagcctcctcaaactttccaagattcttcttgttttcccttaaaataaaaaacctttccaagattctcggtgacgaaagacggttcaatcttgataaagcttccgttcgaccatcacacacagcctaactgaaactgtaggtctgtagctaccgtcctgatgccctttcctttcctcgtatggtaagttttccacaagcttttcacgcattggattcataattccagtgtaatccggttttgttccgtgaaatccaaacttttcggaccaggtcgaaaacacgaatcactcggtttttttaggctaagttcaaaaaaaatcaaactagattttaaatctccaacggaatttttctgtattttatcggttttttcgacgggtttcgtaaaatccgatgatatcgctcgtgaacggatttcgatccggtatcaagaatgtgaacttcggcgtcatgatcggtccggcgttcagctcactggccaccgccgtcgacgcgactccatggccgcgccatgggcgatgatgctttcctcttctccctctctatttttaggctttggaaggcaaagtgtgtgcaaagttgaggttgatccgggcgtgacgtgcgtgccatggcatgaccaaaaaccacatccagtcacgtggctcaaaatgcacggttttttgcaggcagcatgtgagcgtgtctgccggcgctcttttgctgtgtccaaatcctaacgacacagccacccgcgctcgtgtgcaaacttagtttttgattcctccccaaagtttgttgccttagctacaataataaatatccagaaagcacgaattatgttctaccaataccattaccaatatctactacggatattggtaataacacccttgaatattaataagctacttttttcgtttcagattataagttgtttcgactttcatcaaagttaaattatttcaagtttgattaagtttatatttttaacccaaaacaaatatattataaaaatacattcaattattaatttaataaaattaattgttatgataaatattattatatttatctaccaactcagttaaactcgaaatagtttgattttgaccaaagtgaaaaacgacttacaatctaaaatagatggaatattagtcctttatgatttttctactaagtagctcggtggtctctactggtagagctgatcactgtactattttccaaaagtataatagtactccctccgtttcaaaatgtttgacaccattgactttttagtatgtgtttgaccattcgtcttattcaaaaaatttaagtaattatttattctttttatattatttgatttattgttaaatatactttcatgtacacatataattttacatatttaacaaatttttttaataagacgaacggtcaaatatgtgctaaaaagtcaacggtgtcaaatattttaaaacggagggagtattttttttagaagctagagtccaagcgtttaaggctctcgccgagcagtccatctcccacttgtgcggtgtgttgacgaaattcactgacaggggagcatggggtgtgtgcttatataaacacggacactcgatttagctaatagctagctggagctcgatcctgaagagcagtatcagtgctcagctcactgttcatcatcaccctcacctcttctctctccctcccttaccttcctccatagacgactgcagctagctcgatcggagatcgaggccatgtccatggcggcggagagggtggaggctgccggcggcggcgacgacgactacacgcaggacggcacggtggacctccatggcaacccggtgctccggtccaagcgcggtggctggaaggcatgcggcttcgtcgtcggtaaggattgaagacgatgaactctctctcgtgcatccggttggattcagcatatatgcatgcagtgatctaattaatcctttcagcttgattaatctgtcatgaacaattcatggcagggtttctcctttctttcatgggttggcatatggtttaattacttgcaaattgattgatattcttggttagaaactagacatatcgaggcttgtgtttgatttgtttatatgccacgagcgtttgaacattttcctcatctgctcacccctcaccgcatgcggcgggtgcaggatttgggagatttgttttgataggatcgatgattgtttgttattttgtccggccaatcgccatggttttcattagctgccattttgtactcctgccatagtctttggtactactatttttataatctccctacctcgtgtctcagacaaaatatcctccttggtattataacctctacggtatctctcaaggacgtaagagtagagtacttcgtcatgcctgataaccttttttcacgaatacgcaaaaggtttgtgtttctttgttccaagaaggtagagaccaccatgtgcaatactagttgttaactggtcgcttgatcgcatcgttttctgtgaagtcagagtcaacatatcacagtgtatctgctcaaagtctctcacatggatagtaacatgtgctacagtatttctgtacttgcgccactttcctgtagaaatggttcttcagtgattgtgtatacatgtactgtactgactaatcagtcagagcatacggttcaagtggtcaacgctgacaagaagcaggacaaaatcaaaaacactatagtacaaggttttccctacctccttttcttttttaagggcctattcggattggagaaatttcacgggatttttgaaggaactgaactgttgttacctgtgaaaatcttgtaaaatcgaaggagccctaagatttctcctacatcttctgaatttctgatagataacaatacaagtacatggtgtgccaatcactgaagactgaagatgatatgtatgggcagtgtgtagctagcacagtaggaaaatgtcaaaaagttcagtatgttcaggaccactgaatttatcctactaggaacaggcgtgcatgattttctgaatttctgatagatacaccagcggtggctatgaactgaagaagctggatagaaacttcactgttgcaatatgcagtgctaatttaatacagtactacttctaatcctcccaaactttggagtgatcttttcatagattaggaaaaggtgtagttaaccaacttgaacatggactgccgttttgtctgaagtgttggttcgattcagacccagctgaaaaacaatttaaggcaggagtgagttagtttggattcctacggttaattactagcagttgatccaataacagtttgcgtcatcagagatgcaatttagactgaatctgacagggaaaaagcctaagaaattgtttggtgatggctgccctgtcctgtctgcttggagcgacaaataggagttggaaattgacctttgtgttaatcaacggtttagggtagggacccagctgatccctactatatgattgcttggaaagaggcgttttgttccagcccggttggaatctgtatctcatcgcattatttgttcatgacaagaaagaatgattatgttagtggctgtcaccttccaatgatcacaacacttattagctcgttgtaaatgtgctatcttctctgtcatagaggattcttgttttactttgacaaataacaaaagaagtacatgttcattgaaactggtttgcatgaacaacttgtccaaactgcaaaatgttttttttctaaataaaagagaagagttaaaacataggatgctctgttgcatggttgtgtggtggttatggtttggttagaaatgcagagaccatgagtcctgtggctcatgagagagaatggtacctcggtaaaaaatggttggttgatctccatgcatatattttcccaaccatacataaatctggtccttaattagttaactaaggttgtgtttttccccttttccccccaacagcccaacttaccttcctcttttttcccacgcacgtttttcaaacggctaaacgatatattttttaaaaaagttttctataggaaagttgctttaaaaaaatcatattaacctatttttctaaaacaataactaatacttaattaattatacaccaataagtcattctgttctacgtgcacgagggattagtcccaacggccactgccaaacacagcctaagaattcatgtgttccaaacagaatgtactgttactactgtataccatgttttaaagtgaattattgttgtgctgataatgaaaaaaaatgcagtgtacgaggtgttcgagagaatggcgtactacgggatatcgtcgaacctggtgctgtacctgacgacgaagctgcaccaggggactgtgtcgtcggcgaacaacgtcaccaactgggttggcaccatctggatgaccccgatcctcggcgcctacatcgccgacgcgcaccttggccgctaccgcaccttcatgatcgcctccctcatctacctcatcgtaagtccctcacctactccatctccctccatctacagcagagcacgagaatcttggaacagatcaaatgaactataccctctgtgctaaaatataaacatttttagcatcgtggcaagtcatacatttctaactttgatgattattaatagcaaaaaattgatgattaatagcaaaaaaaatataaaaaatcaatcatgtaaaattgatcttaccattaaacaaactattataatatatgtaactatttttatttaaaacatcttacttttatatatattgttggtcaaatagcatctcggatactgtgacaggatctaaaattacttatattttttaggacgcggggagtagaaatcaaaagctagaaaataaattagaaaccagaacttaaaaaatctattggacttttagattttcaaaagttagttacccaccagctgcttggattgctctcgtgttgaaaaatgcagtccctgtctgaagactgtacgaccatctagctgctctagcccacaaaaatcaagatgggctttagctcgaagcccacaaagtccagtgaaaaaacaaattgcaagcccaaatccagcacgactaattcaaaccaaatctgtagatttttgttaccaaatttgatcgatagattccgaatttttgaacgtcgctcgtctcgtctcgtctcgtgcaggggatgagcctgctgacgctggcggtgtcggtgccgtcgctgaagccgcccaagtgcggcgccggcacggcggacccgggctgctcggagaaggcgtcgagcctccagctgggcgtcttcttcctcgcgctctacatcctcgccgtcggcaccggcggcaccaagcccaacatctccaccatcggcgccgaccagttcgacgaccaccacccgcgggagcgccgccataagctctccttcttcaactggtggatgttcagcatcttcttcggcaccctcttcgccaacaccgtcctcgtctacctccaggacaacgtcggctggaccgtcggctacgcgctccccaccctcggcctcgccgtctccatcgccatcttcaccgccggcacgccgttctaccgccacaagcccacctccggcagcagcttcgccaggatggccagggtcatcgtcgccgccatccgcaagctcgccgtcgcgctgcccgacgacgcgagggagctccacgagcttgatgatgagtactacgccaagaagaagaccacgccgctgccgtacacgccgtacctgaagatcctgagcaaggcggcggtgaagacgagcacgacgtcgaggtggtcgctgagcacggtgacgcaggtggaggagacgaagcagatactcaagatgctgcccgtgctggcggtcacgttcgtgccggcggcgatgatggcgcaggtgaacacgctgttcgtgaagcagggcacgacgctggaccgccgcgtcggcggcgggggcttcgagatcccgccggctagcctgcaggcgttcgtgaccatctcgatgttggtgtccgtcgtgctgtacgaccgcgtgttcatgccgctcatggcgcgggcgaccgggaacccgcggggcatcacgctgctgcagcggatgggcgtggggctcgtcatccacatcgccatcatggggatcgcctccgtgacggagcggcacaggctcgccgtggcgcgggagcacggcatcgcggacagcaagggcaccaccatcccgctcaccatcttcgtgctcctcccgcagttcgtgctcatgggcgtcgccgacgcgttcctggaggtggccaagatcgagttcttctacgaccaggcgcccgaggggatgaagagcctgggcacgtcgtacgccatgaccagcctcggcgtcggcaacttcctcagcagcctgctgctgtcgacggtggcgcacgtcacgcgccgccatggcggcggcggcgggtggatccagaacaacctcaacgcgtcgcggctcgaccactactacgccttcttcgccgtcctcaactgcgtcaacctcgtcttcttcttcctcgtctgccgcctctacgtctacaacgccgaggtgtcccgcgtcgtcgacgtcggcggcagaggcggcggcgaaggcggcgaggtgctcaggcccaaggaggtggccatggtggacacaaatctatagaaaatgtatcgatcgatgatcaaatataccatgaaattaatatcaccttcagaaatgctaacaacagcggcttcagcttattttcagaacagtgaacatatggatgcactctgaccagaaaaaaaaacgaaatttttgtgcaatttcaaggcgaattgtgcagatgtcgaacagagcatttgttcatggctccttattgcaacagaattgtcgaacacacaaggtttttcatggacatatatacaacagagaacgtctagaatataaccttcatcgttaattcattctaaactagcaaattacccatacaaaattccatgctttatatatatatatatatgaggcaaagctattgccctctttaaaaaaaacatacaaaatggaaccgctttgtcgtgttcttagcaggcaacagtttttctttctaacatgtgggaagcacgggacgaagaggaggaggacgactcttcttttattgtactcgctctgtttcatcatattataagtcgttaacgttgattttttttcctagtcaaatttaaagattaactaagattatagaaaaatataatagtattttcaacacaaaacaaatatactattaaaatatattcaatattagatttaataaaactaatataatattttagatgtagcaaaattttctataaacttggtcaaatttaataaagtttgaccaggaaaaaaatctaacgaattataatatgaaacgggatgagcagtagtagtagagataagagagaccaaacgtaagaaaggaacgagctttctcagaattttggttgtgactttgccagagttcaatcaatcgtaacgttaacagacaggacggcattattagatttcttgggtggttcaaagtaggtaaagattcatgcaaactcttgatctgcaaatcctctatttttatttcaggggatgatgaatggtgctaatacaaatcatacgcaactatatctattataaaaacatgactaaatctcctataccacataatacatggatttgttaacagattcgaaattgctaaacgccctgttgtcctcatttcagagtctcaacaatcgtattttcttgatttattaaatccaaaaattaaaatatactccctttataaaaaaaactaatctcaatgtccagattcaaatatagaattgagttttttttctttttcacagagggagtaacaaataaaaaaaatactgatatgtacatgttctctgtagtctcgattataacctaacaatgtcagtattgtaattatttagaacataatataatacacagattgatgtagtagtttgatttgaaaagaaccccaggatttggtttagagtttagacaggattttgatagagttcctagaattttttttatttttaattttttttattaaaagttttacaaaaataattttccattttgaaaattgacggaagtggtcgcctaccgccctctgggagggcgatttttaaaaatcgccatcccagagggcggcgaaaatgacgtggcagacggccgttcgctctcgggcgacggccgtcaacgaaatttgcaggcggcccccttgccgccctccgctagggcgattttgtactgtgcggggggccgcctgcaaatgggcggcgagggggcatggaattttgcaggcggcccccttgccgccctgggggagggcgattttttcctccccctataaagcccagtcccccctctctgaaatttcattatattcactaaaaatccaaaaaaaacgaaagagagagagaggggagggcagcagaaggggagtggcgaagccctgctggttcgctcacttcatcacaggtttgctcccatacatcttttgcatttgtactaatatgttatgtttgagtatatatgttgcgttttagttttagttccatatattttagcatatctgtagcacacagcacatatgtgtagatccagagcatagaatataatagtatgaattgagacatagacagtagtgttaattgtaagatgtagtttagtttgatctggagaatgtaacctacttttagaattttggagaacaatattgtagagaatgtaacttagggcgtagtacagaaatgcgaggttaacgcagttattgatttcatcaggcacaatgtcaaataaggtcacatttcagatagttcacggtgaaggaaatattagatttggtccagatggtgttgatctgtcagattttgtaatgacatctaagggcatcgataggcctgcggagagaacatttcagtcaatttatagttggttgttgagaggatttagaatagaccaagaagtctacacaatgtcagtatcagttgtagtgagtcgtgcaacagaaggttatttttgggaactaatgccgatggacagcactgctgcttggagacggtatgtggaaatggcttttcaacggtcgtggcccctcgttatatttgtgtcggtacaagagaaagatataaatgtttcaatgcaaaccgaagatgtagagggtcctatcaatgcaggggatgttgttggaccatcgatgcaaaatgaagaaaatcaaccaagggaggagcaggccatgggcatggcggatgagggggagagagtcggtataattgttgatgaaatggagagggaagattcggataatgaggaagcggacgacgacgcatcatccgatgaggaaggtgatgtaatggccactgattgggcaaatgaggacttctctggacttgttatatcagagggtgatcatgtaccctgggagtataaggagaacgaggtaattgacggtgcaaggtatgctcataaggatgagatgaaggaggcggtgaagcattgggtagtttccttgcagagagagtttagggtggtcaagtcaacaaattatgtgtatgaagtgaggtgcatgaaggaagattgtccgtggcgtgtccatgcatataagggtaaatggaatgattattggaaagttagcattgtgaccgagcacaagtgctacttacaaggggtggagaagtatcaccgaaacatcacttcagcttttgtggcaagtgagatgtacaacagtgttgttggtaacattggctttgaaccaaaatcaattattaggcacatcgagaacaaattcaagtacaccataagctatgcaaaggcctagagagccaaacaaaagattattgagatgaggtatggcacatttgaagcttcttatgataatttgcctcgtttgttagccaccattgcccagaggaataataatacttactatgacctacatacatttacatcggttgatgatcgaacaaagagtgtgatgcaaagagcctttttctcattgggtgcttgcataaatgcttttgtgcattgtcgacctgttctatgcatagatggaacttttatgacaggtaaataccgaggtcagatattgacagcaattgggtgtgatgggaacaaccaggttgtacctatggcttttgcatttgtagagagtgagaacactgaaagctggtactggttcctagagagagtgcacattgcagttgtgcgtatgaggcccaacgtttgccttatacatgatcgtcatgcgggtatgttgcggactattgactacttgcagaacggttgggatgagaagggacttccagctaagtggcctgatgttcggagtcggtggtgcatgcgtcacatgggtgcaaatttctacaagcaattcaagaacaagcatcttatggagctctttaagaggctctgtgcacagaaccaagagaagaaatttaatgagttgtgggacaagttggatgagttgacaacgaagcaaacagatgagcaatctcgcagaccacaagttgaaggtgacgagcctcccatacctcttggtgcattacatgatgacccaccaacaatgagaaggaggtcagggtcgtccatcagaaatttcactcagtggattgagaatgagcctaaggagaagtggtctctattgttcgacaccgatggatctcggtatggcataatgacaaccaatttggcagaggtgtacaactgggtaatgcgaggagttcggatacttccattggttgctattgttgaattcatccttcacggcacgcaagcgtactttagggatcgatacaagaaaattggtctgtccatggccgataacaacatagtgtttggcaacgtagtgacaaagtacatggaagataaaatcaaaaaggcaaggagacatagagttgttgctcaaggcacacaagtgcatcggtatgaaataatgtgtgttgataggagcaggcgtggtatctatcgcaagcaagccgtgcaggaatgtgtcttgaaggcggatggtggatgtacctgcagttgtatgaagccgaagcttcatcaccttccttgctcacacgttcttgctgctgccggtgattgtggcatatctcccaatgtgtacgtctcaaattatttcaggaaagaaacaatctttcatacatggagtgaggagatatatgggttcgggatctcaggatcttacacaacgctgagtgcccaagttttttacattacagatccatctaagttaagggtgaaaaagggtcgacgccaaactagacgcatcagaaatgatatggatgagtcagaagcaggtgggaggactttacgctgcagcaagtgtgatctgcgcggccatacttacaagaaatgcccgaagaatgcagaagttccaagcggcgcagatgctagtccatctggacaggcaagtgatggtaggcgaccacctggtgaaggaacaacaagcaggcgcgcaaggccaaggcgtcgtcgcgcagcaggcgattccatggtgtaacaatgctatcgaacatttattacttatgtgttagtaattcgcttatgaacatttattacttatgttgaactaattatttatatgtttctgatcaatctatttgatgcaggtatggcgtacgacacaccggcgctgttgaaccgtgggattgacaggaaccaccgctcgttcctgtcagcagtcgagggtgcacagctcggcaccttccatccacgcacgtcgcgcgagtggttgcgtgtcgacctccgtcacgttccttggtacgcgtatgttcacatttcaactcaactttgctttgtgttgtactcatgtttgaagtttgctctatacaggttgcgtgcggcaggccttctaccactttgtaggcttgttgaggcggcggcggacgaccgtgacccagcgaagcggtgggatgcagaccggtcactccttgccgctctggtagaccgctggagacctgagacgcacacgttccaccttccctgtggggagatggctccgacactgcaggacgtgtcgtacctgctcgggctaccgctggcgggagcaccagttggtcccgtggacggtgtttttgggtggaaggaggatatcactgcgcgcttcgagcaggtgatgctggctccgacactgcaggacgtgtcgtacctgctcgggctaccgctggcgggagcaccagttggtcccgtggacggtgtttttgggtggaaggaggatatcactgcgcgcttcgagcaggtgatgcgccttccacacctaggaccggccaacacccttcctccgtactctacagtcgggcctagcaaggcttggttgctccagttcactgtaagtaaataagttgttattatcatacatgcttatttgcgatcaacagagtgttttgtactaacatttcattcttaattgtaggcggaccttctgcaccctgacgctgatgataactcggtccgacgctcccttgaggcgtacctgttgtggttgttcggttgggtgatgttcactagcacccacgggcacgttgtggacttccggctggtccactacgcacggtccatcgcggatgctcagccacaggacgtgccgcagtggagctggggttctgccgtgctagcagccacataccgtgccctctgtgaggcgtgcacgaagactgacgcgggagtgatcatcgctggctgccctatgttgcttcagctttgggcagccgagaagtttgccataggtcgaccagtggtggacagcgcaccctacggggttggtcgcagcgcgcagtggccagaggactgtcccacgatggggacttactggtgtcgacgtggggttagtgcaacttcgctgcgttataagtttatcagtcgtcttcttttttttcttcacataacatgtctaattccgatcatgtttattgcagcgtcgttacgctcacgtccaggtgagacgaggttacccggacttcgtgttcgagtttgaccgtctccagccgagcgacgtcatctgggagccgtacacagaagaggccgtcgctgcgagagcaccgctaggactttcgtcgttgtgcacacgcgaccaggcttactggctcaccatcctgccgatggtgttcgacattttcgttgagcctcactgcccgcagcgtgtgatgagacagttcggacttaggcagttgtttccgggcaacgtgcagccgaccgtcctccctgccgaccactcgtgagttcggattgttcatttctaaatttttatgataattactacatcgagccatataatttacctctcttcacaggttgactcgacggggacagctagcaggcgcactttgggctccacgtgtacagcagtacgttgatgactgggtgttagctacagaggaggtgatcaacgagctcttcccacacacggaggagaactaccatgactaccttcgctggtaccttcctcgcactcgtgcgcgtgtgaccttcactccagacgccccagagccgcacgttgccgttgtgacggacgcgtatcccacgcaccgtgaccgagactacttcgtgggggtacgtcgaatttgtattagttcttacaattatttcatttatcttgcataatataggacaactactgaattttttatttccatcttgcataggctgatgccgcacgggatatcagtgccgatatcaccgcagtccaagtgaggttgaacagaggtttgcacttgactgacgttgagcagagggtgaccttcgaccggatgcaggagaagatgcgtgcggtcatgcgcgtcttctcctgtcgcagcgccgtggacgtcgtacctccagctggtccggtacaaccacggcctcgcgcgcctaccgtcggagcaggacctcgacctacggtacctgtttcgcacggtactgctcagcccagaggtttcttaagttttgtttctgtttatgtacgaaaacatcagcccgtcgtaacttgatgttccatcctcgcaggacctcgtttgccttcgagcgcccctagcttcggagcagtgcgacctacagcaccggtttcgcacggtacagttcagcccagagattagttcatttttgtttcagcttttgcacgaatatgtcaccatgttttaacggcacgtttcctcatcgcaggacctcgtctgccttcgagcgcgttcgcaggcacgaccggcgcttccgcaagctccgcaggggcgttcgccacctcttcgggcgcgttcgccagctcttcctctcacggagcgtcgatccctcgcccacacggtactttactttttattaatactattaaatacctgtatgaaactgatggtccttgtccagcagaatttgcagccgggatcttcggtactggggcctcttcgtctcacgccggtaagactggtcctactagccagttctacgacgacgacttgcacggtgcacaccaccacgacgtactaggctcctctcagcttggaggagctccagaggcgcacactcaggagcagccagaggtcacacctgtacaggcaagacgggttggccgtgccgtacccccggaccgactcacgtactcccaggggcacattagggcgcagggtaggagggacaggggtaagaggcctcgtcagtagtgttctacctcttcagtccttatgtgaccgtttcttttggcttacaaacttgtaaagcagtactacttttgctattactactgcagtactacttgtgtttgtcttgtctacatagttcttttcattcatatggtgctagaacaacttatgctcacgacaacacactttcggcgcttcacggtagtgtcagatccagtagcgcgcacagtccacaacagcacacatgaaaagcggcagctcgagttgtcactatcaactttcggcgctgcctgttgacataaagtgaatcacgcccacgcgtgatcgtcttgtcacatctaatgaataatgtatcttattgagttcacatatattgcagtgaaaacgacgctatataattgacaatctgaaggcaacctcttcatatcttctttcccactagcacacaacacacaaaaatggaagcgccattccttgagcgtctcaactggcgaagcgatccttttgctggttggtttccaccatggtgtgaccgtcctttgtgcgattgtggggatggatgcatactcaagtcttccctcatgatacaaactcggggcaggagattcttccaatgcgcgaactttgatcaggtatgcttcatctattcgaagttcaaatggataaaaaaactaacttcttcgtacacaattgtaacatcttacgcagacatatcgtccaatgtgcaacttcatcgagtgggtagacatggagaacccacaaaacgacggaacccgtgcttacccacgtagtgaaacaagatcggactacctaaggtggaaggatgagcatgaacgtcgaattgctgctgaggctttagaatggcacgtaaatcccctaggactccccacgtggcgtgagcgtccggagtgtcgttgtggtgaccgttgtcaggtcataaggtccgtaaggcaccgaactcgaggacaaaggtgtttcgtgtgtccaaacattgtcgacgatgatttcgtggtaattacaactattcttttcatcactcctcagtactatcattaacttaactatcccataatggatgtacataggaggatgtaaggaaatgtcaattcgtacaatggattgacacagtcagagttacttcaagtggcgggctgataacgcaacctgaaccgaccatacagttcattcatgtttggatggagtacgaacgttgggtggaaattgcaagcttagactggaggaccaatccattagggttacctaaatggtccgagcgtccaaagtgtgggtgcagagatcgctggcaggtggctacatcctttgctgaacaaacatttcgaaggagatattttgtctgccccaatgtagacaacgatttcgttgtatgtctaaccatttacaaaatccgctatgatttgcacaaaattactacccaaactgaataacattactatttttacagggcaatccaaggatgggtggatttactcgatggatcgacaatgtcactccatcatatcatggccagaagataacatagtcagaaacacaagtagagtatcaacgattgaaggaccacgagaatgcaatgcattctgaccgacctagaaggtgccgataggttaccgcatgcttgattcgtcgggatcgacaaatttgtaccgtgtatcgatggcacttcttatctatcttatcattacaatgtttaattatggtggtgattttttgtatgcgtaagactaagggcctatttggattgctaccaaaaacatgccctaccaatattttggtaatttgaatagtacttgtgtttgatttcgattgaagcctattcattggtaatacgtaatctagatttgagattatgtagaacattcttcactacaattttacattttggcagcaaaccaaatatgatcaaatgcaattttaccttaccaaatatttggtagtgccaaaacttgcttatattttggcactaacaaaatatttgtacggtaacattccaaataggccctaaaaaataataaaattgtattttaccagtcttggagattttaatcttgtatagttttcaatataaaaagatttgataactattgatatttataaaaaatataaagcacagtataaattcgccctcccccagggcggcaagggggccgcctgcaaaattccaggccccccgccgcccatttgcaggcggccccccgcacagtacaaaatcgccctagcggagggcggcaagggggccgcctacaaatttcgttgacggccgtcgcccgagagcgaacggccgtctgccacgtcactttcgccgccctctgggatggcgatttttaaaaatcgccctcccagagggcggtaggcgaccacttctgtcaattttcaaaatgaaaaattattttttgtaaaacttttaataaaaaaaattaaaaataaaaaaaattcgagttcctacaagctcgcaccaaattcggcccatagaaagaacaaaaaaaaaaaaccccaaaaaagaagcccacagagaagaacaaaaataacccgtctcccccacgtccccaccccccacacgacgcgccctaaaatatccccaaaccctccaaatctccgccccccacctcccctccccgacgccgaaatcccccaaattccacccccgcctcctcctcctcctcgcgtcgcgagagaatccgaggcgcgcgagcgagaggaaggagagaaggtgagagcagcggcggagggaggagatggagtcggatcaggggaagctgttcatcggcggcatctcgtgggagaccaccgaggagaagctccgcgaccacttcgccgcctacggcgacgtctcccaggccgccgtcatgcgcgacaagctcaccggccgcccccgcggcttcggcttcgtcgtcttctccgacccttcctccgtcgacgccgccctcgtcgacccccacaccctcgacggccgcacggtatcccctctcaaaccctagcgaatattcgcgttggattccctcctctcaaggttcggttcggttcggtttcgtaggttgatgtgaagcgggcgctctcgcgggaggagcagcaggccgcgaaggcggcgaaccctagcgcgggggggaggcacgcctccggtgggggcggtggtgggggaggcgccggtggtggtggtggtggcggcggtggtgacgccggcggtgcgcggacgaagaagatcttcgtcggcgggctgccctccaacctgacggaggacgagttccggcagtacttccagacctacggggtcgtcaccgacgtcgtcgtcatgtacgaccagaacacgcagcggccgagggggttcgggttcatcaccttcgacgcggaggacgccgttgaccgcgtgctgcacaagaccttccatgacctgagcgggaagatggtggaggtgaagcgcgccctgcccagggaggccaaccctggctccggcagtggtggccgttccatgggaggcggcggtgggggttaccagagtaacaatgggccgaactccaattctgggggctatgatagcagaggtgacgctagcaggtatggtcaggcgcagcagggtagtggtggttatcccggttatggtgctggaggatatggtgctggtacggttggttatggatatgggcatgctaaccctggaactgcgtatgggaattatggggctggaggatttggaggtgttcctgctgggtatggtgggcattatggcaatccaaatgcgcctggttcaggttaccagggtggtcctccaggagcaaacagaggaccatggggtggtcaagctccgtctggttatggcactgggagttatggtggcaatgcaggctatgctgcttggaacaactcttctgctggaggtaatgcacccactagtcaggccgctggtgcaggcacaggctatgggagccagggctatggatatggtggatatggaggagatgcatcgtatggtaatcatggtggatatgggggttatggaggaaggggagatggtgctggcaatccagctgctggcggtggatctgggtatggtgctggctatggaagcgggaatggcggttctggttatccaaatgcttgggctgatccttcacaaggtggagggtttggggcttcagtcaatggagtgtctgaaggccaatcaaattatggcagtggttatggtggtgtgcaacctagggttgctcagtaaatgaggccattagagcatctatgagatgaaccagcaaaattgggcagtctatgtatgttgtgttaccctggcccctctgattgcttttggcctcttgaagatctcccatttgctggttaaatcagtatttctccgggttggaatgcttgaaccttttgcggcttactactagaatgtagtcaataactagcttctagctatactatggagtagctgtatcttgcgtaatgctttatttaagtttagccttatctgtcggtgtgctttgtcatgagtggaatttcagttgcttcgtctctagtttaaagctagagtagcttcactacttatggacaacaaactatctagttgtacctttattctacagaatcatatgtttgtggttgacagtagtatttatgctggattgtgctttacctgaatctgaaatgttctatctttggttgtttctctgtggtgtgctctagctcaccttgcagttaaggtgctgttgcgtattattccattaatattgattgtaacagatgacaatcctcaaacttctatgcagtgatagaggtgttttatactgtagctgcttctagcagtaagttcaggtgtagtgcaagtgcttttcatgtcattggaatgatatatcattaaagtatgtggtcgagctatgagtatgtttctgatatttggtatgtagatggataaacaagcatagtagaggcaaacaattagcccctacctgaagcaataagagcatattagcagcaagttggtagcgccaatttctaaggtagtatagatacagagaagtctgtgatactacttgatgaatgaaatacaggtagaaaccatagagtagaatactccaggcatttggcaagcaaaataatcatccttcctcgtacatttcctttctgtacaggttggatgcgatgccatttccttttagagcatgtccaagtggggccttttgaatcaactgcctggctgcctgagaaatggcagagacatcgactgattttgcttgatgggctgacgatttccaatcttgaagcatttgacacagaaagcaagcatcttgtttttaagcgcttcattttctgaaggatcttgtgctgtgcaacaagatggtggtatgtggaatcatgtttcactttcagttttatttggaaaagaaaagcattttcaccatggtacttgtaccaggaaagttgttcaagatgctatctgtcctcattttccgttcaatttagtaaatggtatattatagttgaaagaaagcattaccagctaccataggaagtattatgttttcattcaaaatcttgtcaattttggccagagttccatccccaatgtacagatcgacaatggtgaattactatcagtttagtaaataataataaattagaaggtttttcaaaagaataattccatgatctaatgtatgtttttacctttttagatacgcatatttgctagtaaaactagtgatgaaagttgtgtcatggagatctaggaaaagaacaacacttgtatacctagaggtgatgcattttttgaaaatctgttttactggcttaacaaatttagtcactaataaaactagtgatgaaagttgtgtcatggattagtgcacaagttttgcaaacagaatttggcttaaacaaacagtttggatgagtaattccttaactttttccccttatttactaaattgatgagcatgatttaagttgtacttacagtcttgcacactggcatgatgttttacaagtttttggaagtactggaaacctaggatccaatatcctagtttgagaaaacaacactcatattgcttgttcctgttaataagcctgggtagcatgttcatcgctcagctatgccttgctcggttgctattgttggatggatagaagtggaaaaaaggggggggagggaatcagtctatgattatatacttgtatggttcaatgtagattaaaatccaaggctttgacttaaggttcctacacttatgtacttcattgcaaatttaactgtgcatatagtacattactagccaaggtagtcaatactcaatagtattatatatttcttcatattgaataaggctcgcttcatagcttaacatatatgtaccacaattttattgtccactacattatatagtacataatcacaattgcttaccacttgctgtttcttgactattaaactatttagattaaaatgaccaatattttctaccttcttttgcaaatcagtttcattacagcacttctgttaaactaaaggtatactatagggtagatttaaggttatgtagttctgttttggcgttttgtttgaaccagttggattagtattatgaatccacatccttagtttattttattgcagaacacaaatagttgcatggcttatgcctgttggagttaataggtgttaaggtaaaacatgtaagtaaaaaaggttctccaggacttgcaatgatgcacctgtacactggatcaatctgatggaccagtatctgactttagaaatgacaataaccacactgatttaggagactcaagagtcaagatatttactgggtggagagagaaaacattagtgttagatttaacggctaagctttgtgtttgcatttaaccatttgtaaatgtgaaagcaatactatttttgacagaaaaatacaattttgattagtgtatctcgcacggttaacttgattaagatctaaaatactgcaacttcatttgtactaaccattagatgatttagttgctcagtgcctgtttgggacttcatgtgatataataacataatataaccagatcggcttatatattaaccttggagctcaatcactaagtcttcttctgtattatgacatggatatttggaaatgaccaagtgcaattcgatttacatgttctatttatgctatttcttggtgttgctttaaaacaaccatttaagtaatagctatgagaaataaattagtgccacttatttttcatgattttcaatatattttttgctttgttgctgtcaaatctcttagtaaacctgataaagatataaaattagaaatttgactgcagatgccatatatagtggatagctttattaccacactggtgccaagcaaaccaagtcatagtcagccaaacatctttgatatgtttttactcgagtatctgaaataaccaaacattttggagatatgttatcatcattctattgacctctttgcataccttgtttgcatggtatcaatgcaatggaatatgccttcgaggactttgctgaaagatcacctgcaagtacatcaaaaatcaagagatgattctggccgccatgtattatgaccacagtgactcgtgctcatccaatattcttcgtttctcgtatcttaatggaaaccctcacagtagcgttgccaccttatatcgaaggacaagttgtttgaagttggctaccaattggtgccctactttaccaattgtcagatggaagggttgagcgtacattaatctggagatgcttatcgagtttgttgcatgacaagtcaatatattctattgatgtggccaatatttgcacgatatgatttcttggcaagttttagtaacattttaactcattcttccagacaatagtgcaaatcgccgaactctctattttacttgttttgttgtcatggatgaaaggtttgcaagactttgttccagaggtgacgtttcctgtgagccttttacatagcattttctttttttacagaaccgtaattgacaaatttgcctaggttaccattgttcatgtacagcgattgaataggaagctcaccgttgtgttaattgaacaatccagtatctccagtttatcatgttaaatcatgtaatctctgcaattacatctatgcttagtaatacatatttcttcatacatacgctggcaatgttgaaactttataaactaacccagttagtgcaatatttgactgatggcattgaccataagctataaagtctgcccatctgtgaatgtatccacatttgcccttcatctacttcatgtttttctctggttattaaccatgttttgattacatatgaggatcaagccatcgttaactcataaataaattacaaattaatcggttagttagtacagtacttcatttgttttagattataattgtttcagattataagtcgttttgactttggtcaaagttaaactattttaagtttaactaagtttgtaaacaaacatagtactcattaaattatttatatttttataatatatttgttttgggttgaaaattttactttttttttttacaaacttgatcaaacttggatcagttttactttgatcaaagataaaacgaccaagggagcataagctagcctgataaaacacgagctggaattcaatggttgagctgcaagcccggcaccgaaatagttgagctccatttgggctcccctttttgggccgcttctgtcgtggtcgccgcgcgtctcctgcctcctcgacgtcgcccgctgcgcgcgcgctcgctccgtcgtcgccacggccgcccggaacggcggcgagatggggcgccaccagcgttcgggctccctctcggtgacctcctccgcgacgccctcgtccgacgccaccgagctcgacttcgccgccgccgccgacgtcggctgcccgttcggacgcgtcgacgcgctcggccccgtcgagctccgcgagaccgcctacgagatcttcttcatgtcctgccgctcctcctccggcgggaacaccgccggcgcagcagaggtgtcgtcgccggtggccgggccgaggggcggcggcggcagccgcgtcaagaaggcgctggggctcaaggcgaggcggctgtcgtcgtcgtcggcggcgatggtggcgcagccgatgatggtgcgcacgctgagccagacgtcggggccggcgtccccggggcgtgggcggcggccgatgacgtcggcggagatcatgcggcagcagatgcgcgtgaccgagcagagcgacgcgcggctgcggcggacgctgatgcgcgccgtcgtcgggcaggtcggcaggaggcccgacaccatcgtcctccccctcgagctcctccggcaactgaagccggcggagttcgccgacggcgaggagtaccaccagtggcagttccgccaggtgaagctcctcgaggccggcctcatcctccacccttccctccccctcgaccgcctcaactccgccgtgctccgcttccgcgaggtgatgcgtgccaccgagatccgcgccatcgacaccgccaagagctccgacgccatgcgcaccctcaccagcgccgtccacgccctcgcctggcgctccggcgtcggcagcggcggcggcgacgcctgccattgggccgacggctacccgctcaacgtcctcctctacgcctcgctcctccacgccatcttcgaccaccgcgactgcaccgtcgtgctcgacgaggtcgacgagctcctcgacctcatcaggaagacgtggccgacgctgggcgtcaccaggcccgtgcacaacgtgtgcctcgcgtgggcgttcttccagcagtacgtcgtcaccggccaggtcgagccggagctcgccgccgccgcgctcgccgtgctcgccgacgtcgcagccgacgccagggggacccgcgacgcggtgtacggcaaggcgctcctcggcgcgctcggcgccatgcaggagtggtccgagaagcggctgctggactaccacgacagctacgagaagggcatcggcggcgcccccaccgaggtcatggagatcctcctctccatctcgctcgccgccggcaagatcatcgccgaccgtgatgccgccgccgacgccgacgacgccgccaatttcgccggtgaccgcgtcgactactacatcaggtgttcgatgaagaacgccttcaccaaggtgaagttcttgggttcagaatcacaatttgtgttgcatcaattcatgttcgttttgattccagattctcgagagcggaatgggcgacggcgacggcgagccgggggtggtgctgacgcagctggcgagggacacggaggagctcgccgtcgtggagcggcggagcttcagcccggtgctgaggcggtggcacccggcgccggtggccgtcgcggcggtcaccctgcacggctgctacggcgtcgtgctgaggcagtacctcggcaaggtgaccatcctcacggaggagctcgtccgcgtgctccagtcggcgagcaggatggagaaggccatggcgcagatgacggcggaggacgccgccgactgccgcgacgaccgggccaaggccatcgtcggcgacatggagccctacgaggtggattccgtcgttatgggcttgctcaaggtgtggatggacgacaggttcaagatcaccatggactgcctcgccagagccaaagaaaccgaggtaatttcgtcgaacaccttgatgacgtccaacttgaaaaatcatttttcatacttaccattgatttgcaacaaaacgtgttagagctggataccaaaatccaaagatgaaccttttgccgggtcagcgatggagatgatgaagctggctaagtataccgtcgaagagttctccgagatcccggcgagcgcgaaagacgaggtggtgcaagacctcgtcgacggcctcgaggcgatcttccaagagtacatctccttcgtcgcctcgtgcggtgagacacatccactcacgtgacaagaagtcaacgataacagagtatcatatttgtagtgttcagatcaaacttacacgtctctgaatcataggggccaagcagaattacctcccaccgttgccaccattgacgaggtgcaaccaggactcgggcttcttcaagctgtggaggaagacggtgctgccgtcgtgccaagcgccggagggcggcccacgcggcgtcggcgttggcggcggctcgcaccacgtcccgcggccgtcgatcagccgcggcacgcagcgcctctacgtccgcctcaacacgctcgagtacgtcctcacgcacctccacgccatcgacaagtcgctcgtcgccgcgccgtcgccacgcttcgacggcgcgcgcgccgcggcgaagtcggcgatcgcccgcgtcgccgaggtggcggcgttccgcctcgtgttcctcgactcgcgccactccttctaccacggcctctacctccgcggcgtcgccgacacgcggatcaggccggcgctgcgcgcgctgaagcagaacctgacgttcctggtgtcggtgctcgccgacagggcgcagccagtggcggtgcgggaggtgatgagggcgtcgttcgaggcgttcctgatggtgctcctcgccggcggcggcgaccggagcttcgcgaggggggaccacgccatggtggaggaggacttccggagcctgaggcgcgcgttctgcacgtgcggcgaggggctcgtgccggaggaggtggtggcgcgcgaggccgaggcggcggagcgcgtcgtggagctcatggcgcggccgacggacgccctcatcgacgcgttcggcgtcgccacgtccgagtccatcgtcgccgccgtggggcgcggcggcgacgacggcgacggcggctacggcggcgtgacgccggtgccgccgacgtcgaggcggtgggacgccgccgacgcgaacacgatcctccgcgtgctctgccaccgcgacgacgaggccgccagccagtttctgaagcgcacgttccagctcgccaagcgacgatgatcatgcaaaaaaagcttcgcgtcgtcccgtctccaagctcagcaatggcgcagccgcgcagtgtatccatcggagttgaagaagacggtagctacacgccatacagctctagatttttgcgatctttgcagtcggaattaaacctcataatctctcgaacgaactgtaaacccaacacaaatacgaatatgtaaaattttctggcacggatctgaaagtttcaatattggtgtcattcctatgtagttacattcgaaagttttctagcgaaaaagcttacgataattttgttcagtcctccctccgtttctaaatatttgacgctattgacttttttaaatatgtttgaccgttcattttatttaaaaaatttaagtaattaataatttttttcctataatttgattcattgttaaatatacttatatgtatacatatagttttacatatttcacataagtttttgaataaggcgaacggtcaaacatgtgcttaaaaagtcaacgatgtcaaatatttagaaacggagagagtaatttcctacaacgcccactcgctccccatccacagtccccaccctcccactccacctcgctatgctctccgctgtatccgccctcgacgccgtcttcgctccacgcgccaccaccttcgcctaccacggctgccgtccgctacctccgctccatctccaatgcgtcctggttcttccacgtcgcgatcccacgccagccctttggcccttgccacgtccgccgcctcctcaccgccatctctcgtaaggttgtcgatggccgtccggaggcgaggaggcctttgaggggggacatggaggtcggcggcgagcgcgcatggagagggaggaggcaggctcgcccgctccgccccgccccacccagcagcgtgtagtgaggagaaatttttttaattattttctagcgtaactgaaatgtgggcctcatgttttttatcaaattgccaagtcaatgcctcatgggatgaataactattcaaaggagccacgtagatgccacatcagccaaaaactgtaactggcacgtgggccctcatgttttttattgaattggcacgttagcgccacgtcaacaccgcatatgacaaaaacctaatcaaaggagccatatatgcgtcacattagccaaaattggtgataataccacgaaaggatctcgtttgtactggttttataagtttgggatgtattgtatttggttttacagttaaatgacgattttgtaattcggtgttaaaagatgcgatagagagatctccggtgtactttctccattatcataagacgagatcttttgggacgctcatggcccagagttcttagcccgtgatgatgaagcctctgcctccggatgcttcgatcggcttctcggcccgccgcccctggtctcgtcgtcgtgccgctcgagacggactgcatgctccgccggccctagaattccctcctcctgaggtcgtcgccgcgccggcacggcgagccggcgagcgcggccacgggttcctaccggcgccgccgccgtccaccgtgagtttcttcactactgaaacaattccgtactagagtgtaaacaatgccgataaatttaggtatagatgtgtttgcaaattctgcattcgtcaaggcagctacaggattactgctactgaaaaaaactctgcattttggtattttattgcatgctatcttctttatggaattatggatatgtcacgtatatgagactgcataacaattactggtgggtttctttgttggcacagaatgctgccattcattaccagtgttttgataataggagatgagatgagatagttcagtaaatttttttagataatgggaatttataaaacctggcttctacaccaactggggtgtatacagccacagaatatccaagcaaacaagcttagttcatacacacaagttcacaaacaaaagaagcacaaaggctcaagcaccttacataaaactaaaagagcacaaagactccctacgcctttcaaagtgaaaagaccttccaaacaaactaaaaaccacattcctcctttaaccgctttctcatgttccatccatctttaccaaagaagtgcatgacagatgtctctaacagtttgcatccttccttcatcacatcgcgctcatcttctttaagcagcaaggaccattgtcgagcccaatacgtccccctgaaaataacctgcaagtaagagttaaaattggagccattgaagaccacatcatttctagaaatccacattgcccacaacaacgtcgcaatccctgtaaagatttggtactttagcctagactgtaaaccctttagccaaatcccaaacatattagcaacattgttaggcggatttatcccaaatgttataaaaagggtactccaaacaaatctagccacatgacaatcaaagaagagatgttgtatcgtttcattgtggttacaaaaacaacacttagtgctgcccttccaatttctttttgctagattgtccttcgtgagaatcactcccttctttaaataccagaggaagattttgtttttcaaaggaattctaagcttccaaattaaatccttcattggtactatattctcatacataatcattttatacatggaactaaccgaaaatatttcggttttgttaactttccaaataagcttgtctctatggtttgagagcctaacaagaaccactttagccactaggttaaaccatgcaaccaaattctcccccaccaaagcaactcaacatttaacggcactttatctataacatccgcaacaatagcattcttattccttacaagattgtataaattagggtacaacttttcgaaaggaaaatcaccaatccagcaatcctcccaaaatcttatttgagaaccatcccccaccttaaaggcaccgcctttaaaaaagacatccctcaccaccattagcccagcccagaaatgtgaatctccagggcatttctcgacttgtgtgatggtttttttttgtcaagtatttattcctaagaatgtcctgccaaaccccttcttcattgatgagtttgtacaaccatttgctaagcaagcatttgttttatatctctaagttctgtatacccaagccaccacattcctttggtttgcacaatacactccatcttactaacctatacttattatgttcatcacattgccagaaaaatctagatctataatagtctagctttttgagaatacccttagggatctcattaaggacagtaaatagctaagctgaaccatagcagatcaaactactctgatgctacatctgttcttggagattgaacatctgtttcttgtaccattacatggttccatggaacatatggcacatccctgaataacttattctgcattgacaggcaaccagagcatcaaacacgagcaacagggcagaaccaatgacgaattgcagtcgagcaccatgtctccgcattcgtgctcactccatccctccagcgcgtgaacgattccagcgatacgccatgcgctcatgaccctccttggtagccaattctgccaaataagctcaaaattctgtacttaagaccattctgtaaagctctttcagagtacgttgcagctcaacagtttattaattacctcacatgaatgcatgttgtgcagagttttaggaacaaccattgcaggagtcgtccagtaggtgcagcagttgttgcgtatcattctcggtggaaactgtgagtatgggatgaagtgtgctcctttctgtgtcctgaattgttccgtagcatcttagattttccccaattaaccaaacctgaagaaattttgagagcaacctgttatgccactggttgatcattaggcataagttctcttaatccgcatatggcactccctgttaatttatcaagagaaagtaagaattctgttgtccctgttttggaaaatgaaagattgttggccacattttctggcattttcgacttagtaaatgatagccctgcttgtttgtcattatgacctgcacacgaagggcggtttgtatcattttgacgtactgaaatttcaatcacatgcagaaaatggcaacaagtagtttttagctaagaaatttccatgtgccgaaaatgtttctgaatttcttgagtatagatgaatactgtgaattatactactatgtaaatactgttcgtagttacttttttttttactgcatgttaagaccaaacagcaagttcatatacactattgtaagtccttggtacttatggagttattgtacagt

SEQ ID NO: 9539 - DNA, 69439 bp, Oryza sativa
  unsure (1)..(69439): unsure at all n locations
tagtgcctatgaatggggctatacctaagacgggtgccttctttgtcgctgctctccgcctcctcgtcggagtctacatttggtaaccttgacgtcctccatcacctctcgtccctaagccagtgtaacactctaaaaattcaactaataaactgtggaccatagttgacgactgtcgaaaacttttattaaattgcatcataccgatggtacacctctcatttattgtagttattattggtgccaaccaaattaattcatggagtcctcaaaaccaaatcaaactatataaaataattaaaggaattaagttttgatttgattaataaaattaaatagatataagggagaagtgtaaacttataaaataaatatggtagaaccaaagcatctagaataaagttcatgaaagatattcctaattacttaattaaatcaactttgaaattaccattttaccctcctatttttttcctttttcctttccccgtttcttttaggcaaaatttgatacaggacaatcaaaaatcgtgtaattggctgagagacaccaaaaaatgtgacactgccgatggacactacaaaagttgtgtaattagttataggacaccgaagggattattttataattttcgggctaaaagaggggagagaaatttcgaattgacgggaatgtcccctctactccttcctcatggccgccatcaagcgctcccaggccaccttccacttctaccactaggccaccaccgcccagactcccgccgccgtcaaggtcgtcagccgcgtctttgccgaggccggattccgtagcggggacatcaagctcaccatcctccgcccggctccatccatgccgctcctcggccgcctccccacgcgcacccgcccacagcctcgccgacgagtatgcctccttggcacccttcaccgccacctccgccaccacatcaccgccgccgccgtcgtccttcttcactgtctgaaagccctgcacggcgccgccgacgttcagcatgttggcgaggccgatgggcacgaagctgatccgccgctccaacaagagctcgtaggtgaacggctcgagggtgagctcgaaggactcgttgcggcggagcagctgaagcttctgtgcctccacgaagtagacggtgaagcagtcgacaccgtcgccgttgccgccaccgcttccgtgcctccacgaagtaggcggtgaagcagtcgacgccgtcgcctttgccgccgccgccatgcctccactcggacttgtgcctgtatagctcgttaattcatcttctcctctctccttcacatttgtttctaggtagcttacttgctctaagcgatgataaattagtaatattcaattatccaccaaatgagcaattaattaccacatgactactgatatacaaacacagtccatctccttggtattcactattacataaaagcacttatgtgccgcttgggaaccgatcataggtaccggatatcccaaccggcactcagcaagtggcacagatgactttagtttggccatttgttgcattaattttgacaaacccatctagtagtcacatgcatgcaaagagattaattattacctccatatcaaagtacatgtcactcttaagtatgatttatcccatcacatttcatttaaatttctctctattctacccccaactaccactacactcctaaccatgtacttcctccgtcccactcactaaggcgcacacatattttaaattttaactctttaaatatttgatctgcaaatactttattataaattaaattttatttgatgaaaattatattattggattgtcatctatatttacttttatatgattatgattttgttgttacaaacattataatatatgagaaatttaaagtcaaagattagttttgaagagtgcatcaggtttgaccgtgtcttagtgagtgggagagaaggagtatcatttaaggatagtataattttttcttaaactttaatctatgctaaactgctaagttattcagaatgacggatgaattatctgagagacagatcgatgttgaaccatcctgtcaccttctgctagcttttgcaacagtagttaattactactccctccatcctataatataataagttttaaagttagacacggttactaggtagaagtgaatggtggagggttgtaattggattagtagtaaaggtaggtgggaaaaatgaacgatggagagttgtgattggttgagaagagaatattggtagagaagttgttatattttaggataaatcctgagagctaaaagttgttatattttggaacggatggactacttcattatagcccatagttagactgatgattgactaattgttagagcaaggtcaatagtatagccagctaaaagctataaaaataaccacatcagcaaattatagttagtgctaatagctagtgcatacaatagagatctactatcttctattgctacacagttcccatcaaccatgaacaaatgcattcggtagaatgaggtgaccccacccagcttcttgcgttgccatagcgtgcagccaacagcacttaaatgctttgccttggatagagtgagcagctagcgactaattagtcgcctgtttaatctctctcaccacctttttcacctccagctaagcatcaacgctgacatggtcatcctatcgccagcatctaccgtcttactgtacctgctctaagtacatgtgtgacagctcaggcatgtctcccgttctgctggacacgcatgattcagctgaagaaaaaaattgatataattggagcttttcctgctatcataccacgcttgcagttatgagctcgctaatccgagtacaactcgcagcatattctacacacgcaatatatctatctattatattattaaagaaatagaaaaagaagcttccacgttcactctcatggcttagaaattctcacattaatcggagaaaaaaaaaagcagagtccatatagaaatacaatttagaaaatagctgaaattcgaaattaaaaaaataaggaatattagaacataatagagtctatacaggaatttaaaactaactaaaatttggaataaacataataaaattaaaagtagagtttagagtccgtataaaaatacaatttacaaataactaaaattcaaaattaataaaaacatgggaagaagagtttaaagtcaatataggaatacaatttaaaagtaactcaaattcgaaattaaaaattaaagaatattgaaagatgagtttagagtccacatagaaatacaattagaaataataaaaattcataaataaaaataaataatattggaagaagagcgtagagtctatatagaaatataatttataaaaaattcggaattaaaaaatattaaaatacgagtctagagtccatatagaaatatatataatttacaaataactaaaatttgatattaaaaataattaataactaacacgtatataaaatacaatatgaatattactacacattagtagttttgtaaagttattgcaaaatttaaaattatgttgtcattttaatatatttgaataatataatgagaaaacatatatgctattatatgagagaaaatataatgatgctaaccgcgcaatctgtgtaggccaccatgctagtttataagtataacaacaacaataatagtccttgcacccacatgatggtgactagttagattaagcaaagtcttcttaaaacaaagaatgagtagtgataaaccaaataaatcgatcaataagacataaatgaccaagttggctgttaattaaacaaacatcatcacgtacgtactccccgtgaactcgtagtaggtataccggacggaacatgagtcagccattctattagatctgtcctcggaagatggaatccatgcaaaaaaaaaaaattcaccgacctgcacagccggagacgatcagctcgatatatcgatcgtgtcttcctccgtgtgtctgctcgctacgtacgcctctgccatgaaagaaccgactgcccgcatggccggcgtcgtccaccgtttcctcctcctcctcctcttcgtggcggccgccgtcatgccagcatcaaccaatgccgcagcgtcgtcgcagaccgacgcgctgctggcatggaaggccagcctgaccgacgtggccgcgctgtccgcctggacgcgcgccgcgccggtctgcggctggcgtggcgtggcctgcgacgccgccggcctcgtcgcgaggctgcggctcccgagcttgggcctccgcggcggcctcgatgagctcgacttcgcggcgctcccggcgctcaccgaactcgacctcaacgggaataacttcaccggcgccatcccggccagcatctcgcggttggtatccctcgcgtcgcttgacctcggcaacaacgggttcgtcggctccatcccgtcgcagatcggcgacctctccggcctcgtcgagctccgcctctacaacaacaacttcgtcggcaacatcccgcaccagctcagctggctccccaagattacccacttcgacctagggaataattggctgaccaacccggattatcgcaagttctcgacgatgcccaccgtcaagttcctgtcgctctttgccaactccctcaacggcagcttcccggagttcttcctcaggagcagcagcatcacctacctcgacctgtcgctgaacaatttctctgggtcaataccagacttgctgccagagaagctcccgaatctgacgcacctcaacttgtccatcaatgcgttctccggccgaattccggactcgctcaggaggttgacgaagctctagcatctgcgaattgagtacaacaatcccaccggtggcatccccaagttcctcgggtcgatggggcagttgagagttcttgtacttggcaacaacccgctcggcggtccgatcccgccggttcttggccagctccagatgctggaggagctccaagtaatggccgccgagcttgtttcaactctgccattgcagttggccgatcttatgaatctctctgtcctgaaccttgcctataacaagctctccggtaacttgccgctggcattcgcccggctgcaggcaatgagggtgttcagaatctcatccaacaatctcacgggtgatatcccgagctcgaattcttcggtgtggacagcaacatgttcactggaaatatcccaccagagcttggtaaggcaaggaaactgaatatgctgtccatgtacgacaatagattatccggcagcattcctccggcattggggagcttgacaagcttgaagtatcttgatctgtcagcgaataatctgacaggaggcattccatatgagttgggtcatctcagcaatttgcaattcctcaatcttagccataactccatttcggggccaattatgggaaatttgggaaacaatttcaagctgcagggagttggttcatcagggaattcctccaattgcagctctggctcagcattctgcaggctgctctccctcgagaatctagacctttcaaacaacaagctcactggtaagctgcccgactgctggtggaacctgcagaatctgcagttcatggacctctcccacaacgacttctcaggtgaaatctctgcactcgggacaagctacaattgttctcttcattcggtatatcttgctggcaacggtttcactggagtttttccatcaactttagagggatgtaagacactggtctccttagattttgggaataacaagttcttcggtaatattcctccttggattgggaaaggatttccttcgatgaggattcttatccttaaatcaaacaacttcactggtgaaattccttcggagttgtcgcagctttctcaacttcaactactagacatgagcaacaatggtctgacaggatcgattcccagatcttttagtaacctcacttccatgaagaataaaaaacttaatatctcctcaggaattattacaatggcttagttccgatgaaagaattgatacaatctggaaggggcaggagcaaatttttgaaataaaaatttctggattaaatttttttcaactacttacgggtatcgatttgtcaagtaactcattatcacaatgcatccctgatgagttaacgaacctccaaggccttcaatttttgaacttgtcaagaaaccatctgtcatgcagcatacctggaaacattggtagtttgaaaaatctcgagtcccttgacctctcgtcaaatgaactttcaggagctattcctccaagccttgccggtatatctacccttagcattttgaatctctcgaataataatctatcgggcaagataccctttgggaatcaacttcaaacccttactgacccatcgatatacaacaaaaatcctaggctatgtggttttccgttgaacatttcgtgcacaaattcttcacttgcatctgaagagagatattgtagaacatgcgaggaccaatatctatcctactttgtgatgtctggagtggtttccgggctttgtctgtggtttggaatgttcttttccatcgagaccttaaggtatgtcattatctgctttgttgatgccatacagtgtaaggttacgcagaaggtgtcctatattaatcaatttctttctagaggaaatacggcttagcatctgtgcagctgtgtttccgtaatgttaccttatgatgaagaagtatatttagctttctgttgttctgtaattggcatgtttcctttgtatattaagactaagaggaatttaaaatgctactttatcttatccaaaatcttatggctttattctggaaatactctatccggcagtattccagaaaagataggcagtttgaaacccttgtggtgttattcctccgagcatttcaaattcgttatgctttggtatgttaagtatctgaaatagggtgaggtaaccactgtaagtcaacttcagtcaattgtggatccatcagtctatagcaacaatctgcttctttgtggcttccctccatgcacctacactggataaaaaaatgaagaccataaagaaatctatgcgccattactttattctgtaatattattggcctttttttttgtgtgttttggctttagtttggagctctggttttacttaagccactgagttttcatttttcactttaccagatagaaagaagttgtgcataagcagtagacattaatgcactcttcagttgcaaatcagcaaccaaagaatcatacagttttcagtttatattggccatttttgaaatagttaattcccattcaaaaattaagtatattagatgcatttttatggcatgcatgtgttcacctgaatgaacagctgtgttctagctactctagtgtactatactcattcctactactattcttgttgtggttgtccgatgtctgcagccagcaacctcaccaattcgaattgaacttttcatgcatcatgttttctggaatacgcaaaaaattgtgcatttttgtattaaaactttgaaaaaagtgaagtattacaatattataattctgaaatgctatactcagggaaaaaaaaagaaatacactacgtcatgtcccacaccaccaccacaccctaagaaaacacagccacgaccaagaacctccaaaaggatgcctctaaaaaggttaagacattaaaaacaccaccatcgcccatcccaaaagatatggttttcgcctaaaagatcttattaaagaggggaagagaggcacctcgacaacaccttcaagagggttccggcgcctaaaggcgttgccgctgtcagcttaagattgggctggctttcgcctggcggaaccaaggtagccgtactgnnnnnnnngaggtgcggctggatcacctccttttcagggagagctaatgcttatgcttattgggtattttggtttgacactgcttcacgcccaaaaagaaggcagctacgtctgagctaaacttggatatggaagtcttctttcgtttagggtgaagtaagaccaacctcatgagcttattatcctatgtcggaacaaattagttaaacttgcacctttcttgttgctacctcaccaatcaccaatcttgctgacacgtgactgcaatagcaccaacgccgcttcgccggctgtcctccatacggttgtcatgctgccgacacgaccacaaccataaccatgaccaatcttgcgaccaaccactgttgcactatggcgaccaattattagccttcttcccatgccatcacctccatcagctcaccaagaaagggaggaggtgtgaccgccaccaaccgctacatgttggcagcctcgaccttcctttcctgtcgccatcttcaccgtcttgccatatgggactccccatgaccaggtaaacctatcaagaaggtgaggagctccatggagatgtgaaggcaccatagatagagagcgacccaccatcatcgctgcccgtgatggcggtgctatgtggccaaatccgggctcggggccccagatccagcttctgctccacccaacaccagctacgccgccacacgggttggcaaacagcaaacctccgtcgttgccatgcacgctggtgctccggtcgagtcgtcctcaaggcgtgttaaccctccgcctggcaacccctgtgcatctccatgcgcccaaggagaggccccatcgtcgccaccactggccagccgagcggccgttcgcgaggagaggcaagggccgccaccgtcacctgcgtaggcttccaccatcgtcgcccgtgccgacctcctcgacaccagctgtcgcggcatcccactgtcgctagccatcatggccttccacgcaggaacccgcgtgggactcccgccgttgatgctccatcgtgccagcaactccaaccagatctggttcagaggcggcggatccacctgacggaagactagatccggctacggcagcattgaatctgtggcctacacgctgcgtcatcttcccagcgatccatgcgccaagccaccttcgtcacgctgaaggcgaggcgccgccagggttcggccccgctgccgccatcccgacttgccgcacggttctctgacagcggcgaggagagggagaggggagagcggcggcggcgggtggtaggattcgccacccaggcgtggacgacacggagggtgctgcttggatttgagttttttttttttcatacatcatgttgaacgaaagagcagaagcattgccactcatttacagcatcacatacatttccgtcatccactgaatattcttctaattcacattcatagaaggaaaagggactgctgcagtgaacagttctttctaagatatgttgattttctctcagagaattatatggcaaagtcataaatttctccatttctcttctctgtcttacatttacaagtttattgtttagcctatgggggaaaataataatattaccacagggatagtaacaacgagcaatacaattgtacaaagttgatgaaagacaggttttgtgattcagtgtacagaataatttctatatatttatcagcagttaatgtaatatactatcctaagcttacccttggcattaatataatctgaggatgcatcttacaaatcactaactgcgaagttcccttcctcccctcctggtgctttacatctctgcacagatatatattcacttctggtagtctgttagcttgctaattgtgatcagtttgaatggttcagagaggtaggcttgagtatgcgcagaaatctcctgcgctacagatctcatggaaggcctggattcagggttcacccttgtgcaaccaagcgcgattctcacgatgaacacgacctcttctgcgagctgccctgttggagcatccagccgctggtctagtatgtccttgagcagtagatcatcttcttctgatgatgagatggctggcagggatgttaagaggtcacctgggtgctttcccatcatgacctctagcgcaaccacgccaaagctatacacatcgcacttctccgtcaccctcatcgtgtatgcgaattctgcaagaaataatcgaagtcggtaagtgttaatggtgcggtgccgtacttgtcggaatttgagcagttccttttcccaatgacaatctttcaaagttctgcaaatcttcaggacaggagtatgtggcaatctattcaataatgaccactctacttacagtaatgacttcagtactttcatgaatcacaataatgtgcaaaacaatcttaaatagatcggatctgagtttctttctctcattttttccttttttaaacaacagacaattcgacaactatatttcataactactgctcttcatttggtagttacttgcacaaaatgttcttttatggtcagaaatgtttgacagtttatcatacactacattactacctgggagtatcgaactaaatttagccatctggtttttcgttaattatgactgaaacatcccaaatgctatttggtgctaccataaggatctcactgaagcactttgaagtataactaggatttgatattataagctacatttcaaaaattgtatgcataagaaacatgtgacattttaaggaaaaaaatgttcaaatttaagaaaagtacctggagccatgtatccatatgatcctgccacagaagtccagttcgtcgatgcacccccaagcaacttcgccgtgccaaaatcacacaagcgcggctcaaagtctgactcaagcaggatattattaacagtaatatcacgatgaacgatggctggattgcagtcatgatgcaagtaagccagggcatgagccagcccctgcaccaccttcaccctcatgccccaatccatcttcttcttcccttcctccccatacaatgtcttccccaagctgcccctttccaagtactcatacaccaggtacatgtagtcaccactggtgcagaagccatggagcttgacaatgttgcggtggcggacctccgtcagcgccttgatctcgttctcgaagctcttcttgttcacatccggtatgtcacccgtgtcggcgacatggaagcgtttgacggccacaacctgcccactggagagctcagcccggtagacacttccgaaccctcctttgccgatgcagaaggtttcattgaagttgtccgtggcgttcacgatgtcgaagaatgtgaacttgccttccttttcccagattgtggactcatatgaataattggtgttagattccacctctttcttctctctaggcctcctcctgcataacagtatgatgcaagtaacaacggctagtagtaacaccactccaactactgacacaactgttgcaatgactactctcttgtgatgcccagaagatgatccggtagaactgatgtcacaaggagttagaccttgcacatcaccacagagccccgaattcccaacatatgcagaagctgaagcattctggaaaacattccctgacggtatactcccggtgagtcgattataagagaaatcaactgattcgaggcttgacatgcgagaaaaccctgccgggatcgaaccactgagctcattgtgtgataagttcagtctctgcagagttatcagcttctcaagatttggagggatcgcgcctgatagagaattgctgctcaaatcaagcaggatctgcagctgagccagattaccaagctcacttggtatctcccctgacaacctgttcttgctcaaatcaagcaatatcagagcatcaagcttgctaatggcaactggtatcgtcccatcaagcatgttccctgagaaatcgactttctgaagcttggaattgttgctcaagctcgccggaatcggcccggaaaaggagttatggctcaggttgagattgaagaccctgatatttcccaacacaggtggaatccctcctgtcagattatttccagccaaattgagatccttcaagcttgtcatgctcccaaatgccgccggaatgccgccggatatgcgattgccgtcgagatgcaggagtgtgaggttgatgcactgtccccaggcagacgacagctcgccggtgagcttgttcccggagacgtccaggtacaccagcttggggtgcacgccgaaggcctccgagatgtcgccggtgaagtggttctcctccagccggacacggaccagcgccgtgcagttcttcaggcacggcggcagcgcgccggtgaagttgttgtagttcgccgtgaggtggtccagcgcgaagccgtcgcagatgtggcgcggcagctcgccggagaagctgttgttggtgaagctcacgtgctgcaaggccaggcccttgccgaggtccgccgggatggtgccgctcatgtggttgtcgaacacggcgaggtactggaggctcctcagggccgtgatggtggctggcagctcgccgtgcagactgttggtgttgacgtcgaggctttgcaacgccgtcatgttgccaatctccggcgggattacgccggtgagattgttgaagaatagcgccaactttgtgagctgcttgaggttgccgaacgagctggggatcggtccggtgagcgagttcaccgacaaatccagctctgtcaggttctccagctcgccgagctctgccggaatggagcccgtaaacttgttggtgaataggtagaggatgttcagtttgctcgccttgccgagctccggcggaatcttgcctgtcaacgagttgttctgcacttggaaggatatgagctccggccagctcgtgaacaacaccggcgggatctcaccggtgaggttgttcgtggaaatgccgaagtaccgcattgcccgcatcccggcgaactccggcggcaagccaccggagagctggttcaaggacagctcgaagaaaatgagattcttcagatttcccagctgcgacggcagagttgaagagagccccgagttcttgatgtcgagccgctgcagcatctggagctggccaagaaccggcgggatcggcccgccgagctggttgtcgccgagttcaagaatcctcaactgcggcatcgacccgaggaactccgggacgccgccggtgagattgttggcggccatccgcaggtcctgcagcttcgtcaacttcccaagcgacgccggaatcgggccggagaacgcattgatggacaggttgaggtacctcagattcgggagcttctccggcagcgtgtccggtatcttcccgaacagagtgttctgcgacaggtcgaggtaggtgacgttgccgcttttgaggatgaactccgggaagctgccattgaaggagttgaggtagagcgacatgaacgtgacggtgggcatcggcgagaacttggcgaagtcctcgtcggtgaggtagtttgctcccaggtcgaagtgggcaaccttggggaggcggctgagctggtgcgggatggcgccgacgaggttgttgttgtagaggcggaggtcgacgaggccggagaggtcgccgagctgcggcgggatggagtcgctgaagccattgttgccgaggtcgagcgaggccagcgagcggagccgcgagatgctcgccgggatggcgccggtgaagttgttcccgttgaggtcgagctcggccagcgccgggagcgccgcgaagtcgagcgcgtcgaggccgccgccaaggccggcgcccctgagccggagcgaagtgacgcgggcgccgccggcggcggcgtccatgccacaccgcaccacacacacaccggcacggcacggctccacccaaacagcacggccacaccatcctacaagccaaccttccanncagcagcgcgtcggcctccgtcgccgcatccgccgcggcgaccaccaccaccagcagcagcaggcggagggcgtcgtgtctccgcggcattggcgagatctagcggcggcgggtcagtggcttgggtttggctgctttggaggcagcctggttggtcgccggagttcgcgtggagggaacgttttttttttaagagcttgcggcgcggggggcggtcaacggggcggggttgaccaaaacacgtggggtgggggttgggtggggtcgacggcgggtgggggccacgtacgtttgtgttgacgtggaatgattatagccgtgcgatgtacggccagcccagtgtcaatttgtggtggccagatggcgtgggtcggtcgaaagtccaaaacccaaaccggagtgtgtcgtgtggtacgtggggtgggatgccatattcgcccccaaatataataatttttttttgtcatatcctttattttattggtgaaataagccaaacgatatatttgtaaattaaataaattttttatatatgtgtttttagcaatctagaagtaaaggctgaaaaataaactttgattgaaaaaacctcaaaatcaactttaaattttttatgttaaaaatttaaattttggtagataagtataagcataagcgaaaagatgagtcccttagtatcggataacattctagtactggatgtgacatattctagtataatgaatctagacagatgtatgtccagactcgtaatattaggatatgtcacatctagtattagattgttttttatgggatggagagattatgtgattctaaatttttatattttgagatgggcagtaatcataatcatggtcctatgtgtcctaggaatttaggaaccacgggcgtactggatgtgtgtgaacatttgtatgtttgactttggtgatgttaatattatctaaaatttggatccaaacttcagtcctttttcatcacatcaacctgtcatacacacacaacttttcagtcacattatcttcaatttcaaccaaaatccaaactttccctcaactaaacacagccattgtctctgatcctacagccccatttccactatcagaaacatattacgtcaatcattaatatagaggtatccacattaaaaaaaaggaaatcaaaggtgctcaactgtctaattgtcagtgtcagtaaaactagatccacaaattcccaatgtcgtctcatcacaggaagatgctcatctagagttgaaaatgagccgatcttggtacggtgctattggagtgggaacgtgggataaacttgctttctctcaaacattagaaaacacgctccacttggaacttgattgttttgattgtttgatctactactgataaagccgtagaaaaacaaactcaagcaatagaaaatgattattaatgaaaatttaaaatatttgtccttagcgttttaaaaaccactgctaaaaaataaaattaagaaaaaaaactcaatatcagcccttaaactaatttataaaatttgagtcctagttgcggttgataagacaagaataattgacgaactcagaaaaatgactgactggccgatcttacaacgaatcgcagtacagacatatgttcatcgtcgacaagtaagaagcttttagctttgtgcgccaaaaaaaataataaaaaaaagaacaaaggagaagcttaccaatggctttcgctagcggttaattgtcggtgtcagctgactcggacggatacactgtacatcatccacgaggatcacggccaaagccggtagtcattccgttctagattataaattgttttgactttgtcaaaattaaattgctttaagtttgattaagtttgtaaaaaaatagtaacattttcaatataagataaatatattaaaaatattttttcggggaaattataaaaatattgactttaatcattgactatattttcctataaacttagttaaatttaaagtaatttaactttgatcaaagttaaaataacttatactacgaaatgagggagtatgtactcagcacaattggcaacatcattccccgcacgatctcctacccccaatgcaaacgactgatcgaactgaacaacattttctcccctcctgaaactgtggatggcgatggccatattcagcagtaccccagttttattcatcgctatagaaaccgtgtgtgtgcatctcattctccaattagacacatgggcaaagagctcaactttgaccattcacttctcattgtgccggcctgtttctagagtgccggtgagccgtgcacgggactccgaaagaggcagattccatatccatcgatctaggggtgaacagaaatctcgaagctcatcgctcgaatcggtttgtaacgagcttgattcagatcgactcaaactcatagttttaataagtcaagccaagctagaattttaactcgtgaatttaatgagctactcgtttagctggttagtacagaagatcacctatctttatatgcttagcccttcttagctaatgatgtttagttccttaactacatccaaccaacctacttgagtttagtgaattttttattagtcagtgtttattattatttatatggaataaaatgataaatttagaattatagaggtgaaataaatatgttaacgagtttatttcaattttataattctaaattttattagctcgttatccacccctcatcgcggccgttttgtcgttcgtgaccacttgaatcatatacggctttagacagatcagtagtgctctgcgagagcttcctgtcgatcgtgtgtttctttttctaatttttattagtgcagagttaggcgaactttgcaaatgcgtagatagctaccataacacacgccgatgactcgtcggagatgaccgggcatgcagtgttttacttttcgtgttcaaaatgctaatgctaccatgcattgttctgccaaaccgtgtgattagcttaattaccgcatgctcctttgttttacattataaattgttttaatttttcctaaatatttttttaagtttgattaaatctatgaaaaaaatacagtaacatcattagcacaaaacaaacatattatcaaactataataaatgttagtttttaacggaactaattttgtgttatatatgttattaaatttttttataaatatagacaaaataaaaaaatatttgactagaagaaagaaattcaaagcgacgaacggagggagcaggaggttatgacgagtttgacaatcactagctcgagtcgtgccgttttgctcaccagtcacacatcgcacaatcgtcgactcctcgtcatccgagaaaggaggcgtgtgcagctgcgaccgcgggccgtcaacatatatccgttcacagtcgaaagtcggagcacgagaaaaaaaattaaacgcacaagcccggcggccagtcgaccggggctcatcctgggcgactaggggtgaaatgatgacgaaaaattcccaatcgaccgaacgttttcaacctttaccctttttagctatatataaaaattattctttctaatttttcaacatcgtattgatgttgatattgagtagtttaaataataaatatggttaattatcggctgtctggggtgggtttaaccctctctagaaaaactagagtcgagaccagttgctatctattcttttatgtcgtgaaagcattgttttagaagaatgctcccaattctaatcgttactgactgttttcacccatactcgcaatgacgtcgacaagaatttactgtttgccatccttataggttcaaatgtcactctttgaaattttcatttccatttgtcatccagtctaactctctcgtgtgtcactattcctacttttctagttcacttggtgttacatttgtattttttttcctttctatccgatgtgtcgaatgatgccaaaagactgaaatgcccttgggtccatatgtaagaggcttctcccgccctacccaagctgaaccaaaagagaggagggggagacagagccgctattgggaagatggagcccagcgccgatgctgatacatcctccccgaccgcgaacaccacaaaccatgccccctccccaacgtgtagaaccacccagcctcaacgtggtcctagcaggggcggatctatagttataggaccggtgtcaggcgacaacgacgacttttggcaaaacctatagctaaactgtttattcatatgctataacaccatgatctaagtataattagcatattatgacatcgatagacgcgttctgacaccaacaaatcgattttctggatccgccactgggtcctagcacactcctcctatctatcctcacctcctgcgatgccggcgaagaggagaatagggggagacgaggcagagaatcagcccacgacttgcctcaatttttaaattttgaaaactatcaacttaaagtttaaagtttgaaagctttcaactcattatttcaacttttaactcggattagaaaacttttaagtcaaaattttagaaccttcaactcaatatttatttaagttttaaattttgagttaaaagttttttaaaatttgatttgagagtttcaaattttgagatgtaagttttgtagtttaagttcaaattttaaattgaaagttttaaatagaatgttttgaaatttaagataaaagatctaaattataaaatacattaaaaataaaaaaagtacgctaaagattaaaaaatcgtgaaaaaaaggaaaacgtgtcaggaagtgggggaaagcgtaaaaaatggaaaaaaaaatcgtgcgggagcgtcagctgacatatacgcgtcagatagcaatccccgagatggggccatgggatgggaagaaattccaaagtccaaacctgtgtgtacgtgtggggtagtcatcatggtcctctgtgtttcctgggaatttagaaaccacggacgtgttggatgtatgtgagtcaagtggtctctttgaacatacatttgcgtgttcgctgccaggactttctgctcctatatcctcgttccattatcagaaactgattacgtgacagtgtagaatcatggatataaaggtgttcaactgtgggttaaattagaaaccacaatgcttacaaattccctatatcgtctcaccataagtagcagctcgtctagagttaaaaatgacccatttgttacctttttttttttcaggagacactctcaatcataaaatatggcaatctaatattggattgcatataaacatatactacgaatatagataatgccatatcttgggatggagtgagtagaacttgactgactgctatgaatgtttgatctacagtacaataatgaattaagcaatccaaataatttataaatacaagttttatatgtgtgttttttacggtttaaattatcttggaagataaaatataatgtaaaagtaaaatttgctataggacatctaaagtttataattcttggtgttgaacacctaaaaatgtgacatggttgtagaaaaaaaactggtaattcactaagagacactatagtcattattttatcattttcaggaaaatgaggaaagaaacttttagagaagatgagtttgccccctaggccaattgcttgtaatggcctctgtcatgggccctgtctttcaccgcctccaatcttaaggtcttggagaggggattggtagaggaaatgtggcttggatctggttccagatatgttaaatgataaaataataacagcagtctcccctaataaatcatcggttttttatgtcctaaaattgagtttatgttttttagtgtccaagagtaaaaaatcataaattttgaatatcccatagcatacttttaccaatgaaagaaaaaccttagtgttaacttaaaagtaagttttgaaatttaaattttgattgcagcatataataaaaaaaggagaatgatggttcatggatagacctatgatatgctaatctcactcgacgattatctttgacacaagaagtttagtaatatatttggcttgttggtatcagccgcaatcaaaattcaaattaattttagagcacatatgtgacataaccggtaacgccatccgatccacgagaaaggagatcgtgtggtttcatcgtccccgcacaatctcctccctcaggatctccactccaataaaaacgacctccatttggccattctctatctccacaagcaccaccatttttctccccacctgtggaaaccatggacggtgatggccatattcagcaattccctcccagcttcttctttgtgaaaaccgtgtctgtgcatctcctcctccgattacacattgacaaagaaatcaactttgacccttcactcctcttttccactaaagaaggatccaatatatacccatgaggacatgatagtgtcacacactcacacactactcttcgtacgggcgcacatccagcttctagattgcccggtgagccacacgtgactccgaagaaattaaaatggattccatccatcgatcatgtgtccgcttcgttcgtcgtacgtgacggcgtcatcacctgattacgtacgcctttagacacagattagtgctatgagtatcgtgtgcctgttgtatattgcatgagttaggcgaggatgcatattgttggcaatttttttttatatatattgtagagacagattcgggattggactctgctggtcataccagccacacaacgctggtatgaccggtctactggcggtggtctaaccggtcgacacacgacgatcagatcgaccctctcagagaaaaatcggtagaacgtccaaactttggtaatttttctattttaatcttagatgttaaatttgggtataaacacatatgctcctagatctctctctatagctttacaaatggtgtagatagcatgcataacacaatatgaaatgagtataggtatgatccacgttcgattcaaccaatgcataaacacatctattatttttctaagcccacataaacagcggcagaggcagtgactaaaacctgtggggttaaagctgtaaaattatttttagttttctattattgtgacacaaatatcaatagtttttttttggctgtttcgcgaaaacaagtggggtcagctgatcccatagattactgtagctccaccactgcacatggagagaaatagagcacaagaatcagtgaatgagacgtagtcggatgctaaccatataatatggtatgtaaagcaagattctaacacaattaacgatgaccagtagatctgccactgaccgagtgaccggccccggcccgtgcatgtgttttaagcttgatccagttcaggtgcagtgggtagtgtgaaacagtcacacgagcaccatcggatctaaaacgggcgtgatctagatgtatctaaacacagtagcaaaacactgcagcgatttattgtggcacagtaaagtttcgatttaccgtggcaattaggggtgggtgttcggtctgaccaaaaaattcggtctcggtcttcggtctttcggttatttcggtctttgaaaagtgaggaccgaatttcttcccaaaaaactcaagaccgacaaattcagtttcggtttttttggtttcggtctcggtctgaccgaactttcacagagggctagctggagacggaggcggtgtgatggcggcattgaggcagaggtggagggcggaccggcggagggcggaggcgggcgacgaaggcggcgccggcgcgatggaggtcgaggacgaccggcggagggcggaggcagcgcctgcgcggtcgaggtcgacgacgaccggcggaggtggaggcggagggcagaggcggtgccggcacggtggaggtcaacgacgaccggcagaggcggcgcgcggagggcggagagcggaggcggcgccggcgcgatgaggcggaaggcggagacggcgccggcgtgatggagatggagggtggaggcggaggcagcgtgaccgcacggcgcgagcgccgagcgcgaggggattggtggcggcgctgcgtgaggctggtgggagaggagggagtgtcagtggttccctttagggtttagtagtttattgggcttatcgtgcctcctagatctattaggccacaattcggttttctcggttaattcggttaaccgagaccaataaccgaattgcccaaataaatttcggtctttcaacggccaagaccgaattactaaccgaatttctcggtcttggtcgtttcggtctcggtcttttcagtctcggtatcggtcttttcagttcggttcttcggcccggtcttattttgctcacccctagtggcaattgatttggaccattggatcaaaaaattgagaactcagattatgtgcaatctatctattatattattaaaggaatagaaaaaggagcctccacgttcgctctcatggcctagacattctcacattaatcggagaaaaagaaaaagcagagtccatatagaaatacaatttagaaatagctgaaattcggaattaaaaaataaggaatattataataggagactagagtccatatagaaatacaatttagaaataattgaaattcggaattaaaaaataaggaatattcgaagaggagactagagtccatatagaaatacaattagaaaataactgaaattcggaattaaaaataaggaatattagaagtagagtatagagtccatatagaaatacaattagaaaataatagaaacttggaattaaaaataaggaatattagaagtagagtatatattctatatagaaatacaattaagaaaacaatagaaattcggaattaaaaaaataaggaatattagaagtagagtgtagagtccatataggaatttaaaactaactaaaatttggaataagcataataaaattaaaagtaaagtttagagtccgtataaaaatataatttacaaataactaaaatttaaaattaagaaaaacatgggaagaaaagtttaaagtcaatatagggatacaatttagaagtaactaaaattcattaataattaaagaatattgaaagatgagtttagagtctatatagaaatacaattagaaataataaaaattcagaaataaaaataaataatagtggaagaagagcatagagtttatatagaaatacaatttacaaaaaattcagaataaaaaaatatattaaaagacgagtctagagtccatataaaaatatatataatttataaataactaaaatttgatattacggccttatgaccagtcacatggcgcaatcgagccaatcgtcgaaaggaggcagctgcgaccacgcgcggagccgtcggctactcttggttcacagccggaagtcggaacacgagaagagaaagaaacgcagaatgccgacggccaatcgatcaaccggccgggctctggtcaggcgaacataaaagaaaaattatagggattcaatacatagcactccctctatcctaaaatataagtatttttagactctgatatggttttcgtgatgctattttgatcaataatatttataaaagtgagatgttttaaataaaattacgataaattgtttaatgataaatatattaatatcaattttacatgattgatattttttatttttttgctattaataattaaagttaaaaatgtttgatttatcactatgctaaaaatacttatattttagatggatggagtaataattatctaattattagttggtgtattaattaaaatgagacattttagctaggattggataactaacccaaggtcctctgatcctggattattgaacgtgggagtgcaactgtcgggctcaccgtcgcgccctgcagtggtgggaaaatttttcacgcatattgctaatctaatgaaaacattaattttttttttgaaattagatagcagcatttattatcccatgtctgtttccgctcacgccgaacattctttatcaccatgaattatctgcttcacgtcttttaaaatatgtgtgtttatttaatgttttaaactaattattaagcttatttatcaagacatttgacttgtatgtatagtcatataaataattgttagaataggtgtcgaatatactattcctatttggttatttggttacagttggacttagagttgtaataggtgttagggggtggagttagagtcggactctgtaacccggcaactctcttaaatagagagggggacaccacaatataaccatggcgactacaatgtagcatacacacgcagggagaggatggcggcgtggccatggactcgtagcggctaggaactatattggttggggagaagcgcccataattagagccccggggatgtaggcttcggctgaacctcgttaacaaatatcgtgtgttcctgtgtcgtcatctggcatgtcttgagtaatcaatgactgaagcgatcgggagggttagtcgtctttccgctatattgactaacttttataacaagtggtatcagagcagaaggtttcagcattggatcaagaagacatgtggagaaggaaacacgaggtgggatcgcgcatcgataggagatcgtcagtcgtggcgatgagatcgatggcgacaacgaggacgttgcggaggcgacgacctcactcgcgatcagactgacgatggcggagcgtgaccggaagacgaggccgggcgtggccgaaggcgttcggagagatcggaggggtagcgccatggacggcgcgcccgacgcacgtggcgaacgcggatccgcggcggcagggaggccactgacggaagggcgaagctggcgagcatggcgcggcgcggcggacgtgcagggccgatgacgacggggtcgtggacggtgaatacgagggctgcgactgcggtgcgtgcaggggcatggacgtcgtgtatggaggcatgacttgtgcacatctacacatgcataggtgtggtttccaagagcagaaccaagacggatacggtgcggagacgtcgacttaagcagggagaggtggcagtgggctccatcgtggaggagtagctatggactctagcgaagaagtttctctaatccgagcggtggaagtttcggcttcggtgtctgatgcaggcggcggcgacgactcagaggaggcataggctgcggcttgtagcaggaggaagcggataccgagattgagtcggggtttggtttttggctcgtaggaaggcaggcacactacaaggaatctgttaatgcatgatgaaaaatttccgtcacggatcatcaaaaaaccgtcactatgcagcacctgtgatggtttcagagatggtcacggattgagcgtcatggattaacctctgtgacggtttaccaaaaaccatcacggattaatggaatcgctgacggttttaaaccatcacgatagagcccgaggcctagttagcccagcccaagttcatttcctatgacgaaaaataaccgtcacggattgaatgccacatcatcatggatgcttacatggttgcttacgtggatgatgacgtagacactacctcaacctatttattaacaggccaaaatcaaagatgggccaatttttagcccaattccatccattttcgcagctccttttcagccattttggcagcccattttcaatagctttacaacccatttcagcagctttgcagcccaattttgtcaccattttttggtgcccttttcagcccactactacatcgcttacagcccatatatacagcttaatttcataactaaagcccatatacacagcccatgcaactaatagttgcagcagcaaatcaaatagaaatatcatttttccattcaatatcatatcacatgatttttcatccaacatcagattacaacattcagggctcctttgattcaaaggattggcataggacttttgtaggatttacaatcctatggattttttccatagtatgtctttgattcataggaaatgaaaggaaacgttccttaggattgcattcctttagttcattttcacaggaaaataagaaagaggtctgacctctttggaaactttcctggcgcgaaagaagggcgcgcccacgcgtgcgcacgtcgtcgttggcgccacttttgtgtgtttggcggtaaaccgtggcccttcgcgcttcttccagaaaaaaagagagagagagagaaagatgggaacgagaacaccgaggaccacatattagcagccaagaaagccaactgtgatagagatagacagcagcttgagccggccgctgggggtgcaaggcggaggcgaggctcgccggctcagtcgtgtatgcggcttccgctggggacgccggcccaacaactagcagcacgcagcaaccaagcacagcatccatctggcgcgcaggttgggctccgctaggcggaggcgtgcggcaggtccgccatcgagggcagcagccagggccatcgatttggtatttgtctgcacttttgagctttcatacttgacttattattgacttattagtgcttctgtactttggatctatggattagtgaatttttaagctgactacttggaactagtttgtttcattggcactgtaggtgtaaatccctctctgataaggattgtgtatttcttttttctttcttttttttggggggttaggaaagcaatgccatcgaaaggctcttctcagatgaccatgacaaatcaacgcaatttgtccgatcgacgagcccagcaacctctatcacaggtttatgttgatgttgacagtgagcatgggactgcagagcgtcaagaaataggtaatatttgcaaattcagtttcacttgttgtttgcatcaaaccttttttgtttcatattgctgctgaaactgaaattgttaaatgtttgtcaaatttagggacggcaaagagagccagatggagtcaccagatgaagatgttccttattgagctcctaacagatcatgacgtgccaggttttcgaacacaaaatgcttggagtaaggaagcatggacaaatattgtttgccgcctgaatacaaaattcggtacatcatttacgaccaaccaagtcaagcaaaaggagcaggatttgaagaaagattatcgcagtgttaaagatttgttggatcaaagtggttttgggtgggatagtgacagaatgatggtgagtgcaccacaaagtgtttgggacacttttgctgatcgcaagaacaaagatgcaattcattggcgagataagtcgttcccatattttgatgatttagctccactttatgatggtgagctttatattttttttatcagtggtttgtttgttttgttgaaatgttttaggcaagttatgctgatcgtgaggagaatataattgtgcaggtcgttatgctgaagggagaactcgccatggtatggaccattatgcaaggaagacaaagaatgcaccagctcattcaacacaagaagcaaatgcggttgatacatatcagtcaccatcccctaattcaaatgctccaggtgaatcaggtttgcaatttccttttggtgaagaggttgagacagccaatttggacttttcacagcattcacctacccctgtccatctcacaaaagtcccacctagctcggcacaaacaccttcagaggttcctgaatctcgacctgggaagaaacaaaagatcaaatctgttagtcctgatgatggatttcatgagagatacctaaaacttaaaaaagaagacatagatcgatttgctgcaattgaggagaagaaattggaggatccttacagcatcaacaagtgtatcacagtgcttgaaggtttacatggtctacaaataggagatatattggtggcagctgatatcttcaaaggtaaggataatagggaagttttcttgtccttttcaagtgatgcattacgcctggcttggattagaaaggaaatcgcagcattagagtgagtacttttgtgaaacatatggcatgcaagtagtaggatagtacttttgtgaaatagatggcatgcaaatagaaggatagtacttttgtgaaacaaagggggtacttttgtgaagcagatagtagtaggatatacttttgcttagagggagtgcatgcaagtagttacttcattaagtagaatgtgacaaacttggagtacaagactagtaattgaccttgaatgccatggtggtcaaatgcaatatattatttccttcgtgctacgtaatggttccacatccgttgtgccatgtcatctcgttttctattcccagcttctctagagttgttaaattcttgtacatcaccattatagttctcgtctccatttggcacatcaacaatatgatctggatcaatctccaaacgacaattacttggccacaccatatctccattatgcaggcgtatgaagttgtgtagaacacaacaggcaaccgaaatatcaacttgtttacgagctgggtggtgtgagccggtctttagtataggaaatctcatttttaatacaccaattgctctctctatatggtttttgagttgtgcatgccgaagattgaataactccttataattttgtggcttttgattagctctgccctgttcctttaaatgatatcttgtcccacgatacggtgctagaaactgtgttgtatttgcataaccagcatctacaagaaaaaatttaccaggaggtacttcaaaaccatggtttagtgcatcttgaagaactcttgcgtctgaagctgatccctcccagccggcatgtacatgtacaaatttcagatcgaagtcgcaagctaccataacattctgagaaattgtttgctttctattccggtatggttcttgctggtctagtggaagtatcattggtacatgtgtcccgtcaatagagccaacacaattctatacaaatacaaatataaccttgattaagtctttttatgtacaatgattggtttaactcaaagtaaaaaaaaaatcaaaacatgaatctgttcatacctcaaaaaaggggtgaaattttggtcttctcaagatatgatgggggtgtaggaaaggtggccgtatatatacacatgtaagttgtgtaactgcatcaagcacaaccccaaaatacttgcttattgtttgcccgctgtgttgaaactgatcttgcaaggtctcattacttgcattttttgctagtgcatacaagaatatagcaacttgttcttctactgagacatctcttgcatcagcaagtagttgtttctcacgcaacttatcgactaaagctcgaaaaacattaacttccatgcgaaaattccttttgcttaggctctgatgacctgttaagatttcattaacacgacaagcccctgaaagttttgatgtgtgcatcggtttcctactagatgatggttgtgacgaatctccttcgatggtagggagaacaaaaagcatgaactcatcttcattctgtgaccgtcgtcgataacttggatccatgacaatcacaggggaaatcaacaacaaataataaatctgatggtttggtctaccaatatatataggagagcagaagcaagcaaataagttgctaatccttacatacataccaaaaagaaaaaaaattcatttatgacttaccaaatgaattgccacgtttgagctcttgtcatgcttggccgatacaatcgaaggtgaggtgagctagttttgttgatgtccagttgcagctacagcaatatatataaggacatgcaacggctagtacttgctttgaacgccaacggctatctgttcaaattcaaaccggaagagaaatcctgtatttttcctatagcactatcaaagggcacctttcattttttcctatgtttttgattcctgcgggattgaagaatcatactacttcaattcctgtgtttttcctattcctgtgtttttcctatcctgcgaatcaaaggggccctcaaagtgcatacaaccttgcagtttaccatggctcaagccaacaacaaatagagattccaagcaatgcatacaagtctaggagcttaatgaatgctgcggcagcaaaatgcaagcatgtatagcttagcttagtcaaaaattgacttgacacaagttagcaatagcagcaaaatgcatgtagtagcaaaagatatagcatcatgcatgaattaacttgatcgaacttgactgagcaaaagattaagtttccgcttccatctcagattgagtcctcttcatcgaacttgtagacagcttgttttccatttgagtctagcaagcaaggagcaaacattgttgttgatgagagaattaaaaataagcattacaaagagcaaagtttgaaacttatcttacaatagcctattgtacagcagtggtgtagcatttttttttcttgctgtagtggaactccttgaacaaatcaaatgcattaggttcttcttcattgtatttgtcacgctgaaaacaacatatatgcattatgtccagcaaatgtgtacagtgttgaacttaaaaaaaaaggatgaatctagatagcatcaaatcaccgttgagctgatcaaatcaagcatgatccatggtatcccccaagtaagctgttttctgcacctctttttctttttgttggcaaatggattaaaacattattcagttttgaagatatctgaaaatatagcaactgtggatttctgaaaataaacacattctttttttatctaaaacactttcttttttttatctagtttctatgaaactttcacgaatattctttcttatttatgactgcacttgcatttgcagaaacaaggaattcagttttttgtcagagatcatattgttacagcatgaattgacttgcttaactaaattagaggtttctgcattcatcagattcaggaactttgataagcaactagcatcagcggatagagagagattggttacagttgggatgcggtcgctcgcagtcgaagttggggcgcttcaccaatcaccagtccctctcacagtagcagatcccgcctccgccctcctgcacatgggtgaggcacatgcgtcaaaactcgccaagaaaactaatgcaagaaacaaagatagaaagactggcgcctctcctcttctttttcatccgtgtcaaaccgtcctcgcccaccatgatcgcctgccgtgctccctatgctcacgcgtgcagcagtgcgtcgtcctcctcgagcagcctctcgatggacggagctcgcgagatgtaggaagcaggcgcgctactgggaggggatctgcgccctgacctgctgccggagaaggaggaggaggaggactcgtcggagctctccctcgccggtgcttcttccacctcgattcacgtcaccggtggctgccccggatgctgcgctgcacgccccctccgggcccgagaggcgccggcggcagcggatccaccgctcccgcgcctggcagcggtggagacggatgccggcacggcaagcggcgaagggggaggaagccggcgcggtgagcggcgcccggcggcggcggagacggaggccggcgcccagcagcggcggagacagaggccggcggtctcatctgcagtagcgcctcgcgtgtggtggcggcttatctgatttggatcggctagggttgaggaaccaatgcgattttactaaaatacccatggtgcatccgaagttaccactaaaatatctggacaaaatggtcatttcacgttgaaattttgatcaacatcccgccacactgaaagtttggcgcccgctgctccttcgggccgccggcccagcgtctgtttttcctccctcctctcaattaatttcaaaatattaaaacttcaaatcgaattttatcatactaaataaatttatgtgaaaaagatgtcaaaaacaaagttatataacttaatgagatctacaacttttgttttggtcattttgctatatgactttgtatcaaaaatttgaatttgaatttcaaattatgacaacttcaaacaatattttcaaataataaatgatttcaactgaaaaagtcatcaacaataaagttgtacaactcatcaatatttacaacttttgttttggtcatttttctatatgacttggtttgaacaatatgaatttgaatttcaaattatgacaatttcaaacaacattttcaaatactaaatgatttcaactaaaaaagtcatcaataacaaagtggtataactcatcaagatctataacttttatttgggtcatttcttcatccgttaaagcgaattgtaacattattcacaaaatgtacatatctcttatacagtttataaactatgagagagatatgtaaattttataaataatgttattattactttgtcggatgaagaaatgaccaaaataaaagttatagatattgatgatttatacaactttgttattgattactttttcagttgaaatcatttagtatttgaaactgctgtttgaagttgtcataatttgaaattcaaattcaaattattgaaatgaagtcgtatagcaaaatgaccaaaacaaaagttgtagatcttgataagtcatacaactttgttgttgacatttttttttcatttcaaattatttactaccagaaaaattatttgatttttcttatatttaaaattcaaattttatataggtcaatcaaagtcagatggagaaataaccaaaataaaattgatagatctaattaagttatacaactttgtttttgataactttttcacataagtttatttagtatgataaaatttgactcggattttttatattttgaaattaattgagaagagggaggcaaaatggacttctcggcgaggggggagcaaatgggctaggctggcagcccgaagaagaaggaggggaatgggaagccggcccaggacggagagaaaggctgcgggctgagggagggagagagtaacacttgggccaaaaaaggcccaaggacagagagatattttaatttattttccatttattttaataggttaaatgaactttgtggtattaaaactatttattgagctccgaaaattcacggaaaattttagagaataatttagaccacttagaattttacaaaaatatttccggccatgatttttaaaggaaaaatttagtttcctcattaattcacttgattaaattgctttaacttttaatatatttcctgtagtgaaaagtataagtgagtgcatacataatcaactaaaagaagtagctatgaatgttgctggataactataggtgttaggttaaattcctacaagctccaaatattttttgttcgcacactatatatatgcaaatattttcagttttaccatatgcaacatatacaagtaacaaattagtaacaaaataatttagttcaaaaaaaatttgtcttttgggtttgatttgttttgcaatcatttactgcttcaaaatgttgtttgaagttgccactttttgaaatttaaatcttcaattgataaaacaaagtcacatgaaagtatgacaaaaataatagttgtaatagcacaataaatggatagatcatgagtttagaaaattttataaaaaagaataattaaagttgaagttagtatgagggagataaactaatttaaatttttatacacgcattaaaagtaaaaatctgcagctattctcgtgaattttatgatgaacaccacgagcaggtggcaggtccattacctgctacagtttgatatataaaatacagtgcacgtcgtttggcaaaacgcttcagtggctcagtggggtttcctcatgaatactgtgcgtgttgtcgtaggttcgagtcccctagagggctacatttttttgtttcttgtttttttacaaggcgcagggtggcctgcggctagcctgtcttggctgcccatgtggaaaatgggccgctggcccagctgaaggggcagagcgcgagagggaggctggcccgagcccaagaggagagagtgagccagaaatggtccaagagagagtgtagcttttcatttttttaaattcatttgaacctcaaattcaaatccttttcaagcaaaacaagttttgaaatgccttttgattatcgtcacaccgtgatgattttaaaatcacacactgtgacgatctggataaaaccgtcacgagttaacgggccaagaatatccactagtgcacgtccatgacggaaaacaaattatcgtcacggattgcctctgtcagtgacggtttatgaatccgtcaccaagaatccgttatggattaacaagtttcttgtagtggcatgtgtaaaaagtgcatggaccggtgttaacctccacaaagtcaggcggtggaccaagaaaaaaggagagagtagtagtcttttgctggtcacgttaattatgatagggttacatgtgtatgcaagcatatgttggctgccatagtacgtgcatgcattatactactgtgcaacattggtttacgtatggcagggagccaggaagaccaataagctagctgtgtggtggtgctaattaaacgtggagatcaaagcgtgcaaggctaccaggagtctaggacgcattggttggcataattaaggtggtggtgattcagtagagagatgcacaggcgcaggggcaattggtgtggtgctgccatgataactaagacggaacttgtatggtctacggtgacttaggagatggtacatcatgtggcattcggtccagagaggatcgaggctggttaaactgggccggcagggtggttagaccgacggactggttagactgcggagcttggacggttagaccgggttcaacggaccggtggttcgttgcagaaacttgtgagcggattcagaagaagggcaaaaaggttctacggtctggatagtttgcaagtgacaatggcgaatagactggcggcgacaggtcggtcaggtcgcatatggaattatctggcagacatgatatatatgggactcgacgaggagttgagatatatggagttagaccagaactgaagggaaaaaaaagatcccgggcaacagcgggtcaaatatcgttgatggggtcaacgaaactgtttggcaatacaggatatatccaggatatgcaggtcggcatgatgggggatatatggaaatctgcgtcactgaagaggaaaagcaagcgctatggtgttaatttcttcaagggattcaaggcaacagtgaattttctcaaagtatcataggttcagtctacggatgcgggaaagcgaggatgttggatttattagctcggttcataagacaacaaggaagaaatggttctcttcaagtctggtgagtttgatttatctatttggtgatgacataggttatctggccatggattagatcaattcaaatttaagatggaagatggaggtgaacatggtcttcggggagtctatgatgtgacagctaggaagaaatccaatttcgcttggcaagacgactgagatgataggtaagaaggtggagcactgttgcaggtggattcaagaggaagaaattgcagggatagcggagtctcttcaaggcggcgggtctggcgcaggctcgtcaggcggctcgtggtgaagctgcaaaaggaaacaacccaagtctggaggacagatggattggcatggtgattctactacttctgggtggcgtatattcgccaaggtagagtttgttagaataggtgtcgaatatactagtcctatttggttacagttggacttggagttgtaataggtgttaggggtggagttagagtcggactctataacccggcaactctcttaaatagagagggggacaccacaatgtaaccatggcgactacagtgtagcatagacacgcagggagaggatggcggcttggccatggactcgtagcggctaagagatatattggttggggaggagcgcccataatcagagccctgggaatgtaggcttcggctgaacctcgttaacaaatatcgtgtgttcctgtgtcgtcatctggcatgtcttgggtgatcaatgactgaaacgatcgggagggttagtcgtcattccgctatatcgactaactttgataacaatactctctttttttagagctagggcatcactgcccccatttctattaccagaaacgggaataagtgtcttacagagcaagagaggagagggagaatagcagaaaaagaaaaaaactagaagcagaaacctcaaagggaggattacagttttcctttgccccagaggagcgaacacagagaacatagcagtaacaatgatactgctatgttctctgattaatactacgtactccacaatgatactgtcagtcaagtgtcaataatccgttttgaactcaggtactggggcttccgctagttgaccgatcagcttgcattatgcggcgcactagttgtttgtttacgcgttggaattcttgagcgaaagcgactgcatgtagccttacgccctcgttaatccgtttagtgcttaaaaacaggcaagaaatcgatgccaattttccttttttggtccttattagtcagcaaacccagtctgttttgccgtcttagaccaaactatttgctggttgctagtactagttattaaccatggacgtttcttcgacagtaaccgtggagtttgttttcagaaattgattatcaatccacagctcttatcttcaaactgaaaaaggtcgcaagataggatcacatgagctcaccatcagcataacgagatggcagacagcgacagggctagcgtatgcatcaactccggacaaaataatatactataaatatgtaaaaaaatagaaagaaaccatagattctttgatcctactcctcgatcctcggttcctgtagcagaagatcatgcatcaaaataaaatatttcctctattctcgaataattcacactcgtaatattcacgcttatttttgaaaaaaatatagatactcgaaaatatgttgtattatcgaaattataacattataaatataaccctataagttatcattcatcattagtaatttatggtcaaagtacaacacccatggtcaaaagtgacacattagagaacagaggaacaaacaagaaatggagtcgcttgagccagtcacactcggaagtcagaacagagaggatctcaaattcaaagtcaaagggacatggcactttcattagccacctgatacagctagcttcatgaactgctgtacagtaatacaatctttgaatcacactcacatggaaccagaaggtatttcaatcagtatatagcgcggaagaagggggcaaggcacatggaatggggataggagagcgcgctcaagtcaaaatgggtttagttctatgcaactaaaactacaattctatgtttgtatattgaaaatatttattttggaatcgagagagtagtactatggattggctgctctctacagtaaggtgccatcaatttcccaataatcgtacaatctaacccgtgttggttaaacattctcggattctcaagttataagttgataaaaatgggtttcagtagctgggcttgacatcgtcattggctctgtcactaagctcaaccgcgacaacattttagtaattggtatatatgttgcattcagtatgcaacatttcaaggaaaagggcatataacttagcggttgcagtgatctaagtagcactcgaaggttttgatttcaaatctccataggagtgaattttagattgagctattttgagaggttaagttcccaatttaaaaggctgcatatatccaattagatatggaggccggaaaaaaattactcttctaaaaaaaagtactcaagaaagcactattaatccatatttgaagcttcaaatagaatgaagaagaaaatatgcaacatttctttttctaaattgcttcaagagaatataattaatattggtagggaaacatgaagagaaatacaaacagaggcttgattgaaatctgatatcggtattcgccagccaagtctggtctgaaacggggaagtttgcaagagttgggttcaatcccacgaaattcctccaaaatctcccgttcgaaaggaggtctaaaagttaaattcctttcgtggaagaaaaattcttgcgcttcaaattaaaaaagaaaaactggtccatgtgactatgtctcacgaaaattgccgattgtgtactttacacacagtactgccgtactgggcttgtaattgtagatgaacaatttggttcaggtgatcaggtccgggctttcttaaaattgggcaaatcaacgaaaatgacagaaacaggccagatgtcaagaacgccatggcccgtctgtgaacttggcagaacagcccatgtgtaaactcaaagctttgaggtttcaagttttttttttctctttcaaattatatactgtacacgtactattgtcttcttctatccagtatccatggcgcaagcccagtacggataatattttacaattgggacttgggagagtatattttaccacttcaaataatattttcacagtcctgaaaagtatttacaatcatgagataatgcatctggtaggaacgggcacttaccgtagaaaaataatcttacaggtgtcagccaaggaggcacttacccagaattttgtaaaatttactcattaattaactatttcttccgttccataatataagtatttttaatgtttaaattttttccctcgatatagcaactaatcaacctattttcaagtcaaattactttcttgtcttaaccaatcacaatctatcagttaatttgtttatatattttttttctgcttgaaccaatcataaccattctgctctacaatttgcttatattttgcaatgacacaagtatattatatggcacgacaacagtacactagccctgattacccaaattctgccacgatcagatagaaaattgtgtcttccagagaagaggaagagagattctacacttacccatcaaactccctggttatcaccattccatgggctaaaagaaacactagctagtaaccacatgcgcacaccctaatagtgactttgcgtaagttggtttcacaagtcatctttttctgatcttttttaagggtgatcgcgtgcacaaatcctagtaccatcaaaaggttggcacatagaaatttcagtgacaatatgtaaacatgttaggtcacagtcacattggaatgttatgtgcgtgtgtgataatctgattcctttctgaagaataataaacagtgtaattcctctttgcttatgtacattaatcagtgtcagtcttttcatcatcagaattaccggataggagtagggtattacttcttgaataagaaggcctgaacctgtataaaattccttgtcttcaaacccatccattttcctagcttgatagccacccccttttattattgccaaaatcttgtttcgatagttactgtggagattatggttaccccatatctacatggcggttatattccagctggatatacagtaccaaatatagatagaatatttttatgaggactcgggttagattctaaacttgtatgtcaagaaaatacctggtatcctagtcggttacgattgtgttttatctgtaatcccatattccgttaggatatgggttgtactttgtattacggatcccttcccctatataaggagggtccgtgtgcctcttggggcacgattcttttttcccaattatacaatcaataacacactcggcggaatcatctccggacaggagtagggtattacttcttgaataagaaggcctgaacctgtataaaattccttgtcttcaaacccatccactttcctaacttgatagccacccccttttattattgccgaaatcttgtttcgacagttggcgcgccaggtaggggtagcgtcaagttctcgcctactaagtgcgatgggtttcgtttctggcatcgacgacttcgccttccctcccgggcaggcgttccggttcggcagcctcgacttcatcaccaacaacttcggcaagatttctctccttgactcggattcagaccagtcggggagagaccaggtccccgtgccattcggtattctgaactcggccaaggcctactccaagataatctctctcgagtcggcttcaaaccactcggacgagatccaatctactcttccgcgaccagatcaagacgacgggtcctacccctcaatcttgatgaaacttcctgatgacttggccgccgttttcacagccaaaacatctcccactcggagatctaggcgagctccggcatcggccccgatccagtctagatccaggaaggtcggcgttatactccaacctcttgggacagtctcgacggaagaattggatggctccctctgctcccccggcgtcagttctcgaccaaccgagatcctcgactacgacgacttcggctaccactacgaccacggcgacctcgacaacttcgacgacagctatgaggataactacatgcccctcttcttcggcgtattcatggctgacaacgaaacggaagaacagcgccgagcccgagaagcggaccaagatcgcgcacggcaaggagctgaacgtcgctgactggaggaagtgcgacagcgacaggagcgagaacgactacagcgtgagcaacaagatcgcgaacggattgcaaaggaggctgaagatcgacggcaacgcgccttggaatctgggcgccgagcgagagagctcattgggcaacaagacgtcgacgggacatcggtcttccgcaccgcccagcagaacgcggttgcagcaatcactctcctcgacaccctcctcaaggaagacgcactcaaccaagccgatcatgttgtcaacatcttgaaccagacgaagaccatgatcgctgcctcggttccagccaactccgtaagcatccgcaccccgactggtagccgagcccctcacctctgatctcatgatcatcatcagccaagcctcagcatcaccggcacaggatccagtcgcaggagcaggggtcacgacgaacgatctgttcactcgcctcctgaacgtcacagggagcgccgagtcgaacggcctcgctctccacctcatcagcgccccgtcgatcttcgcgacatgatcaaccagcaccgtgcagcacgaggtcaccgccattcaccaaatcgctacgacgacgacgtggatagagtggctaccttcactaatgacctacgtcgagtggattggccagtcggctttaagccgactggaatcgagaagtataacggcaccactaatccggagtcttggctcaccgtctacggaatcgcgatccgtgcagcaggaggagacagcaaggccatggcaaactatctacctgtggccctagcggactccgcccgatcctggctccacggactaccccgtcgcacgatcggatcatgggcggaacttcgcgatcacttcatcgccaacttccagggcacctttgagcgccccggcacacaatttgacctctacaacatcgttcagaagtctggagaatcccttcgagattacatccgacgcttctctgaacaacgcaacaagatctccgacatcaccgacgacgtcatcatcgccgccttcactaaaggcattcgccacgaggacctagtcggcaagttcggacgtaaacctcccaggacggttaagcagatgttcgaaaaagccaacgagtatgccaaagccgaagatgcaatcaccgcgtccaaacagtcgggcaccacttggaagccaaagaaggacgcaccgactgcaggggggagtggaagtaacaaccacaaagatcgcaagcataagcccgaagaacttgtggcgaccacctctccatcttaccgacaacgtccccgcgtcaacaccttcgacaagataatgaactcccaatgtccgcatcatcccaactccaaccacgtggccaaagattgcttcgtctacaaatagttcacagaacaatacgtcaagaacgcacgtaaaccttcagacggagatcaaggcacatcaaagaagagatgatgaagacgatgccccgactggttttcaagatcatcgcaaagaacttaatcacatcttcggcggacccctggcttatgagtccaagagaaaacagaagctaatggaacgggagatcaatgcggttcagcctaacacgccccaatatcttcagtggtcagaaacagcaattaagttcgaccgctcggatcatcccgaccgagtggtccacccggggtggtaccccctggtactagacccagtggttcgcaatgtcaagctccgacggactctcatcgatggcggcagcgcactcaacatccttttcgctaaaaccctggacgatatgcagattcctcgcacggaattaaagccgagtaatgcacccttccatggcgttatcccaggattgtcagctacaccactcggccagatcactcttccagttaccttcggcactcgggagaattttcgcacagaaaatgtttgtttcgaagtcgctgatttcgagatagcatatcatgctatactcagacgaccggctctagccaagttcatggctgtcccgcactacacctacatgatgatgaagatgtctggtcctcgaggggtcatatcactacggagcgacatcaagcaagccgtcacatgtgacaaagaaagttgcgagatggctcaaacccacgagaccactctcgcccgcgaagagatccgactggctgcgaccacggcaagcgagggagaagtgcctgcaaccaagctgacgaagaccgaagaaagtgatgccaagacgaaaaagattcccttagatccctccgatcctgacaagactgctgtaataggcgctgagttagattgtaaataggaaagcgcgctcatcacctttcttcagaataataaagatatttttgcgtggaaaccatccgatatgcctggtatccccagagaagtgattgagcactctttacatgttaaggaagacgccaaacccatcaagcaacgactccgccgttttgcacaggacaggaaggatgcgatcaaggaggaattaaccaagctgttagcagcaggcttcattaaggaagtccttcatcccgactggctggctaacccagtcctggttcggaaaaagacggggcaatggcgcatgtgtgtcgactatatcgacctcaataaatcttgtcccaaagacccttttgggttacctcgcattgaccaggtggttgattcaacggccggctgcgagttactcagcttcttggactgttactcgggatatcatcagatccgactaaaagaatccgactgcttgaagacctcgtttattacgccctttggggcctactgctacatcaccatgccctttggattgaagaacgcaggagcaacctatcaacgcatgattcaaaagtgtttttcaactcagatcggtcgcaatgttgaagcctatgttgatgatgtagtcgtcaagaccaagcagaaggatgacctgattgcggatttagaagaaacttttacaagcattcgtgctttcaagatgaaactaaacccggaaaagtgcatcttcggagtaccgtcagggaagttgctcggatttatggtatctcaaagaggcatacaggccaacccagagaaaatcaatgccatcctcaacatgaaaccgccaagctcccaaaaagacgtccaaaagctgactggttgcatggcggcgctcagccggttcgtctcacgactcggtgagcgggggatgccttttttcaagctgctgaagaagactgacgatttctagtggggacccgaagcacagaaagcctttgaagacttcaagaaactcctcactactccaccagttttggcctcgccacatccgcaagagccgctactgttatatgtgtcagcgacctcccaggttgtgagtacggtcctggttgtcgagcgtgaagaggaaggccatattcaaaaagtccaacaaccgatctattttgtcagcgaggttttagccgactccaagacaaggtatcctcaggttcaaaagttattatatggtgtcttaattaccgttaggaaattatctcactactttcaaagtcactcgatcacggtggtcacatcgtttccactcggggatatacttcataatcgcgaagcaaatggacggattgcgaagtgggccttagaattgatgtctttggacatatctttcaaaccacgaacttcgatcaagtcacaagctttagctgatttccttgctgagtggaccgagtgccaagaagacatgccagaggaaaagatggaatattggactatgcatttttgatgggtcgaagaggcttacaggcactggagctggggtcgtcttaatttccccgactggagaaagattgagcgacgtattgtggatacatttttctgcgtcccataacgtggcggaatacgaggcgctactccatggattaaggattgcaatctctttaggcatccgccgattaatcgtccgtggagactctcagttggttgtcaatcaagtcatgaaagagtggtcttgtctagatgataatatgaccgcttatcgacaagaggtacgcaagttggaagacaaattcgatggacttgagctcacccatgtcctccgacataacaatgaggcagccgacagactggccaattttggttcaaaacgggaagcagctccttcagatgtgttcgtcgaacatctttacgaaccgaccgtgcccagaaaagagacaactgaagccatggatactcaaggcgtaagcatgattgaagccgactggagagaacctctcataaaatttttgaccaaacaagaactccctcaagacaaaaatgaagccgagcggatttccaggcgcagcaggctttacattattcacgaagctgaactgtacaagaaaagtccatcaggaatactgcagcgttgtgtatctttggaggaagggagacaattgctgaaggatatacattctggtatttgtggtaatcatgctgttgcacggaccatcgtcggcaaagcttaccggcaaggttttttctggcctacagctgtgtccgatgcggacaagattgtgcggacatgcgaaggttgtcaattttttgccagacaaactcatttgccagcccaagagttgcaaaccatcccgttgtcctggccatttgcggtctaggggcttgacatggtcggcccatttaaaagggcagtcggtggttacacgcatctctttgtggctatcgacaaattctccaagtggattgaggctaaaccggtcatcacgatcacagcagataaagttagagattttttcatcaacattgtgcatcggtttggggtacctaatcggatcatcactgataatggcactcaattcactggcggagcatttaaagatttttgtgaagacttcggcattaaaatttgttatgcctccgtggcacaccctatgagtaacggacaagttgagcgcgctaacggcatgatactgcaagggatcaaagcacgagttttcgaccgattacgcccctatgctggcaagtgggtagatcagctgccgtccgtactttggtctttacgcactactcctagtcgggctaccggccagtcgccgttctttttggtttatggcgcagaagcaatgttgccgagtgaagtggaatttgaatcactacgattttggaacttcaacgaggagggctatgaagaaggccgagtagacgacatcaaccgactagaagaagcccgagaagcagctttaattcagtcgactcgatatttgcaagggttgcgccgttatcataatcggaatgttcgatcgcgagcctttttagtcggtgacctggttctaaggaaaattcaaaaaacacaggatcggcataaattatctcccttatgggaaggaccgttcataattgctgaagtcactcggccgggttcttatcgactcaagcgcgaagatggtactatcatcaataattcttggaacattgaacaccttcgtcaattttatgcttaggcatttcgtttgtatctttcctctttgactgctaacttcaagttttttcttgaagttttcagttagggggctactataataataatggagtgtgatttttatcaattcaatttgcctacttgatgtatcattgccctgtttgatttcttggcttagtcaatgaggactgaaagttttttaacaacttttgcgggttttaggctcaacaaggtttgacaaaaacttttaagaaatcaggagcaaagttaagatatcaagcacagcataaattcatcagtattgtacaaattgtgcctccatcatcattaatcatcaaaattatcggtacattaatcagtctcagtcttttcatcatcagaattaccaggaccagtcggtcgaagatcggtgtcctgaaatctctcaactacatcagcagcaattttgtcagccgctttctgcgcatcactgatgaggtcaagagcagcttcttcgctcgtcccgtctgcaaagccatcaatgacgtcaatatcaactctcggataaagggatttagtcatcgccaacgccatacttactcccatacttccagcttctttgatgttcttgaaatatatatccggagcaactctcagcttgtcgaaaatttcggaagcatcaagtgcactcgggccgttgttatttaagaacatcgcttgaacaattggggcagcagcgttatcaacctcatcccgggctccttcaagttttttgatcttgctaaccaggacgtcgaattgagcttgagatttaatcttgcggtctgcatcaacagattcacattaataagtcagcatatggaggataatggcttttgagatattgattgttgataccttcaacttcctttaaagccaggtctctttgtcttgccagctctgccttgtcgttttccagaatttgaatctgcttctccaactgagatatcttggcagtttgcactacattgactacggttaatcaagattgcaaagataacaatatgagtcagttaagtagggtttgtacgtaccttttgatgagccactcagttcaaaatttgattcctggagctcagcaattcgattcctcagatcatgctcattcttcctggcaagctcttttgtctcgtgcagcagactcctggtggcttcgagggtcccgagatgagggactagcctctctaaggtttccgttttagcttcgttcctaagatgaatcctctgcaagacagtttaattagcgcctgaattaaatggcaaacaagatggttgagatcaggtaccagagggcttacatttacaatgtgggttgcctgaccaagtgccttcttcagtaggcataactcttcgtcctctttttgcttatttatcacggtcccttgaggctgcatgttgtcatcccaccacttgaccagaatcggagggcgtgaatcctcagctgcttgtatgcggggaatttcttcttcatcactgatcattggccctaatgtatctactaacagaggttagacaattggtcagagttatttgggttgacatggtttcagacaaagtgttttacccataatgatttctggatgaggatgagtggattcggatgcctttaaaggagatctagatctctggttattgctggcgtcttgactgcgaaggctatctgcttgagctccaacctctggaatctcttggcttggccttgcgtccgactggtttctagtcgggggctcctgattaaccccggcttcggcttcggccgactggtttccaatcgggggttgatcaccggattctacattatcggttgccggctgattgtcacttggacggtcctcggcagttgtcccgatttctttggaagaatttgcgtccacgctagtcgggtcagagtctttccctgacggatctatatcagatggtttcctgcaaatttgattattagtattattgctgcaatggatgtgcatcaatgcaagagagatcgttatatgagttgtacctagaagacttcctgatctttggcgcagggcgactggatgttttcttctttggagtagcctgttttgatagtttcttggttgtctctcggtctccaggcctcctggtggtatcatcggcttcgtcgtcactcagaaccagcttcctctttcgagagtctgactggccgactgaatcagaagcacttggttgagtttcagaccgaattcttggtcctccgctcccttgcccagtttggtggcggggagatcggcgttgagcgattgggggatccgatttcatcaaagcaaattcctgggtgtaatatctttcattattaattgattcaacaggaagacaagatcatattttgaggaaggttgaaatgtttgagtgcataccggtggaggagggttgaatgcgttgaatggcacaacgggcagcagatgtgaatagctgacgacaatagcgtttgagaagatcttgtacattctttctttcatgaccttaaagtcaagagaatctggatcttcccgatttggatcatgcttgccgtcgaactcaaaagctgtgcgggatctttctttgattggagctaaccgacacttgatgaagtgctgggtgatctgctctccttgaagaccctgttctttcagctttatcatcctctccatcagttctactgcctgagcagcttcatctcccataggcaatgagttccatgtgtcctggtaaaccggaggaagacagtttgcgtgctcaggagtgcgggctcaggattctgaacatagaaccagtttgcgtgccagcctttatttgaggtcttgaagggcatggagaagtatttttggcttagtgttcccctgagttggaaaccagcacccccaactacgcatggtttgctcttatttggctggggcttgaggaagaagatgcggcggaacaaggcaaaatgaggcctaatgcccagaaaagcttcgcaggcgtggataaaattggcaatatgcactatggagtttggattcagatgatgcaagctaatcccgtagaagttcagaatgccccggaaaaatcttgaggttggaagagaaaatccgccatagaagaagtgagcaaataccacgatttcatgcgtatcgggagtcgggaatgcttcgccaaatgccggtcgccacccgatgatctccttcgctggaagaacgccgtgcgccaccatctccttcagattatcttctgtcacatcggagggcgcccactgactctcgaagctttctctttcttccaccatgaatgtgaactggatggtttgatttggttcgagatacggatggaaagggatgggggaatcggtgcggtggacgcgtggagaagattcgtgggatttttgagaatggattggggcggattgatgaaccctagctccgtcggcgtagtcttgtactgtagcgaggaatggggaaatggcgagagtcttggcggggaagacgaagcgtcgcttggacttcggtgttttttagggtatcgtgagtactaatgggcctgggcctgtacagtacttcagcccaattttatttccagcgtggcccgttgtgattcttagggacttaggcactttttgctttggcaatttgtactcacaatgttgtggcccaatgctgattaaatcctttttaatgcggtttgctaattctttagaattaacacgatgcaaacaaaaggtgcctgacagaaaggtgttatgccgtttttgtaagctttattaggctacaaaagctgtttgggttgatttgagatgactggtttattcatagttattctcttagcatgttatatgcttattttgattatggtaaaggttatagcctaggctaatgaacttcttaattaccatgatctttatcatatttggtggatcattttaagagtttcttgctcggattcctaccaaatatatatatttttagaccttttgagtgtttatcactcggcccttcttgtattttttgtccttgatatattcaagattgagaagcagtcggttgggtatcttactaagtaccatgcgtgcttcactataaaaccactcggttcttgactatatgtttagtttttcaactaatcacatagtcaggggctacacctaattaggtgcatctactcgatgcaccatgttttattttcgccctttacagtcttttagcactcggcaagccggagcaagttgaattaaagcactcggattattgtttttgtttcgagaagactattttggtcaactgtgaaggtctcgggggctactgtggagattatggttaccccatatctacatggcggttatattccagctggatatacggtaccaaatatagataaaatatttttacgaggactcgggttagattctaaacttgtatgtcaagaaaatacccgggatcctagtcggttacgattgtgttttatctgtaatcccatattccgttaggatatgggttgtactttgtattacggatcccttcccctgtataaggagggtccgtgtgcctcttggggcacgattcttttttcccaattatacaatcaataacacactcggcggaatcatccccggacaggagtagggtattacttcttgaataagaaggcctgaacctgtataaaattccttgtcttcaaacccatccactttcctagcttgatagccacccccttttattattgccgaaatcttgtttcgacacagtgtaattcctctttgcttatgtactttttcttcacttaggcagcgttcgtttggaggacattgagggagaaagcacctcgttttccgcacgcacgcttcccaaactattaaacggtgtgttttttgtaaaaattttctataagaaagttgctttaaaaaatcatattaatccatttttgaaatttaaaatagttaatactcaattaatcatgagctaatggctcacctcgttttgcgtatcttcccaatctcctcaaacacacccttattgtttatcggacatttaactgagcatatatacagtgccaaacagcgggaattggcatcccctgtttctcctttcttcagctttgtcagcacactgaactgtacaaaatcagttcatcttttcccacctaattctgaaaatgacatcaatagcaaaatgatcaaacaatcaaaattttcatagaaataaaatattttccttatcgcaattggcaccttacatttagatttattctaagttactcggcaaaaagaagaaggattaaattagtccatcgcttgcactgtttcatctgctagtgccagctccaacattttgaagagtttactattatagcttctcaacatctcaagcttgatgtaccaacctgtcgtagaaagcgtcctaccagtaagagcaatgatgcaagatcaactgcatataaacaaacaagcaaattaaacaaacacggtttgcaagtataaaaaacttatgtcaccttaattacatgcagtgcaatccagccagcagcaacaacaattaattgcacttggttgacctctataacattaaaaaatccctaagaaaattgctgacataatgttctagtcaattggtgttgcaactacccgtacatggtcagcagctgaagcaaggacgagagctcaactaaggaggtcattatctaaaaaaactagggatatgagggaaataattagaggattaaacagttcaattttgtactggtccacgcaatggaagagctaatagaatgttgtaattgcgtgtcaaatagattatacattgttgtgtagcttttggaactttcttttttcgctgaaatgtggcttttggaactcaagcatatcggatagataggcttgcacaagttgtccactagatcactactactgttgtatatgcactgggatgactatgaaagtacacaatggttggtaaccgtacactcaaaggaatacccagttttttaaaagaatttagggtatcaacttcaaacgagaaaaataattcatgaggggattctctattctccagccaaggtttacagaaccgattgccttaagacaaccgtgataatcaagcggttattatcgaaaaccagcaaaacttgttgaaaaaattgtatgctttttaaagttatctactttatcgagcgattcgtaaatacggctacggctagatagataagattgataaccacgataaccaaatggttattgccacatttgaaacggttatctaaagttttttttttttttgcaaatataagattgcttcaagatttgtgctctgacccacttcactcacttagtctctagctctatgcagaatgtttgtgtcctttcacccatctctttgccaccaatgcttaacggtaccttggaacacaggaaaaataataagatttcaaaggatttaaatcttatagtaaaattttctattaggtcttttggaacgaatcaggtcccagcccatataattcttttgaaatttgtgtggaatggcatgtttcatgggaattttgaaggattcctggcatgagctctctaatctctttggaatttccatttatgcctacctctctctgccatatcctgtgcttttcttgtattccatcccacgtagttttcctgtattttttgttccttacaattcaaggtgttactgacattctatttttatgttttttatattcctaagttccaaagagagtattggacccatgatcttgtatctttaagtgcctaccaagccagcatcgtgtcatagccggagcatcaatctccatatgaatccaatcgtgacctcatggtttgaatttttcaaattttcataatttttggacgccaaaagtctagcaatcctattttttgatagagatatatttactcatcacatatagagaaatcatatctcgaacaaacagtgcgcttgatggcgcccgcccaaccaccgccggctcagtcgctctaacacctctcgatcacctccttgcaagcaatgctagccatggccgccgccgcgctctcgccggagcgcgtccagtcgtcgtagcccctactcgccggcgccgctccaatcaccgtggttcagccacccgcggcggagtatgaagcgccacgacgcgggaacgccgccgcggcgcgcgcgcgaccatgcacgcggcgtgcttgtgctccacctgctgctcgtgtcggcctcgctgcgcggcgcgacggccgcgccgggcgaggcggaggcgctgctcgcgtggaaggacaccctgccgcgctcggcggcggcggcggccggcgtcctcgggtcgtgggcgacgccgtcgccgcagcagccgaacgcgaaccccgccgtcgcggcgtgcgcgtggcgcggcgtggcgtgcgacgcgtcgggcgtcgtggtgggcgtcgacgtggccggcgcgggggtcgccgggacgctcgacgccctcgacctctcgtcgctgccgggcctcgccgcgctcaacctcagcctcaactcgctcacgggctccttcccgtcgaacgtgtcgtcgccgctgctcagcctccggtccatcgatctgtcgagcaacaacctctccggcccgatcccggcggcgctgccggcgctcatgcccaacctcgagcacctcaacctctcgtccaaccagttctccggcgagataccggcgtccctcgcgaagctgacgaagctccagagcgtcgttcttggctccaacctcctccacggcggcgtgccgccggtgatcggcaacatctccggcctgcgaacgctcgagctctccggtaacccgttgggcggcgcgatccctaccactctcggcaagctccggtcgctggaacacatcaacgtcagcctcgccgggctggagtccaccattcccgacgagctcagcctctgcgccaacctcaccgtcattggcctcgccgggaacaagctcaccggcaagctgccggtagcgctggcgaggctgacgagagtgcgggagttcaacgtctccaagaacatgctctccggcgaggtcttgcccgactacttcaccgcctggaccaacctcgaggtgttccaggcggacggcaaccggttcaccggcgagatccccacggcgatcaccatggcgtcgaggctggagttcctctccttggcgaccaacaacctctccggcgcgatcccgccggtgatcggaacgctcgccaacctcaagctcctcgacctcgccgagaacaagctcgccggtgcgatcccccgcacgatcggcaacctcacgagcctcgagacgctgcggctgtacaccaacaagctcaccggccggctccccgacgagctcggcgacatggcggcgctgcagaggctgtccgtaagcagcaacatgctggagggcgagctcccggcggggctcgcgcggctgccgaggctcgtcggcctcgtcgccttcgacaacctcctctccggggccatcccgccggagttcggccggaacggccagctctccatcgtcagcatggcgaacaaccgcttctccggcgagctgcctcgtggcgtgtgcgcgagcgcgccgcggctccggtggctcggcctcgacgacaaccaattctccggcaccgtgccggcgtgctaccgcaacctgaccaaccttgtgcgcctccggatggcacggaacaagctcgccggcgacgtgtcggagatcctcgcgtcgcaccccgacctttactaccttgacctgtccggcaactcgttcgacggcgagctccccgagcactgggcgcagttcaagagcctctcgttcctccacttgagcggcaacaagatcgccggagcgattccggcgagctacggcgccatgtccctgcaagatttggacctctcgtcgaaccgtctcgccggcgagatcccgccggagctcgggagcttgccgttgaccaagctgaacctgcgccgcaacgccttgtcgggacgtgtccctgcgacgctcgggaacgccgcgagaatggagatgctcgacctgtccgggaacgcgctcgacggcggcgtgccggtggagctgacgaagctggccgagatgtggtacctcaacctgagcagcaacaacctctccggcgaggtgccgcccctgctcggcaagatgaggtcgctgacgacgctggatctcagcggcaaccccggcctgtgcggccacgacattgccgggctgaactcttgcagctcgaacaccaccaccggcgacggccactccggtaagacgaggctggtgctcgccgtcacgctctccgtcgccgccgcgctgctggtgtccatggtggccgtggtttgcgcggtgtcacgcaaggcgaggcgagccgccgtcgtcgtagagaaggcggagacgtcggcgagcggaggcggcgggagctcgacggcggcggcggtgcaggcctcgatatggagcaaggacacgacgttctccttcggcgacatcctggcggcgacggagcacttcaacgacgcgtactgcatcggcaaggggagcttcgggaccgtgtaccgcgccgacctcggcggcgggcgcgccgtcgccgtgaagcggctcgacgcgtcggagaccggcgacgcgtgctggggcgtcagcgagaggagcttcgagaacgaggtgagggcgctgacgcgggtccgccaccgcaacatcgtcaagctccacggcttctgcgccatgggcgggtacatgtacctcgtgtacgagctcgccgagcggggcagcctcggcgcggtgctgtacggcggcggcggcggcggcggctgcaggttcgactggccggcgaggatgagggcgatcaggggcgtcgcgcacgcgctcgcctacctccaccacgactgctcgccgccgatgatccaccgcgacgtctccgtcaacaacgtcctcctcgacccggactacgagccgcgggtgtcggacttcggcacggcgaggttcctcgtccccggccgctccacctgcgacagcatcgccggctcctacggctacatggcaccaggtacaaactgtccgtacatccatagccacacagggtgaaaacggtcggaatctaacgacgctgctagttgattatatttatcatttaaactactcagtacgatattaatgtgatgcataaagaaattagaaaaaacaaattttatatctatgatatttaaaatcttaatagtggtggtgtccattcgcacgcaatctctaccattgacatatgggtctcataatctatactattacctttcagcaaatcttcaatttcaccattagctctcccaaatttcaaaatcacctacttgttgaaataagaaaaactatagtattacttagactaaatagggtcttattattaactagctgggtgacccgcgcaattacgcggctagcacccaaacaaaatcatatattattttagtatgattcatttaaaatttattaaataactagctcattgtcttaagactttgaaagaccaaaccttatcatcctcgtgtttctaattatatagtttttaaaagtcacaccagttgctaccccttatgtcatctccttctttatttgcttgctcgatctatcactatttctattcatttttcttggaacatttaaaaattggattttatagtttttagagtttattgttatgttgggtttcatttttataatatctagatgtcccgtcaaacgttgccattatactcctctatggcccgtccactgtctcttctctttattgtcattgagatttttaaaatcgaacataattatcatttgtgttcattttttactttctagaagtcccgccaaaccatcagcggctttgccattgtactcctctacggttcgcccgctgcctcccttctttattgtcattgagattttaaaatcaaacatgattattattgttttttttttactttttagaagttccaaacctttaaaaattaaacttgtagttttattttttataatttttagaagtcccttcaaacgatgccactatgcccctctacagcccgtccgccgcctactctttatcgtcattgtgattctaaaaatcgaacataactatcgttagaatttattttttattttctagaagtcccgtcaaccgtcggcggctctgcaactatactcttatacaccctgcccactgtttttcctttttattgtcattgagattttaaaaatcgaatatgattatcaatggtgttttttttttactttctagaagtctcggcaaccgccttacttgtttgcttcacggcctacttgacgtccctccttttaatcgtcattaggattctatttggtgttttattaacaatttttatatgtcgtatcaaccgccactactctactcctttatatgcatggtacttaatttatctcgtcatgtgttttagatggttttctttcaatagtctttatttttatcacaaattttatacattgtattcctaattgaaatcttatttttctttttctattttcagaatttaattttttttagaaaaattagttaataccgtattgtgtttttttaatgtttttattttctattttcaattttagttgtttcaaaattgtattcctacttgaactctcttttaatttttctaattttggatattattttattttttattcaaaatttttattaatctcgtattaggttcttatatggattcttcgttcaatattgcctatttttaatttcgaatttcatctaattttaaattgtattcatacttgaactcttcttttattttcttttgctaatttcggatttatttttattccgaattttaattaatctcatattgggttcttgtatgtactctttttttaatattccttatttttaattccgactttcagttatttttaaattgtattcctacttggactctcctttccttttctaattttggattttattttatttttatttcgaattttgattaatctcgtattgggttcttatatggaaacttctttcaatattgcttatttttaattccgaatttcagctatttttaaactgtatttctacttggactctcctttccttttctaattttggatattattttatttttattttgaattttgattaatctcgtattgggttcttatatggaaacttatttcaatattgcttatttttaattctgaattttagatatttttaaattgtacttctacttggactcttcttttctttttttttttctttttctctgattaatgtgggaatttctagcccccacagcgaacatggtgcctcctttcaatgctgttttaataatataatagattgattgattgattcaataagctagaaatttaatttgttttctgttgcaatgcacggactctaagctagtatagccaaaaaaaaaaaggaaaaccgttgaaaacagtgccccttaaacataaacggcgcccaattgattgagaattttcgtgaccattttcaccccttatacacaccgaatccgccattgacgctgataccatgtttatcttgcggtcttgccgcagagctggcgtacatgagggtgacgaccaagtgcgacgtgtacagcttcggcgtcgtggcgatggagatgctcatgggcaagtaccccggcgggctcatcagctcgctgcaacactcgccgcagtcactgtcagccgaggggcacgacggcagcggcggcggcggcggcgaggaggcgtcggcgtcggcgtcgcgccggctgctgctcaaggacgtggtggatcagaggctggacgccccggcggggaagctggccgggcaggtcgtgttcgccttcgtcgtggcgctgtcttgcgtccggacgagccccgacgcccggccgacgatgcgcgccgtcgcgcaggagctcgccgctcgccggcgaccgatcctggacaggccgttcgagatgatcaagataggcgacctgacaaattctcacagatgagagagaaaatttgtgacaaattatcgattgctttgtgcttatgtgattccgttagtagattctcattagcatctgtatagtttttgtacagtgatatttagtcccgtttgagaacagatgatgaagagtgttgattgactttttttaaaaaagaaattaaaaattggatttatctatctatgttttaaaacaagttttatggagaaagttatttcatgaaacacgtcgtttagaagtttgaaagtactaacgaaaggcgaggtaaaatctacatgtaaattaccgaacgtttgggctgaattgatgccttcctacgggctgaatttatgcacagttatcggctgaatttgcactcacataagggccgaattcacgccagcttttgggctcaatcgacgtaaacttgtcggccagattgaccagcatttctgggtcagatttacctgcatatatgggctaaatatgcgcaaaccaacggaccattgagcagaaagcattgggctgaaattacgtcaaataatggccgaatttatcctcattgggtccaactaacgctcactgttgggccaaatttacgggcctaatgggctaaatttgcgctcattttcggtccgcactaacgctcaaataaggggccaattttacgaccttttcggccgaactatggactgaatttactcccaaaaatcttaaaagaaaattcaaaaacaattgttcttaaattcgagtataatctccacctcagttcttacaaattttacccccaaaacacttttatcccactcacaaaaacttgtacatgaacaagtcaaaatactccatacaacaagaatcatccatccggtcatccctcttgcaaaatgcagagacacagagaagtagcagcagcagctcagcacgagaccccgcatggcttgaggacggggcccttgggcttggggatgaaggggtcgatcctgacccagacgagggagaagatggaggcgaggaggatggaccagagcacgacaatggtgggcgtccggttctgcctccccatgagccccttgaggaaggggtagaggtggaggatgacccagaaggagaagaagagcttcccgaacagcgggccccacgacccgtacccgttgttcacggcgtccgacacgccggcgacgatccccaccatgttgatgatgatcagcgtcgtcggcggcaccagcagcgtcgtccacttgaacaggtagagctcgccgaacgcgtcggtctcgtcggcggcggccttggacgtcaccgtgaaagtggtgtccacgccgncgagcaccttgaggaggccctggaacacggcgaacaggtgcgccgacacgccgccgatcacccagaactgctcgttcctccaccagtcctcgatgctcaccccgctccaccgcagctccagcacccccgtcgcgatgatcgacaggaaaagcgctatgaaccatatgctcgccaaattgttaagctacacgtacaccaagatcgcgatcgatcggtcagtgcaagatcatttggagcttgaaattttagcggaaattttgatgttcttggttggttctttaccgtggggatgatgaacttgccggtgaggaggcagacggcggggatggtgcagtaggcgaggaggggaatggaggtgaaggggtagacgatggtgttggtgtaggcgaagcgctcgagccacttgaggcggccgccataggcgtaccagagcgggcaatggcggctcatgaagatctcgacggagccgagcgcccaccggagcacctggtgcagacgatccgacaggttgatgggcgccgaccccttgaatgccgccctcgccggcgtgcagtacaccgacttccacccacggcaatgcatcttgaaccccgttaagatgtcctccgtcaccgacccgtagatccacccaatctgcaagaattttgatttttggttagcttcgatcatcttcctcgagcttgaaaatggtggagattttttgatggattacctccttgccccactcggtcttctcctcgtagccgcagctgatgacgtggatggcctccttgatgagggcggcggggtcggcggcggcgccctgggggaggccgccgtcctcgacgagggtggaggcgatgaacaccggcgactggccgaaccgcttctcgaagctcttctgcgacatgagcgacgagcgctccagctcgtcgtacccctcgaggccctcctcgatctcctccagctcgaacccgcgctggtgcttccggtaccctttcttccctccggcgagcgacgccgcgccgccgccgagcttgtccttcttgctcctcttcttgtagaacccgagcagcccgcggcgcggctcgtcgaggccgccgccctcgccgccgccgccgcccttcttgttcttgtgcgacttgccgcgcttccccccgccgaagcagcagcagcagcagcaccacgacggccagcagtcgcacgtcatcttcggcctcttctccggccgcggcgggtcgtatccgtacagcgcctgcctgttgaacaccgtccccgtccccacgtacaccggcccctgtatcccgtccagccccttcatgttgatctgcacatcaaacgacaccatcgttagctcacgtcacggcgcgacgcacgcacgccggagaagaaggcagtgctcacgtcgaagaagacggtgttgcggttggcgtagcgatcgtggcggtcgatgccgtcgaagcgctgggggaactggacgtagcacagcttcttgccgagctgcttgtccatgaggaagcacatggcctcgcggacggccttgctgttgttgacgtagtggtcgcagtcgaggttgaggatgaagggggcgttggtaagcacggcggagacgcgaacgagggagttcatggcgccggccttcttgtggtggttgtagccgggccgcttctcgcgggacacgtacaccagccgcggcagctcgctgccctcgacgtcgagcgcgccctggctgcccaggtacacctggatcatccccgggtggtccctcgtgttgttccccggccatggcgtcccgtcctgcatcacccacccttcctccggcttcttctgcgccttcgccaccagcgcgtttatcctcaccttgaactcctcatactctctctgtcacatcaagagtaggtgttaaaaaacttatagacgatctaaactggatgacaacatcgagaagggatatatcggtaacgaagtttagccatagcctacatctccaaaaacagactgatcacgagatgctccaattgaatgagggttcaaaattacataacataatttttgacatttcagttctattggacaacctgatatgatattatttcggacgaaacttttaaatgtttttcaaatttttgtgaatttgataatatttattcaaattttaatcattttttttcaaaataaaataaaataattttggatcgaaataaccggctatatcggtccccccaacacaaatgcctaaaacaatatattaaacccttgaatccggtatatccacgacactcaacccgcagatggagtggagaaggtttaccttcatggcgcggcgttctttgacgaaggtgggctggaccttgtccttgaggtagtcgatcttctgggagaagtagaactcgggggcgcggggctcgatggtgaacttcttgcagaaggggacccaccggcgggcgaactcggcggtctcggagagcgtgtcgaagagcagcatggacgcgccgtcgtcggagacgtagcaggagacgcggtcgacggggtagtcgacggcgaggatggacagcacggtgttggcggtgatgatgggcggctccttgagcgggtccaccgtgctgacgaagaaatcgatcggggccaggcggcacggctcgccgtcgcgctcgtaccggagggccagccggtccaggtacgtctccctcgtcaccggcgaccacttgggcagctggtcgaggatccacgacagcgcgaaccacagctcgcagatcaccgaggccagccacagcggcaccgcgtccatcgccggcgtcgtgatccggaacttgaggaagaagcagagcaccaccagccggagcacgatcacgatccggtacgggttgatcttgctcgacgggatcggcaccttcctccacagcggctgcctcgcctccgcgagcctgcatgcagaaattcgatcatcacgatcatgccaaagttcacaagatttgaaaaatctgaggtcgatcgatagatagatctttggagagctaagcttacagcatgtactcgtcgtcgttcttgtcgtcgtcgtcgtcgctgtcgtcgcggttgagcttgccccgcttctcctgcttcgtcttccacttgtcgatcctgtccttccactccatgccaccctccatctccctctcctgctccagatccttcccagccactgcaatttcacagcaatccacacacacatcttcagatgaattgttacaccaagaaacgcaatttcttgcgggatttgagtaccgaccgcttccggtgaaggaagagagcgccgggcctccagggcgccacttctgtgccggctgctcgccgttctcctgcaagacaaaggttgtatacaggtttcgcatcagtttacaagcacttgattgcagagcaattgcagtgagaaatcaatggcgatggatcgatcgagtcgagttgagctctcaccgagtagacgtcgaagttgacgggctcgtgggggggtttctgcttggtggggctcttgatctggaactcctcctcgaagtcgtccatgtcgccgccgtcgtcctcgtcgccttccacccgtgggcaccctgcgaccgatcgatcgagacagacagacagacattcttgtcaagctcgatcttgtgaactaaattgcgattgatcacatggacacaacacatgatgttacctttgtggcgcttgtagcgggtgttgcactgggggcagcactgggtgccctcgctgcgctcgtactcgtagcagggcttgcacaccgggaagccgcactcggcgcacgccacgaacggcttcccgtcctccctcgccgccacctcctcgccgcacacccggcacgtcttctccttccccttgtgctcgccaccggtgacggaggcggtgtccatggtgaggtgccggggaagcgacgttggtgggcgaggaggaggcggcggctagctaggtgatatagcagctggttgatgatcagatgcagggaggcgggggcggtaaggtggcggggtggcgtcccgcaccaaccgtgagttggggcgtcccggtttgattagagcgcaagccaaggcacgcacgcacgcggccgcgcgcgccatgcattgctcgcttcggaagcaagccgccgctgccgatgctgctgctgctggaacgagatcgtcgtaaggtgagatcgcaacgagacgcgagggaaatgtgttggaggggtcgtagtgcagctgaagcaaaatcgaaggccaacggtgaagggacgtggatgtgtttggtgggtgggttgcggtgacgcctcaccgtttttctggtgagatggtgcaggggggagatccgggccatccggctcgtgtaagcgttaagtcactgcgtgtataaatggcagacggtaggaggaaggccatctgaacctgtcaagtgagatgaaatcctgcgatgctggcgttaacacgcattgcgattcagggaggctctggtgtagcagcacgccgacacacacacacacacactctttctcggttcaaacgtgagcgtgaccaacacatatcaggttagccatctaggacaaactagactcgaggccccgagagccaacatcagctagatttttgtttttttttatgtttcacgttttcagtacgaatcaggtgtgcagtgagaaaagcaatggattgatgcttgcattaaaaagggtaagtagtgtacaccatccagtaagaatatgccgtgtaagcagatcgcaatgccatggctcctcttgattgtcaatgtatgttacgagcaaaattaagtggcgtacaaactcctcaacatctttgtatcttttaccataagctatcagagaggaaagcaacacaataggtcggaaaaattgcctcggacaacaacactagctgaggctgtaaagaacaggcgccggtatcggcacaccactcgatggccactatccaagctgcaacgttttgcggtgacttacacgttgtaccgtccacctctgcttggtttctccctcttggcgtcatcctgcattgaagttgaagcaccatccaaatagaatgagctatggacgtatttgatctattctacaggtgactaaaaaataatatgttattgagacaacaaaaatagtctaaacacatacatggaagctgtagaccatcttatcattgtagtcaacaatctccttccatttcttgccaatgtttacctgcaaagcaaaggcatgttagttttctctagttatcattggtctatggttgaagccatgtttcaaaaggtaatgctcaaatctcaaaaaaaaacacatatagagatgtcctttgaatgcacagacctgtggtaacaatgaaaaatttatgaagtgcagaaaaaagagacaggatggttgaagagttagggaattacaaagcgattgcttcattgcaaaatgtgaaacgttttagtactattatggtgctcatcaatgcaaaccagcattgatgttgtgtttatgtttttgttatcataccaatgcaatatatcactatatcagaaacaaaatagatggcaatcataatggatgcatcaaccatcaatagtattgcatgatgtgggcaccagatgactttaagagtcttgagtctctttgacacggcatcaaattacctaatagggatttagctcacacaataggctttatcaagcatagcttaaattgactgaaagtcaaatcaaacaaaatagttctctactcaagacagaaataaattgttccaataaaacaagcagataaatggtatcaaataagatatggaactcagaaaagcaaacaaaatgtaaagtctagcctaccatcaaatacttgtcaactgtatcccaaataaattgagcaaaattagtgaagtggacaaatttgatgaacagaatactaaagagaacatggcagctttgaacaacatgtttaatgttgactatagaggtggtgggaaaacaatgtactacagattaaattgcttgctacatcaaatatatgagcaaatacactcatattgttatactacagtatttttcaaaaaaccaacctgaacggcttcattgctggcagtcctagtccacaatgcaagcttgtctcctctctggcggacactagcaacaactccacaaatttcctcactttcatcaaactgctctccaatcagagccatcagctgcatgttcgaaaagtttgtcagcagaaatgatagaaactttagaagataggtcaagcaacagatgttatatccaaagcacttcagagcctccgaccaaactaagcaatgattttagaggaaatgtaccgtttcaagccacatgttctcaagggtggtcttcctgctacatggcacagtccatttgcccccatttgcacactctgggtcttcccactttggttctacaccagccttgaataaatgaaaatcagcatttactgtcaccttgcttggacggaaaatctgatcatacaagctgcagcaagaaataaggggatttaaatgaaaggaagatcatgcctgcacatataggataaaaggacaatcaaattcaaaagtatccgataataggcaggaatacctacagtaagaacttgccaaaacatagaaaaaatacaacagagtaattaatacctacgcctccatgtgcccacaatattgaatgtcattctagttgtaagtctcaaaaggtataactatttttcttatctttagacacaaaaaaaaaagtcgcatgcaagcttgaataataaataaacaacaaagatagttgtgttcatatgttgtataattgctacccttgtacatttaaccacattaaaagtcccggaacatccataaaagaagctagaaaatatactccatgcagcatgtatggaaataagacaactctatcaacagctggttcagcaatacgaggccttcgagaaatcttaaacattctagtctatcaacagctggttcagcaatacaaagccgtagagaaatctgaacattcaaaatcagttgttacgactatgcgggaggggacaattgttgtttataagacacaacaaacgaccagggttgcacttcgggaaacaagcatccagacaatccctaaacatcagtaatccacgatgcagcctacacttaaaatcagctccaaagtaatcagcatcgatgcattgtagtaattagatctgacgaaaactgcagccaacgatagcatcaacaaacatatcagcgaaaaaaaaaactaaccgaagtaccctctaatcattctagattgtgctcgcatgggaataatcagaacccccgatctacaccaccagaaatacccacggcatagccactaaatcaagcatatgagctaccagacaggatcaaaacacagaaagtagatcagatccgaagaccgggaaacggatcgggcaagggcttagggcgcttcatcggcacgtacccccagaactcctcgacggtgtcgaaggtgtaggccttgcggagcgaggtcccccacgcggcgccgggcttgggcttggactggatgtcgtaccagaacgcccactgcctatgcagcttgtgcggcgccttcgccgccgccgctccctccgccgccgccacctccggggtctccgccgccgcaatcggcgctgcctccacctcagccatgtccgctccgccgccgccgccgccgcctctgctcctcctcgagggaaaacgaacgagtaggcgatgcgagagagagaagagaagggagaagccgccgccgccgccgaggggaaagagaaggagaaggggaagaaggtttcggcttctggatatggccgcgttggcgagggagatgtgctgcgttttcacctgggctacgaccccacgatgccactagaggcccggtccggcccgtttataacgggacgcaagtacatcgcagtctccttgtggcccatatagatgggcctcacgtgaaacgaaacccattcccgacacaaataaaatgggcctcatgtgcaccgaaggtccctcaacttgtcatcgagttacaaaatcgtctcccaaccgcaaaaccagatatcgggtatcccttaactaacaaaaccattcgttttaggtccttcggtggttttgacctcggttttatccgacgtggcggctgagtcagcgtgggacccacatgtcagcgtggccatgtcagcctcctctctcttttcccctcttctctgccttcctcatctctctctcttctcagcgagatcaacagtgcaaggcggcaacgctgggggagcggcgcgcaggcgacagggggaggagttgcgggcggtaggggaaggagcggcgcgtgggcggtggggaaaggagcggcacgcgggcggcgggaggaggatgtgatatcccagctcaaggcttaataggattaatagaatactcatatcttgcaacttcttttccggaagccggtctcgaaaaaactctgagattaagcgtgcttggcctagagcaattttgggatgggtgaccgaccgagaaattcttcttaacctagagcaattttgggatgggtgaccgaccgggaaattcttcccgagtgtgcatgagtgagaacaaagtgtgcagaaaagactagtgttggtttgtgagggcagtctatatcctaggaaagctgccagatgtagaaagggcccggcctcggagagtgtgggggcgtcacatatggtatcagagccgactcttgtagctatacgtatatatgaatatgcacgcgggcatacagtgtatacgggatgatccacgatgtggtcgtatggtatgacgtatgtgcgccgaaaaatgtctgcatatacgtggtgctaataggagacattcctggcctgggttgaccgacgaggacgtcggtatcttaagggggtgagaatgtgatatcccggctcagggcttaataggattaatagaatactcatcaacaagttgcaacttcttttccggaagccgatctcgaaaaaactctaaggttaagtgtgcatggcctagagcaattttgggatgggtgactgaccgggaaattcttcccggtgcgcctcaggttcttcctccccccgcgccgcg

SEQ ID NO: 9540 - DNA, 7836 bp, Oryza sativa
ttttttccaacattttaagactacgtcaagctccaagaacagagtcgtaatcgagataattggatgttaagggcagctccagctctagttcgaagccacaattcactgttaacatcgatttgtagaaccgttagccgtctccgttaccgttagccattgacgtgtttaaaaagacatctagtgtggccactagatgtcgcgatgtccacacgcggccacactcagagctttttgcgttcagcgaccctgtcgagtagtcctgatttccgtgtccaacgtttaactgtccgtcttatgtgaatttttttttataattagtatttttattattgttagatgataaaacataattaatactttatgtgtgacttgtctttttaattttttttataatttttttaaataagacgaacggtcaaacgttggacacgaaaatatagagtttgtcttttttttttcttcgaacggagggagtaggtgtcgtgcagcgcgggtacgagggatgctcctcaagctcaagcaacctgtgtacatggatatgacgacgtcgctgggagcgagagagaaaatggattctcgggaatataaagttgatatatgtagcacagtgataatcaacaacaactactcgtatttaaaaacagatgccccttcgtagctgcattctggaattccttgcaaatcaacctgaacatcacctctatgcaggagcttcacaatctgcccagaccaagccggattccgaccaaacacttcgaaatcttctagtacctccgcttctgggggctgttgaatcatcggcagacgtcgtcttcagaaagcagaacccctccggcctccaccgcccggctaatttcaaaatgtctagaagatgcaaacctcaggacggaaaggttaaaatgcgccgacaggattgcagtagaatctggaaagaaattctttcctccttgctgcaccccaatgtaacaaactaatcatatgtattgtttctccctttaatgaaattcaggtgggaaagctcttcccccgataaccagttaaaaaaacaatggtgaagaaatgctctttactctcggtttagaaccctctgtagttcggtttttctatgaattcgggattaaaaatcgctatgtttagttctggttcaaatacccatgactaaatatcgatctttaatcctgattagtaacaccaaccgggagtaaagaggggaatcttttagtcccggttggtgagggtagcgccacgtctctggtcccattcttctctttttttttccatattgatttcacaccaatctcaccaaaatcatcacaattccaaatagagatgctccctacatctccagatcaaagtaacaataacacaaatcataatattcacatcacaacttgtcgaaaagaaacatcacaaattctaaaaaaaaattacatcacaaatacatcatagatcaaataacacagatccaataaatcataaattcttaaaaaaaagaaaaaaaaagaaatccggccgcagcgagctcctgtcgcgccgccgcctcctcctgcttcccgccgcgggccgccgcccccatccggccgccgccaaccataccccgccgccagcctcgctggccaccgctcgctcctcgtcggtagcaactgtgagaggatgaggaatagaaagagaaggatagaggacaagagtgagagagaggatgaataggagatagaaaattttgaggataagagagcaagagattatacacggtatattgatttttggtcctgattgggaacaactactaggactaaagttaggattttagtcccggttaatgttaccaaccgggactaaaaatatctgggacctgacagcctctgacacgaggtgaaccgggactaaagatcatcttaattttactcccggttggtgttactaaccgggactaaagatcacacagtccctttatatttataaactgctttttagtcccggtttttaatggaattgtaactattgtggatttggattgaccgactaaagatggtttctcttactggcgtccaaacacaaacaacaaattaagcttgatacatgcatgttgatgtaaaaagttttgaattggtttcgagtgtccacaaaaaacaaataagatgccccatggatgcctgcctgcaaacttatactgtctgcttggatgatttccttggtgcgatcctgttcttgttgtgatccaattaatttggcagacaccaattttctgcacgcgtacatatatatcgatccattgttactagtcaaagaaacccaaatgcatatgtatacgagtatccaaaatgcacgaaactgaggatagatccatgtctctttcttcttcatccattcttcctccgttttgctagagaagaagaacagctctggcactagtactactactactacgacaaagcctgaatttgttttttggtacgaaaggagtatacacgaaatgcatggcctgctttctgacatctcgtctataaataccctgatgtgcatcctttccctacaccaccacatcgataacattcgatcacattcggctagtaaccaagcagttcttacgctagagctagctcgagcaatggtgaagtgggcagctgtgatggagatgcttctgctgacggcagcagcgacggcggtagcggtggtggcggcgcagtgtgaccctgagcagctatcggcgtgcgtgagcccgatcttctacgggacggcgccatcagagtcgtgctgctccaacctacgcgcacagcagaaggaggggtgcctctgccagtacgcgaaagacccgacgtacgcgtcctacgtcaacaacaccaacgcacgcaagaccatcgccgcctgcggcatccccattcccagctgctaggctcgatctcccgccgccgccggccatgatgcgtacgtggcatatatacgcgtggtgtgtacgtgcgcttgaagaaaagggcgtgagtttgaattaataattatccagtacgcgatgtttgatcgatcgatgatgtgccttttttttttggtatttgaagtttgaactctgaatttcatcttgtgttaattggagtatgatagctgtgtgtacattcgttttggaggtagaggccggtttaattcattatctgttctaggcttgatcgccgcctcccgttggtgcggccatgatacgtgcactagtggagaagtgatctttactgggacatgcaaaaatcatattagtccctgttcaagtaggaacggttcaaaagtccataggttctttttatctttagtcccaccaaaattaaaaaaaaatcgtgaattgctgccttgaaccgtgcgcctcgtccttatctcctcctcccctctcattttctcaccctctccttcccctctcctccccctccccctccccctcccccctcctccgacgacggcgacgccgggcggcggcctcccctccgccagatcctacggaaggggagggcaagcgacagcctggcggaagcggccgcggcggctggtggtggcctccccttcgccagatccgacgagagaggaggctgggaggcggcgcacggttgggcagccggcggcgactgtggctgtggatttattttttagattttgtgaatgattcgtaaatattgttgtagatttttttagatttggtgacgattttgtggatgattttataaatggtttgtggattgtggatgattttgtggatgggcctatgaattgtgaatgattcgttgtgcatgatttgtggggatttagggatgacgacgttggtgcttgaaatcaatatatgactttagtgaactaatgaatgaaaaaaacaatgaaaaaaaaagaaaaaaaaactctagtggactggctagcgttaccatatttattttaaccacatctttagtccctaattggacgttccagtttgcaaaccagaactaaattaaaaaagattgtaaaccgggacttaaagagccctcgccgagcggtgttggcatagatactgtgtgcacttgaataaaacgatgtgggtttggattaataattaacgatcgattataactttattataggtgggtgtccagctaacgaataggaaaaagaagaaaaactcatatcatgagagagattaatgattgtgtgaaaacttaaaaatatgtaagattttttttccaaacggctgtttttagggtatttttccatgtcataaaagaattataactgagaagaattcttacatgcttccaaacttcaatcactactataacaacaaatacccctaaacggctgttgactggaatccagctaaaatggagagagaaaaatcctacttcaaaactcagaaattttacatggatttcaattcctgtgaaattacttcattctaaaaacgacctcatgccctaagagcgaagtcctgagatagatcaatcactatttcattactccctcagtttcagattatagtcgttttgactttgatgaaagtcaaattactccaaatatttgactaattttatagataaatatattaatttttacagcaacaaattagttttattttaacatattttcataatatatttgtcttggattgaaaatgttacaatttttttacaaatttgaagcagtttattttgatcaaaattaaaacgacttataatttaaaacaaagatagtactatagatttgattttttggaggagactctcggtaagttacggacagatataaattctctcgcctgcaacaatcgctctctaagggaccatttaaggagccacattaatgctagtagtaatagatgattcgacccaatattttgaccacaaagcaacaggccaaacataagaatgataacttgacaagcttgagttttttcaagtgaaaacacttactcctctatttaaaataagttaacttttagctataaatttgtagctataaagttagttttaattgggacggaggatgtacgcgagatgttgatgatgtgtattgttatgtccaaacgccttcagttcttttctgtagagcattgagagtgcaatgaaggccaaacagattaccacaagattgatgagtgatgacccatttattggtgctcatctgcccgaatttatttgctagtactacatccgctgtttccgttcaacgttcgggcttggtattgaaagctgcagtgcaaaatgtccgaaacggcacgcacaagtggaagtggtagctgccactatcaaattctactaaaggctgagtttagttttaaatttttttttcaaacttccaattttttcatcatatcagaactttcctatacacaaactttcaacttcaaccaaacttctaattttggcgtgaactaaacatatccaaaataggacggtactgcagggtacagatactgattcgtcctaatctgatcctaggtcgctatatagtgaaacgaaaggggtattttataacggtcaccagcctaccaccttataactactcacaacagaatactagttttctagtgatatagtataataactcatataaatcaactgttaaaatcatctttaatgaatgataatgttgataatactgagagcatcgtcgtaaagttaccataaaagtgtttttacggttcgtaccgtggtaacagagcagaagtgtaagttacttcctccgttttatattataagactttttagcattgtccacattcatatatatgttaataaatctagatatatatgtgtgcttagattcattaacatctatataaatgtggataatgctagaaagtcttataatctaaaatagaggtagtaaacattatagggcctatttggagagcttctagctgctgcaccttttcatagaattataaactctcccaaactctagtttctttatcaagattctaaagttgtagaattcaaaaaataaactaaaagctagatgctgggaaactcatagttccgatttccgatcttgtgggagcgtgaaatgctactacttcagagttcactattctgagatgatttatggtgtcaagtttgcgatatctcaactcaacaaaatcgtccaaaaatttcgcattgttggacatgttggttatgaaaacagcaccttcaatcgataacaacagatacttcggttgtgttcttttggagggtaaccctcccctcaacaaacggagcaacaaattcacacataattaattatgtgttatttaaaaactttgaaaaataaattaatatgatatttcacgtctacttttctatatatatagggggtgtttagattcaggggtgtaaagttttaacgtgtcacatcgggtattatatatggtgccgcatggggtgttcgagcactaataaaaaaataattacagaatccgtcagtaaaccatgagacgaatttattaagcccaattaatccgttattatcaaatatttactgtagcaccatattatcaaatcatggagcaagtaggcttaaaagattcgtctcgcaaattagtcgcaatctgtgcaattagttattttttagcctatatttaatacttcatgtaggtgttcaaacgttcgatatgacatggtgaaaaattttagggtgggacctaaacagggccatatttcttaaaagcacactatttagtattttggaaagcgtgcgtgcgaaaaacgagaaagtgaagattggaaaccttaagttaagaaaggggttctgaatatttttgccccttccatagataaaaaagaataagagtttcatatttaatattcctatttaatttttttaataatggattaaaccccggaataattaactatatgctactattacgagtggtgctaaattatttaccactggatctacatgttatggacacatgaggactcacatgtcatatacagcctctacatcccgtaggatgtacgtagccccaaagagacatagtctgagcatttaagcttgcaatacaggttacaaacaacatagatacttcctccgtttcataatgtaagtcattctagtatttctcacattcatattgatgttaatgaatctagacaaatatgaatgtgagaaatgctagaatgacttacattatgaaatggagggagtagaatacaaaatacaaatcaactgtctgtgattgaaatacgagtgtaattttgtgttacccataattaccagtgaaataaatttcccttggtagacaaaccgtttgttgggtgatggatgttacctagcatatggaaatattgaagagtgctaagctaggatccaaaatcaattcatgaaatagtagagcaatgaacattggcaacgaagcaaactagaatcaaacaccgcagatgtaaaaatcatcaacaaaaactccaatccaaattcaactggccataactgcttccatgccttgcattggtcgagagacgagaggatatgtccccagtggcaattgatgttgttgctgttgtcgccttggaccatatccctctcctctgatctctcctctgcagccagccagaacgtacggtgtctccggccgtcgtcacagattaggaaggggagatgcaggcggcggcggcggcggcacggacggcgagagggcaaggcgagactcctgggcagtttttttccctggtagtaatgggccttttccgacggattgtaatccgatcacagcccatccaaacgcacattttcagcccaaatggaaaaaattacggggcggtattatacacctgttttaggcccagaatcagtcataagttgggcatagaccgtgtcgacatggaatccagctaaaatggatgaaaaaatgta

SEQ ID NO: 9541 - DNA, 36790 bp, Oryza sativa
ccctcgcttgccgctgctccgtcgccacgctcgcgctcctctactctgtccgcggcttgctcgcgctccactgctcggcccgccgccgcgctcgcgccttccgctgctccgttgccgcgctcgccctccgctgcgccgcccgcatccgtgctcgccgctccgctcgctgccttcgctccgccgccggacggccgcgccgcgtagcctcgcccacggcgatgacgacggcggcggccacggcgcgcggctgcttcgccatcagcctgaaggagaagagaagagagagaaaagaaaagaggagaaaaaagatgtgaagctgacatgtgttccccatgtgtttttttaatttttttttactgattaggatgccacgtcagtaaaaccggacaaaaaatactgccgagggacctctggtgaacggtttgagtgagtttaggggtacacatttctggttttgtggttaagggacctccaaaaatctcgctgttaagttgagggacctctggtgaacttattccttttttttaggatgggcccgttcggcctaacttgaggaattgggttggtgaggcccaattcggctggcccaccaatccctcgtcttcttctccacgcgacgccggtcaaagtttgacgctgcgacgaaccggagaaggattttcttccgatctcgcttccacctcgccgcctcgccggggaggaggagggtcgatggccgtggcggcgccggcgaaggcggcgcacgcgctggcggccgccgcggcggggatggtgctcctgtggtgcgtgcactttcgcggcggcctcgcgctcagctcccccaccaacaagggcctcatcttcaacgtaagaatcgctcgccccccaccttttcagctgatgggtcgtggatgttgccattgttgttggggagattctcctgtccttagctgtgctggatctttaactcaactgccgtgaacgattgcaacattgtggttagtactgttttactctaaactgcaggctagttgaccattctggttaatggcggcgtcatttgatttggttgcaagcctatagcactgtactgtgctagttcttgtgttatttgtctccaagaatgaacttgataatgctatgtgtacaagagagtagagacctgtattgtttggtgtttgcgctggtatttctactttgctgtgtatattgtgtagtccatgaagaaatgtaaatctccatttgaccacttgggcctgttctgaagatggattgctgggttaccgaaggtttagttttgtgtaaggatttgtgctgaaggtcatttttggaggttaaatccttattagaaattttaggataatgactgagtgactgacaaggcttatatttcggaggggataatatttgaagattgattgtaaaatggtctggtttacttttttaattgcgctctcagagtattacatatggcccatttgctaaaaaaattggttttctgatccctgttatgcaggttcatcctgtgcttatgctgatcgggttcatcattctaggaagtgaaggtcaggacaaaaaaaaactcattcttttttctcctttgatggttttgccatgatgagtattaaaacaatactcactatgctattatttttgcaaagttctcaccgatctattgcgatttgtttgcagccataatgggctacaaaatatggccatggggccatgacacaaataagatggtccatttgcttcttcatgctattgcacttttgctgggttcagttggaatatatgctgccttcaagtttcacaatgaaagtggaattgctaacctctacagcctgcactcctgggttggacttggaactatctgtttatatggtgtacaggtaatttgagcaaagcatttatcattctaatgttgtctgaattgagatttaaggtttggaactatgttagagctttttaaatttatttattgcatcggtagccatgcaagcatgattgccatagctatactactgaatgcctcaaaagagcttccactagattataatagcttggacaagttaactatctgaacccagattagctatttgcaacattccaaatgccactttaagtagtggttttgcctttgtgaagaaaagtgtaaaggaaaagtcatgtaatttgctatgttacatctgtctgtaaaggaaaagtgtctgtaggatattgttgaagcatcaaagcagagagaatcatgcttcattcgacatgatttaggccacaaaccaatagaggaatttaagaatatgtagcataaacctactatgataactcaagaaaatagatgccgatattcctgaattaatcttttccctcccttggcattaccgagtgacatcaaggtatcagctccttgttattaaatattgtgttaggtctcctgattgttgagaactttacaagatgatatcaactaatgaaacatatgtcaataatattttctttgaattcattgttctgaaacttgctcatagtccgtttgctattactcttttgtgtgaccctttccctatattcagaattacctgaaacctgattgtcctaaccccatgttgatattgcagtggatatttggcttcgtcaccttcttcttccccggcgcttcgccgtcgctccgacgcgccgcgctcccatggcacgtccgctcgggccttctcgtctacatattagcgttgctcgcggcggagctggggttcctggagaagctcaccttccttgaggccggagggctcggcagctacagctcggaggccctgcttgtgaacttcaccgccgtgctcgtcatactgctgggctcagccgtcgtgatgtatgttactgctccgatgcacaatgaacattctcatgggtattcagcagtgcgcaagccatgagccagatgagccattgatcgatccagcttcttcatcggctgtgtctgttgtataattgttttgctgaattattcccatagctgctgcctgctgcaaatgtggttcagatctatgggcatgtgatgtaactttgtaagtaactgacgatattaattacgagatgcgaaaattttgaactgtttgtttactgatgatataggagaggatgataataaagatgagattgagacaaagagatgaagcaaacagttctgtcattttcttttgtgtgtcgagttggtactggggaagcacaagaaacaaaaactaaaacctgaagctgtaatcttttccccagccaaggcaccctaataatggcttactactacctaattacaagcaaaaatctgctgccaataaaatccaatgcagtatgcacggaccattgccaatgttaattcttttaatctagacgcattttactgcgagggagggagggagaagaaaaatctctacgcggagaagtagctgaggatgacgtcatcctccctccccgacgccacggcgccgacgacatggccggggctccccttccccttctccgacccgtccgcccacgccgccgtccaccgcgtccgccggctatccccaccaccacctcccccacgcgccttgccgtcctccccgtcgccgccggccatccgcgccgccgccgccgcagccgccgcccgcttctctgcccgccgcttcgccacgtactcctccgagatgtacacgtccatcgacaaagcaaaatgccaggctaagcaagcaagctgtgaagccgtgtgctccctccaagagagcaggcaaaggttgtacacttgtacggcccggtgacgcgtgttgagcgtttgcaaggttggaggggagagcgaagcatgtggggggaggagtggggtgcggtgcgggtcgccggcggcatttatgggggaaggtgagggcggaggcggcgaagcggtgggcaccggccacagtttcgggggctggcgcccgcgaaaccacgtacgagcccgggcctttgtctcggattctgcgagccattcgctgccagtttctattgccgggatcctcctgagctttaaagctagaaagtgccatttccagtttatttttttaaaaaaaattatacgaccttcgttccattttaagtgcaaccataagtttttcggccaagtttgatcattcgtcttatttaaatttttttatataattagtatttttattattatgtgatgataaatataaataatacttcactcatgtttttaatttttttatttattttttatagataatatggacgattaaaattttacacagaaaatcatgcctgcatacggagggagtatatattaaattttgtttcttcgttgggactgcaccggctgccacctatgctgggggagagttacttttcgaatttgttaaacagttgataaaattcaaaaggaggatcgattagcttgataccatgagtatatgctacaacttgggagtggtatatttgttacttgtcttgcatcagttttcgcaatataaatctatttattattctaccactacatcgttcttttttttttactcatcgttttcacgtcgacgtagaatggtgcaaaatgtggctttaaaatgtataatgtataatgtggctttaaaatttacagtcaaatctcaatggttttattatcacgatcgacacaacatgactggtagaatggtatataagatggacagacggctaatcgcaatgactcgcggaataagattacatctagattagtcgatttaactttaggtattaagcctgtggcgcccttttacttttatctataggtccttaattaagatttggggtccttaattttcaaatcttttagccactttttaaatagtattaaatgtttgcccttattacatccctcattaattcttttccaattcagtttaaatgaaaggcaaccaagtcatttggattatttttagtattcttatgtgcacgtctaaaatgacttacaattgaaagaggggattatagattatattattaagagtagatgaaaaacagttgttgtattatctctagaggtttaaaatttattgcattaaaaaggagaaaaatgtgcatatttggatattatgatgggtctagattataaaagcttatgcagatttatcaatctatcaatctaatatatttttaagattgctaaaaagtaaaacatcaccttcgttgtagagacgtataagcaatgacggaggcttatctcctaaactcctactaaaatctatcaaaccttagtgaattttgaaaatacaaggtgtataagcaagttgagtcttactcttggagattttctgactccgcccctgcgtataagttactacattaattagagagaaaaaaatatatgctattagattgtgggggacgataaaattatgtgctttgtatcataagataagagttatatatgaaatccaatcctactttataatttactgtatgcaaaatatatttgtatgtataaaataagagctgagagttctatatatatatatatatcaaatcttgtttaactagaccgcacaaaaaaatcccctacttgcatttatgaaaaacaaagcaagggttatatacattaaattcaactctgcttataaatctggtttcacgtaaaattacatgagaaatatagtagttttaaggaaaaagtacgaattacccccccaactatcgcggtcgttcaaattacccccagaaccacaaaaccggatatttttcacccctaactatgcaaaccggacaaattacccccctcaacccaatccgcggtggttttggtctacgtgacgtacatgtgggaatcccgtcagcattttattgtggggcccacctgtcatatatatactccccctatctcatgtctctctccccccccccctctctcttgggccgtcgggctcagggcagtcggcgcacacggcgccgcgcgggggcgggtggtgggtggcggcggcaggtcgacgagctcggccggctccggtggcagttggcgcagacggcggcgctcgtggccggagctgggtcggcgcgccttgccacctgcctcttcgccacaatcccgtctcgccgccacctccggccatcatccgcgtctccgccacggccaccaaactagcttccagccaaccaagctagagagatcgaagcatggagaacgcggcttagaacctcgtaagcaacgttggtcagttgttgaccgaggaataccagcagctcagcggtgtcggcagcgaggtcgccgagctgcgcgacgacctggccaccatgaacgccctccaccgcgtgcagtccgaggccgacgacggcgccgtggaccacttcgtcctagagtggatgaagcagctccacgagctcacctacgactcggaggactgcatcgaccaataccgcttgtccagctacagcatatgaagaaaaaggccctctcgagccccctcctcctcctccgcatggcggtaacgtcacatacagctcgtagagaccacctacgtttgctgctccccggtctccttctccaggcgcaagagcgtcgtcatctttatggggaactgacaaaaggaaaggaattcgttagtgttagtatcagaccacgattgagaaaataaccaaatctcacaaaaaagaaatgcatgccgaacttaccaccacctgctcgccacgctcttcccgcaccgctgcctcgccggtgagattgccgccctccgcgtacgcgccgtcgccatcaacgagcgccacgcccgccacggtgtcaaccacgccgcgccgcgccgttcccagtccccgcctccttggtgatggtggtgtccacgtcgcccacgcagctgctccaccatgccaacaatggtggcgccgcgggaacagcctcctcctcctccgccgccgctgcctccctcttacgtctctcttgctcctcctccccgtcctcctcccgacgcgcgcctccatccgccgtcccccgtcctcctcccgacgcttccggccatggctcgcctctccgccatggccgcggcgcccgcctctcccccatcccctccacctccccgtgagtcgtgtgcgtgtcgaccgccagcccatccccgcgtcgctgcccatcgcccttccctgcaccgcgccatgcgtgccggccgccggcgtgcgcgccgctgccgctgaccgacgaagagagaaagagagatagaggaagagagaaagtagagtctaacacgactgccacgtgtacgccacgtagaccaaaactaccgcggattgggtcgaggggggtaattcgtccggtttacatagttgggggtgaagaatgtccggttttgaggttcagggggtaattcggacgaccacgataattcagggggtaattcgtactttttcctagttttaatagtagaagcagaaacaattggatttgtatcttttcctcactaatcctcagcatatagattgaattttgacttggcacatgtttatatctttccggcccacagtcagtcgtatggccttctcgtacaattacattaatcaagatttacttcatctgtccaagttgtttgacttaacagtgatacagacatacagtcttttgctagtactgctactgttctggagtcatatactcatatgtaggccgtgtttagttgcaaatttttttcttcaaaatttcaacgttttcattccatcaaaacttttctatacacaaatttttaacttttccgtcgtatcgttccaattttaaccaaaattccaattttgatgtgaactaaacacaaccgtaatctctctatatgagagtaaacttttcggaaactgttcatactgtcacagtggggtggggcctactgccagtactgtggacttctcgtgcagttacataattcaagctttgcttcatttgtcaagtaacactatggctgtgtttagattcaaagtttgggtccaaactttagtttttttccatcacatcaatatgtcatacacacacaactttttagtcacatcatttttaattttaaccaaaatttaaactttgcgctgaactaaacacagcctacgttttcactgaatacgacaataggcacaatcttgtactgctgctactgtactctaaaatcctatgtagagaaaattgacttttcactctctgtatcggagtaaacttttcagaaactgttcatagtcatactattctgaagttctctgtagagaaaatagattatgtacttttatgacagagtaaattaaacttttcagaaactgttcatagtacactataactatcatttgtactagatacgtctatcaacgcttgcttattagcttaccctgcacatccaaaattttaattttgtaaaactcaattttgaagttgattttagggtattttttttcatcgtagtatattttctagcatttgtttttaaactgctaatataacacacacattttttttacccttaaattatttttgtttgcttcgtcattttaaagaaccatttgacgaattttgtgaaggggaatttcagaaccataagaaaaaccatgggcttcttcagttacaacgcgcttggaggagcagctagcaacagcaccagcagaaaagccaaaaaaatcagtgtgaaatcctgcctaaaacccggtgtctaagcacctttgttaagctagctgtgccgcatgtgaccactgcttattcgccacgattaagcaacgaaaatggacgaaacgaatcgaatcaaggaaaagacccgagttgactgcctgattctggcacgtatcagcagtcatcagtacatcgagtcaaaatttcttctgttactcgcaatgatctcacatgcaattttattaagcacatgcagatactgatgatgcagctgatggttttgtgtcagcccaatgtctgagctttgctggtttaacagtttgggctcaagcagaaagcagatcatgatcaattagatcattaattatattctcacctgaatctgctttgggccatcctccccttgcaaaatgcagccagccatagattttctccacggtttgcacaggagaatggcgacacagcatcagagtattgcgagatctccaattgtctaatcagaattggtcatactgtcatcgaatcacttaagcaagcaagccactcccagctaacagttctagactgcctatagctaacaatgggctacctacctacgaatacatggccgttcttgacggctccaacttcatacaagtgcacaagaaaagtcagaaaagggtagagatttgtctccttcacacagacagaatcttcataaaagattaaagatcttagtactagactaattcactttattgacaaaatatttgttctggaaaggcagataatctgagacgtgcataaatattacttcctccgtttcaggttataagacattttgactttagtcaaagttaaactattttaaatttgattaaatttatagacaaatatagcaaatcaataattgaatatatttcataataaatttgttttgggtagaaaatgttactgttttttttctacaaatttggccaaagtcaaaacgtcttataacctagaacggagggagtagataagtttacactatatatagagtttacacgacatattttcccacttacatatgggttatctacctgtgaatacattgccgttcttgacagctgcaacttcgtactagtgctaaaaaagtcagaaaaggttagaagcttgtctcctccactcagaatcttcagaaaaagatactagtagactgattcactttattgacaaaatattggttctgaaaaaaaaaattatgtgacaggtgatcagagatcatggatgtatcagtatcaggagtcgcagtcattagtttcgtttttaagcctacaggaagaacatgtttaattcctgatcgtgtgtatgtgaattgtgaaacggtgacgtaattagccaaatagccaggcatgttttggatgatgaggatcgattttgtgaattgagtttggtcaggtactcttcctcctctctgtctactgcacaacaactccaatgaaattatcatgatgcaacagcaacccagattaacagaccaactagaaaactgaaaataacttgatacataatttgcagtgatgaaatcaagttgggttccattgcacactagcatcccgactgctcacctaacagaaggaaaaaaaaatcacatataaagagtttaagactgatgagccattgttgacatgccagacatgacagtaggaccaggcaatgagaaaccataacaaccgaactcactgtcaggctgtcaactcatatggaacaagagaataaccaaggatttaaccacataattaacttcagaaatgcatgtcgtttctgtctcaatttgttgattaaatgctgttggttattgctggtgttgaatgtggacaggttaatcatgtaaaaatcatgtataaggccatgtttagatttcaatttttttcttcaaacttctaacttttccgtcacatcgaactttcctagtacacataaactttcaacttttccgtcacatcatttcaatttctttaaacttccaattttaatgtggaactaaacacaacctaatataggttcataaaatgtgaggaattgaacctaactggatttaagcaagcgacgccttcgcccgtcgggtctgacgaaaccatcctcccagctcgaactcgctggccgatgtcgctctcgtggatgagcttctcggtgagaaaaaaggtgaaaccatttcgtgatctttaagttttcccgggaccttaactactcctagcttattaggcacaaaaggcacaaatcatctctcgcgttgcacaattatgctcgtaaattcaaacgggtgatgtcattcgatcaaatcctagataagatcgattaataaggaaggaaaaaaagagtatctttttctggtgatttgaagtgtaaaatcgtgtacggtgaaatcgattaattaggaaggaaaaaagattttttttgtgatgattttttgtgcaaaaatgggtacggtagcagggataaatgagaagaaaatgagaggtattggacagtcgacacatgtaatcctgaagatgaaggctgtaattgggttatgccagtagattgtttcagggattcaggccgtgtcacctgtgtgcattgtactggaagagaagtagctttcactgattcatcaaaatttaagtgcacacggcacggcacccatttgcttggtgacacaaaagcaggcgaaaagataggactaatgtggaaatttgcatttctcaagaaatactaggttatgagattgcaagattaaattcaatcttttttttacgaggtgtgaatgaaatggatacctaatcagaacaatcaaatcacacaatgaagatgaagtttccgttagcaagcttttcaagctaataaacgacgtgttttgtgcgaaaactttctatatgaaagttgcttcaaaatatcttaaatttataataattaaaactcaattaaacataccctaataactttcttgttttgcatgtccgtatttagtatgaatctttataagattcaaatgcagcctgtcaactaattcctcccatcactcaaaaacgaacacaggcctcccctatttcataagttttaaagtccaagaatctttagaaatctgcattttttttcagtggatatacgaacccctctgcacagccattggtatggtatcttgtttctctggccagaatctgcaccagcatacaacatacgaactaaatcttcataaaccaaaaaaacccatggatacagaaagcgatgcatggatagaattgtcagttggcacgccaaactgaccatagattcagctaaaaaaaacaacaaaggccagtcgaaaagaaaaagaatttccttgaatccttatcactgacaatccaatccgatttcacctggttgcttgcttctgctgccatgccatcttctcccaaccaacctgggctaatcagtcgccatccagccagctcctgttaaaaaacaaagaagaacaagaagtagaagcagttcgtgtgcttctctcatttgttccttgatatatttgctacgtcgtcagagaactcgtgcagatagcttctttggctgagttgttggagatggcggaggtggcgccgccggcgccggcgccggagccgaccaaggacatcgccgaggagagggccgccgtgccggcgccggaggagtcgaaggccatgaccgtcgtcgatggtaagtaaggtcaccatgaaaaccatgttttccattgacaaccttgcttattactagttttgttgctgtaataatccaccaagcagagaacatgtttttgttgctctgagctattccaggtgcaacttgtgaaatctcttgttaatttcttcagaaagaaacatgatgaacatatttcaccagagtgtataatatatgaagaaactaattagcaccaacatctctgcaactaccagttaatttgaatctgttaatatgaaccagatagcactatgaagtctgaatcttttcttcttgtttttgaatgctaccctctgaatgtttcatgtttacacaaggagatgtgacatatagtcaggaaaacttctaggacaaaattcatccaaaatatcaaaattgttcccttttttttttgccagatgctgagaaagctgcagcaacaggtggctcacacgaaagaggtaataatagtgattctccatcctctacaattgcctgagatcaagaagctgcacacagcctctcgaattctcgatctgatacacacacaaaccattcctctctcgtgttcatcagacgctctcctgacgacggtcgccacggagaagaggatatcgctgatcaaggcgtgggaggagaacgaaaaggccaaggccgacaacaagtcagtaatactaatagtagctcttctctcacttcttgccaaggctgagttattttcttcaactttgaaccgtgctcgcttttcattagcacgttttttaaactattaaataatgtgctttataaaaacattttatatagaaaataaattcaaactaggtcgaaagatataaaattcctgcattccaaatgagccctcggttaactgaaactttcgcgcacagggcggccaagaagttggccgacatcgcctcatgggagaactccaaggtggccgagatcgaggccgagattaagaagtaccaagtaagttcagctcagctaagttcatcaacaagcagaacaaggagagatcaattatgtgtgtgtgaatcattgagttgatcgatcggttcatatatatgcaggagtacctggagaggaagaaggcggagcaggtggagaagttgatgaacggcgtggcgaaggtgcacagggcggcggaggagaagcgagcggcgacggaggcgcggcgaggggaggaggtggtgaaggccgaggaggccgcagcaaagtaccgcgccaagggagagccgcccaagaagttgctcttcggttgaatctcttctcggtcatctccattgatcgtcgtcgtcgtcgtcgttgttgtaaatgtgtgtgcgacagtgtgagtgtaccggtgtcaagttcagatagctagtggttggatgtattttctcagttgtttgttttcgtttaatttcatgtacagggcagctattgcagtctcatgtgaaaaagggaacatttattatgtacagacatgatgttttggggtctttattcggattcggcggtgaaattgtaacatttttgtgcctgtggtacttggctagtactcatgtataagaggcttacccatttgacattattaaaatgttggtgctgttacgtattgtcgtgttttaatgagttattacttttaagtgaaatgattagctagagaggtccaatactagttgtgtttcacatgtttagctactactcctccatatttcaatgtatgacaccgttgactttttaaccaatgtttgaccattcgttttattcaaaatttttgtgcaaatataaaaatatttatgttatgcttaaaaacatttgatgataaatcaagtcacaataaaataaatgataattaaataaattttttaaataagacaaatggtcaaacgatagataaaaagtcaacagcgtcatacatcaaaatatagaggtagtattacggaacacacagacaagttatatgcacgcaaagacatcacaaacttgaggtgcttcttcttaagttacgaaataaagccctttcatattcgtttcctattggttttcaactcgtgttagggtgccaacatgaaaaagcgatcaaaattcaatatacgacctttaaatataactagataaatttaattataaaggtctagaaacaaactacttcctatacaatcagtacattttatcaactcactcaccatatattctctctgttttaaaatgtatcacaccgttaacttttcacataacgtttggctattcatcttatttaaaaatgtagcataaatatataaaagtataggttaagattatattttattttgagatgttcgagggtacttaacggtgtaggccccgtttagttccaaattttttttctcaaaaacatcacattgaatctttggacacatgcgtgaagcattaaatatagataaatgaaaaaactaattgcacagttagggggaaatcgcgagacgaatcttttgagcctaattagtccatgattagcctaagtgctacaataatccatatgtgctaacgacagattaattagactcaaaatattcgtctagtgcattccaggcgagttatgaaattattattttcactagcaaatatgcccgtgcgttgcaacgggtgaaaaaacgtaatgataatatacgtttttcatgcataaccatgtcgataacaatcagaaaattagaactacgaaactttattttctagcgcgttttcttttgtgcttttttctgacatttttccctcacgtgtttttttaaaccgtttttattttctcgcgcattttttccttttttaatatactgtagaaacttctctttttatagttagattagattagattagagataaagaagatatataaatggactaaaaaacgacgaatataaatttgacttttttcctccgcgcttttttccgtccttttaattttttttctcgtgcatttcttttacgaagggtttttttcaccactttcacatagtgtcaaacctttctagatataataggattcgattttttttaccgcatcacgtataattcctttttctttagaaacagacaattttttcgcccttttttatcgcgtcaacggagtcggaatcgttttgattctttcccctttttttttggatcggacagatttttttttgcccggtttatttcgcccgatcgattttttttaccgcgtcacatataattccttttactttggatttttttcgccctttttttaccgcgtcgacggagtcggattcgttttgattttttttctccctttactttggaattttttcgccctgttttcaccacgtcgacggagtcggattcgttttgatttttcccctttttggctttttttgataggacagatttgtttttttttcgccccgtttttttatcggacttttatcttttttttcgcctggtttttttattttttttaccgcgtcacatataattcctttttctttatcggaaagttttttttcgcctttttttaccgcgtcgatggagtcagattcttttcagctttttccttttcttttatcgtacaaatttttttttcgcccatttttttttctcctgtttttttcggatcagactatttttttcttttttcgcctggtcgatttttttaccacgatatatataattcctttttctttggaataggacagttttctttttatttttttaaactctttttaccgcgtcgatgtagtcggattcgtttcgatttttttcctttttttgctttcttttttgtcagacagatttgttttttttccacccggtttttttccgcccaggtttttttatcggacttttcttttttttttttgctccacgatacatataattcatttttctttggaataggacagttttctttttatttttttaaactctttttaccgcgtcgatgtagtcggattcgtttcggtattttttccttttttttttgtcggacatatttgttttttttccgcccggttttttttcgccaggtttttttatcggacttttctttttttttcgctcggtttttttctctcgttttttgacggacgacagaagcacctagagaagtgttttttttcttttctccaatccaatacagatcggatctcttccagggaaatcagattttttttctccagggaatcggactctttttttttcgctttttttattcattaaacggtttgtctctcggactttttttttccctttttaagggatcgggtgtttttttgccagggacgggtgtttttttcgcccggtttttttttttcactttttttttggatcggactttttttttcgtccggtttttttatcaaacaaacttggttttttctgcccggtttttttcacccggtttttttgacggacgatggaagcacctcttattttttaagtagtagtagatagtagagtagtagattcgtgtccgaaaaacccttctcacacaaaaatatccaatgtgacacccaaatttttttttcgggaacagtaagcgagtaacacgtgcgctcgtgcagggcgtgtaccagaaccaggaaggccaaagccaaacacaacccctcccattcaaaaatatcagcccctctctctcccgattccgacttcctcctgatccacctccaaagcccacgccacccgcaccgcaccacccaaagcggggggaaacccaaaccggcgaaaccctagatctctctccgctccgcctcgtcgctcccccaaaccctagatccccgccatgcaccaccccagggcgcgctacccgcccggctacacctccggcggcggcggcggaggcggaggcggaggaggaggcggccgtggtaatggcggcggcggatttggaggaggtggcggcggcggcggcgggaaccacggctactacggccggggtccgcagccgcagccgcagcagcagcactaccaccaccaggcgcagcagctgcatcagcatcagcagcagcagcagcacgcgcagaggaacagctcctcgcagcagcagcagtggctgcggcgggaccaggccacggcggcggctgcgtccggggaggtcgcggcgaggacggcggcgcagctggaagccgtcgactcgaggtatgtggattttttacgcggttttccggtaacgctgctttggtgcctgccagctgctagggtttgtgttttgttgttagaagaaagcagagcgtatactgcgtttgggagtgtaggatggcgagattgaggcgtacgagttgatcgcatggattggatgtaatttggggggtttggattgtgcgcatattattcagctattaacagtgttctgtttaagctatttatatggcaatagagggtttgtctctacttgtttgtaatattcatgtttcactagcttctgtgcttgcaggactcctgcttgcttgcccctgcattttttttcttttcagaacccagaaaacacgccatcttgccattttattgcattattaatttattcgggtgttttatatttccttgctgtggggtttgaaataggaaatgttgcatcgaagtcattcttgtggcatctttaataacttcattgatcattattttttttgggctctttcagctctgaagattggaaggcacaattgaatttgccagctccagatacacgttataggacagaggtgaaattctgctgtgtatttgtagtattgtttctactatacatcatcatttacttcgttggtttgagcaaatgttggatggaatatttgaatggtaaccatttgctagtgttatgtggtgctgatgctgtgttctgcaacatatgtttttatgcaggatgtcactgcaacgaaaggcaacgagtttgaggattactttttgaaacgtgaactactaatgggaatatatgagaaaggattcgaaaggccatcacctattcaggaagaaagcattccaatagctctgactggtagcgatattcttgcaagagctaaaaacggcactggcaagactgccgcattttgcattcccgcacttgaaaaaattgatccagagaaaaatgccatacaaggtgagctcttcactcttgtattcttatttataaggaaccataacattaatattttcttgattgctgctcccaacattttaaactgcactgttctttccggcattcatgttgatgcatctcaaattcagaaattcattaattatgggtagtatcttagttgtgtatgctagatccatatgaacttcaaaaattcagtgcactttttgtatactatacttagagggaattattggcatgcaaattgtctgacagtcttttgtacgagaacttatgattgtgtcttagcaaactatttgctctttagcattatctaccgtattgacagacaaaaattatgaacaatgcaacaggcattttcttagctgatcacttcttttgcctttttatggggtgctggtatttcagggtgtctattctcactgagctttctcttgagattcccttgtaaagctggctaccccagctattaatgtaagatttcaattggctatatgaaacttttaaaagggcaatgtttctgtggtgctagttttatacccaccttttatttaatttatcgtttcctactcttttggttccccagctattgccgttcccttcttttggtgaggaatcttttgtctttcatgtttacaaacaatacatactgtttatgactctgttggatctgtggattttatctgcagttgttatattggtaccaacacgggaactagctctgcagacctcacaagtttgtaaagagcttgggaagtatctgaatattcaagttatggttagtactggtggaaccagcttaaaggatgacattatgcgtttgtatcaacctgttcatttacttgttgggacacctggtcggatactagatctaactaggaagggcatctgtgtgctgaaggattgttcaatgctcgtaatggatgaggtatcatgagtagcactcaattagggtcatgcttttgttaatttatatatgtttcaatcacaactatgttataatttttcaatttttttatgatctgcaggcagacaaactgttagctccagagtttcagccttccatagagcaactcatccatttccttccagctaatcgtcaactattgatgttttcagcaacctttccagtaaccgttaaggatttcaaagagaaatacctacctaggccttatgttattaatctcatggatgaactaacactaaagggaattacacaatactatgctttcgtggaagaaagacagaaagttcactgtctgaatacacttttctcgaaggtacagctcaccagaaatcctattttttctgtcttgtccatctttaagcataaattgacataatttcccttctttgttttggtcagcttcaaataaaccagtccattatattctgtaactctgttaacagagttgagctactggctaagaaaatcaccgagcttggctattcatgcttctacattcatgcaaaaatgttgcaagaccatcgaaaccgagtgtttcatgattttcgcaatggtgcttgcagaaaccttgtgtgcacaggttctctaccttttgccttgaatattttctgctatttcagctagtgttctgtagcatatgctgtgttacaaaaatcttgttttacgttatcttctgatatccttatttgttgaataatgtattgtaccatcgttgtattttgacttctcaagcatgagatttgacctctgatttctgagtaaataattttcagaattctttggctagtttattagttacacgaaggcttttgctgcttttgcatgctcttacatcataaaataggctcagaagtagcttccggagcatggaatttactacacatgatacatgagctgccaaagcatgcccactgttctgtgctcataagactaggtaccccccaggctatgtctagactctagaatgctcgtagttcgaatgttccactaatagttaatgcactagaaaataacttgtttggcatgatgtctagagcattttttttcacttgaccttccatgtctacttttttttgtactactattgaaataatgtttggatctagatgtattgtaattgtttcaagccatgattcttgatgtgtgtggtaagtgtatctccttttgtgtgtgcacctatcaggttgacttcttttattacatataaacgattaattaatgtgacatgtctttgcagatctgtttacaagaggaattgacatccaagctgtgaatgttgtcattaattttgacttccctaagacttctgaaacatacttgcatagggtaagttgtttcctcccgttccaaaagaaaatattttcctataatctgtaatcatgtaaagctatcaatatatatatgggttgaatgcttgatcgttctaagctgaatgcttgaatgccaattctcattcagatttgctatacttatgggttttgcttgttcacaaataagaacttcaacacaaaaatcaaatctagggttgcatcttgcatgagtgatggtgatttaccattgtgcagtttgcttttgttactgtaagttggatcttcatgtacacttgtaggcaaggtatttagtatcgagatactaggtaggatcgttttttatttgtagtaccataggatcaggatactatcagattttagaaaatacatatttttatataaaatatgtaatatgttgtataaattaaagtatataatattgattttgataaatctaattggttttcatataaacttgagatatttattcacattattgatatccaccttttttaaaataatattttgtaggattgtagggatcattgaatcgggatactacataagatttcgtaggatcgtgtggaaatgaatagtaagatcgagatactatgaaatttaggatatttggtgggatcggtatcgtttcgacttggtaggatcgtagtatcataaggtggatatgaatcgggatattgacaaccttgcttgtaggtaatataacatttggaacatgtgtttgattatgtttacctgcatgatcttgattaacattaatattttattaatttggctcaatggttggttcactgtgccctttcattttgctgctttgtgtggtctgaactaataaacctggtggttttttatattttgttacttctaaaagctctgtattattttttccttaggttggtcgttcagggagatttggacaccttggtttggcggtgaacttaatcacttatgaggaccgtttcaacttgtaaggatgctttgccagagtagatcctgttgtttactcttgtaccaagattctgacctgttcatcttcctttataggtatcggattgagcaagaacttgggacagaaataaaaacgatacccccacaaatcgatctggcagtgtattgtcaatgatcaatgtaacattgtaacggtgtttttatcatttacttattgttaggcaagtacatcagatgtacatagcacctcatcaggtaagcagtgaatttcttagctgccactctttcaaacaacatgacatattgtttcaggtaataattgaagttcttttgtatacccagggttttatttggtgccttgatgacacatctaagcttatattccattagtgaggaagtgttttctgtcggcactgatactaatcatgttaactgtggacttgcatttttggctgcttgaagacgctgcttgaagacccagggctgcggccaaactgaacctttttcttgctccttgtatctgctcaatatttgctttatattcatttgctagcgacagttttggttgtgttatattaggatactgctgcttgagtctgttaccgtcactgtggttccttaattttcctttcctttttcccttttcttctcatgtttggattggactagtagaagtatttccctcactgtattcctcgtgtcaatttctattatccttggtgtagactgttaactttctttaatttaccctcgtttcgtaatatgtatccttgctatttgtgatgttttacacctacttctgtttgacccattacaagcttattacaagctgcaatatataatctgttacatagacattaactttgcctacttaccgaaaattcgagatatcacatgttccttttttcctagaactgagataaacgaaatattttgtgtttctattgtgatacatgtagacagggtttctcttacagcgggggtaagcggtagtgcttggtggattttgagcaaattaaaaaattccaaaaaaatggaaaaaaaatcatggatgtattaacgatagatggtgaagaagtttgttgaaagtgcaagtgtaatagaggatcaaatttgtgggcaaaaccgataatagtttagggtatggggaatggaaaaaagaacatagtgttgggggccttcctttgtattacggtactcttgaattatcatgctatgaagtccataatatagaaaaggtaagcttatgctgaatttttgtattttatatccacaagttaggtttgcaagtatcctatatatttttctaattatccccaacttctacacgcatttaagtgtttttccatttttttagcatttttttcattttcttttcacattttctgccatacatgtcaaggttatcatgctaatgtcgcggttaccgcggtaaaccgtgcacttaccacgaccaaactgtgaaaccgcacaaattttgaattcaaatttttgaagatggaattcacacggttaccgcggtaaccgccttaccgcgggaggtgataacccatcccaaacaataagttaaaccctgtatatagatcgaattcagtattgcatattcgagatatcaagtgatatatgtttttgtttacaaagaatttcatgatcatatgaatagatataaaatagatataatgtctctccatttgacttaaaaattgacttttccccgtatatcccgccattacagtatgtatatctgaataccattttggttagtgatgttaagtcctactagtccactaccagcatgagagctgatcagtcctctacacttgatccttcaatgatgacactttgatgaacataacaaccattcatataaatggcatttttgagggagtataacgaaagggaaaacaattttatgattggcccactgacttatgggttccatcctgagtcagccgccacattggttaaaaccgtcatcaatactgccatgggacctaatgtgaccctgttttgtaagatttggtatatatcatatctggtattctggttcatggatgattttgaaactcgacgacaagatgagggatctcaagtgaacttcttcctatcgataattgttgagcaactacttagcattgtgcgccacttcgtgcgttgtcgctttgtgttggtagagggcaacttctaggggtgaaaatgggcacgaaaattcccgattgactgtttccaatttttacctgacgagcaatgtggaaatggttttgtcgctttgtgttggtagagggcaacttctaggggtgaaaatgggcacgaaaattcccgattgactgtttccaatttttacctgacgagcaatgtggaaatggttactgacgaaaacaaaaatggaaatgatttttgctgcatacctaccactttcaactttttaattaccatatttctaaatacactaagtaatatttatagtctatttctttatttgaccagtagtttagatacccatcaacttctcaaccaaaatccctaacttgggatgaggttaaaaagagacaatttataatttatatagcataaccttgaatttattttatcgtattatataattatgcaaagttaaacgtatgatttattgtcagcttcctcgataccgacatgttttcgttcgtacagtctatttacgatatctcctgttttttttgtttccgacttcatcttttaagttttattttcgaaaaaaagatatgattatgaaaaaaaaactaatatacggaatcccattggaggcacaagggcactagataaaagaggggtaaacattacatatcttctatatacgtttctcctagatttgtttcccccaccgatccatttttctcccccaccgagtaacaacgcttcgtcttcctcctccctctcctcaactccttgaccattgtctccaacatcgacgacatcacctatcctcttttcccccttcctacactggatttagagcatgtgagagaatggagattggcgagggcatgggggttatagccaaagagggagccagctatgactgtgaggttgggggttgtcatgtgtgagcagaaggaaaggaaggtagtgaggctaagggggacgacatcctgggcatcaacaggaaggtggaggtggctggtctcgaagtagatggcgaccttggagttgatgaagtggatacttcaacaagatggtcttcgggtttcttcatgctccttgtcagcccatcacttctactactcgatgttgtgtacaagtacatcacagtcgatactttaggtaccaggagtcgattccaggacctgataccttgggtgtcatgcctggtacccaggtaccagacaagtactagggtatggtacctcaagtactacccataggtatgaggtgcatagtattatgtattaggtattgggtctgatacctatggtatcaggtatcggatcaaggcgtgagcaagaagagcacgctgtcatcgtctggctgaccggcaagtcacctatcgttgtctcatcttctcttctcccttcctctcattgacatctccctccttcctctgttgttgctgtgaccggtgggggcaaagagctaggggtatcgctgctttgtttttttacaacataggagtctgtaagtccgaacatggagaattttaaaagtgaaagattagatttataaagttatcctgttggatcagaatcccgtgctctagtaatcctctttttatgaaaatctccgaccgttttcattccatatacaaaccgcggccaccgttcaaacaatcaaaccagcccaacaaaacaaaattgaataggaccacacgcagtcactcacgctcgccgccagcacacacctccgtgaagccggcgccacggtgaggcactgacgccgtgggcccacgagtctcccgggcccacgcgtcatcctctccatcccctcgtcgtcgtccgctcgcctctgcccccgtgccgaccttaactgccgccgttgtcttctcctccacccaaaagctcgcgaatcaatccacgcttcagagagagagagagagagagagaggcaggtggcgccgccgctgtcccgctcgtctccggtggccggcaggcggccgcagatctcgtctgtccaggatccagtgtgtgcggccgcgggccgccattgtttgggaggaggaggaggatgggtagtagcacaagcgccttcgtcatcaggtggatcaacttcttcaccatggtcagtcgccttccactcctcgcttgctgctcagttgccttcggctcgctgcccctcctccgcttgctgtgttgagcttgagccgcctcacggtttctttcctctctgggctggcggctgatttgctgaaaatgagttcatattgctgccgcggcatttgtaggattcgttgtttggttgggttcctcggctgtttctgtttgtgaagcttagctttcctgcaccgaattcagcctgtttgattcaatgcaacacatggattttgagttttcggttctcctaaatgccaaattacaatattcttttattgcattttttgccttcacatttgctctgagtttcttgtcttcctaatttcttcttctttcatttagtggctactctcaattaatcaatttcacttcttttggatactagtagcactcagtttccagtttaatgttggcacatatccaggctccacaaaatactccacgaccatacggaaagaaacattgcatctttcagcatcaatgcattttatgacactcttaaattctcttcttggttggcagatactggcactactggtggtggggttcgggttctggatgagcacccacaacgacgaatgcaggcggtccttgacgatccctgtcatgggtcttggaggagtaattttcctcatgtaagaatccaagtgtgtccccatgatgttaatctgatgaaccatggtgatttgcgccgtcttaacccggctcagtgttgatgttgcagatcgctcgtggggtttcttggtgcttggaagaaaattgcttgcttgctatggacagtatccttttatttctgaagaaattgatgcatatgatttttttattttatttttcttgtacttttggagttagctgttaccttgacatgtgggtgtctagtatctggtaatgctgttcgtggttttggtggcaatcatggtgttcacagtgcttgcgtaagttcagtttgttaacacatttgatgcagaaggcctttttcagtccaacctggttacaatcatggagtacctttttatttaaaatttgctggtttgtacatcaattaggtgatagaattgaattctaccgcaccatttagggattaattatcaatggacttggtagcttcttctagtggttgcatttttataaccttatattggcatgcactctttgtctgaaaaaagatactggcatgtactgttgcaggtttattatcacaaataccggaactggccattctgtctctggggtgaggtatgtgacagttagtagtacttgcacaaagaattccaatcctaaattaactaacacttgcaatatctgaagaacacaaagaatcttacatgctgttttgtttaatcattctttgcaagcacacttaatggtgtcaaaaacagttttgctgcagcatgcttatgtcaccacacaagtcgtaaatcgtttctcatgtttatgcagatacaaagagtatcgtctgcaggattatagctcttggtttatcaaacaggcatgtcctatttttgtctcaggaaaattcagttgttcattttcctatcatgcagtagtacgttttatattctaaatattttgttcattttctcatactcagctgaatgacactgaaaaatggactcacctgagaagctgtcttgtgaaatcagatgattgtaatggcttgtcaagaagatacaaggtcccccctcttcctcacatattcttactagttactactgatgtgctcactataaagtcgaaagtttctccatttccatcaatttctgccatgtcaatcttacctgtactcttctactccctgcagactctgaaacaatacaagcttgcagatcttactcctatggagtctggttgctgccgtccaccggcagagtacgcattttaaacatctcacagtatattgcaaacttgcaactgttcatcatcaggattttgccataattatcaaatttctctgaacattgtcaggtgcgggtacccagctgtaaacgcttcctactttgatttgagctatcatccagtcagcacgaatgtcgactgcaaactgtacaaaaacgcacgctctgttctgtgctatgattgtgattcttgcaagtaagctccctggttgccaattcccagcttggaattttggaaacatcaaagccattttaagaaaccaatgcttatatgaattgtttgattctagagctggggttgctcaatacatgaaaacagagtggagggtggtagccatctttaacgtcatactgtttgtcatcttggtaagccacagcatcaaatacaacacatataatgtctcattttttcaccatataaatggtagattttccaatccatcttgtgttatttttgacattaattttttctcaaccttttcttttctcttggcttttgtttgcgactagtctttcgtctacttcgtcgcgtgctgtgcgcgccgaaacaccggagagagcgactccaaggttcctacaagatggcatgcatgattggcagatgaagcatcgtagagttagcttttgctattgcttgtagtggcattgttcagtcaagtctcgttggtgaaatggaatgcaagggcttttcctttctggtgtgggatgatgatgttctttgttgcagttggcttgtgaacattttaggaataagttcattttaggtcccttaactttacaccgaatccgattttcatccttcaacccaaaaaccagatacaatcggtccctgagctatcaaaaccggtgcaaacgaggtcccttggcggtttagaaggcggttttggctgacgtagcgccaacgtggctggtttgatttggtcttcgtcccacgtggcatttgacgtggccgttatgtggcaattctatcccagaaaaataataaaaacagtggccccacatgtcagctaaacacaaaaaaaataataatggtggggccctgggccccacctgtcagcttcgcctgccttctttcctctcccctctcttcaccagccgcacgccgtcgcggaggcgctccacctccggcgccggcgactccctcagtctggacacgtcggcgaccgccaccaagaacgcctcccaccacagcacgtcggcgaacagcggcgtgtacctgtcggcgaccagcactgtcacgcacaggcgacatgtcgtcgccgtcagcccgtcacgcaacttcgcggtcctggattgcgaacaggacgaggaagtgcttcgggaggtggagcgcaaccggaaccacgagcggcggtgggctgcccaggggctggcggggcggcgctgggcgctaaagatgatggagaggaggccgctcacgaggacgacagcccgcgtcattattcttgatactggccaattaattcttgattctttgtagatgcgatgattttagcttgagcaaaagcggtagagcttgaatgcttgatactgtactggttactcaacttcatcgcaagccatctcggtcgctgccgtcttgcttggcaccgctcgccgccaccctggtagcagtagcagcaaacaatatgcgagattcttcagggaaataccaagttctggcgctgataggcggcgccatggccgtaacggcagcagtggttgcgtccgtgatgacaagctacaggggtcgagcatggggatctcgatcttgtccgcctcctcctccttgcttgtgttgctctgcgcatcggccgagtcgccgctggagcctggagcagttggtcgtcgcggtggaggatgacgatggcgagggggacgggacgagcacgtcggtccaggtcatcttcttcttgctcttgcccccacccttcttctgctccggcgacacccgcttcttgaggtgcgtgctccacctcgccgttggcgtcctctcggcctcatcccgtcgccatctcccaggagctcgccgccactctccactgctccacccgccgcccctctctccgccagtcacccctcggcatcgcggtgccgtggccccttgcccctgctccggccaccgccgcttagctccactggcctgctccggccaccgcccgtccagctccgccccgcctgtcgcctccaccccgctcaaccagtcaaccttgctctgcccaggtgggagagagggaatcagctcctctgacttcagccctcacgacggcagagagcagtcgaggtcatccagccgtccacgttcgatcgaaccgtccgcccaaaaagcgcacggccgcgtcatgagtctgggccaaggccggcccaacaagccccgtccccgtttggccgccgccatcgcccagccgtgctcgtactcctcgtctggccgccgccatcgccgtcattcttgtcccccgcgccgccctcgctctcgccgtcgtgctcgtcctcctcgccgccctcgctctcaccgtcgggctgcggtactcagctgaggagatggggaccggaaggtgtgcacgatgcagcgcttggtcgcggccacggcgcaccggtgccacgagctcgatgtgcgcgtgccgagctcgagcaggccatgcgccgcgacaggcagcgcgcggcgaatggaggaggggagcgagtggaggaacatagcggcctcctcggcagtcagggagaggaggaactcctcctcgccgtctctcagcagcgagcgagtggaggaacacagcggcctcctcttcagctccttaatgctgcgtccaggagtgttgctttgttgtatgtcaaaccgaatggcattctggagatactgaatgtgcagttattagaatgatagattgttctttacacaggcagcagaccacttgttctgaaaaatggggttgcatgtgttctgtaatttgtatagaaagcaaaaaaactctgtaaattgtttgtagtgagaatggcttgtccaacaaaatgatgaaatggccatttgtaacttatcactgcaatgaaattatgttccaattctgggcatatggcctgttcaagagaaccaacagtttttgtcccccaaaatgcttgctatctgctgtccagtaccaagtgtatatgacatactaaactgtacacactaaccacaggcgtgtgcattcagttaataaaaaagactgaaggtgttcattgatccggcatagcgtcgtcctttcagaagagccttgccatcagaatcctcttccaagtgctcaacaccaatcatgtcatcccctgcgttcagcacctgttggcagtggtgaatgggggcatctgcacatgttcagtaacaaacaagggaggtacaaccaatggatgcataaatgctcaccttgcccaaaagatcaagctgttcatcaagcgtgccaaaagaacaatctcggcaggtgccgcagcccgcagagaccaaaagcctattcaccaaaaccaaactccattgctagaattcaacatcaagatcatcgacggttgctccctgaaaaattaaagaaaatttaaactctgtcgatgttaatactaattgatcatagcttcgaaatattaccgtcaatagttgagagaaggtgttgatggccatgtatggttcagacatttcttccatgggcaaagaggtactaggatatatattttgccctgctggattgtcatgtactgatgcttcttttccctttttcttgcctcccgtctttgcagtcttttgttccttcaaataaaagaaataaaactgagcatgttcccattgaacagtgaaagagaaacaaatatactttgaatactgaacatgttcacatacctttgaaccttttttctttctcttacctcccttgttacttccattctttgtggacttgtgcagcttatcaagccaattttttttgcgctttgaggtttttgtttccacctcctttttctttaggcgagctgtactcaccaagtcacttggaggagtaatatcagtgggacctagagctatggtatcagtaaatccattgatttcttcttcaacttgcttgctaaggatatcaagtgcgttgtttactaacaaggtagaccctggatggctggcagctcgaagtgccaaattgagaaatttgcgggtcatatctttgtagcgaagcatctcatttaatcttgggttctctataatacttcgtccatggttatcttgtactgtcccactatgtgctccacgtgtccatcgcttcagtacatattgtgatgggagagattttatattcatcaaatcaaggacttttaaagcatgtgcacacaatattccagttctactgaacatcccacagccgcatgtactagtttgctctaaaggatcaccaacaactttgtactccttctcaaaggtacaattttcatctagactgccaattgccacaagatagcaattgttgccttccaatgccgtggtgcatgctaccataggtacaattttcatctagactgccaattgccacaagatagcaattgttgccttccaatgccgtggtgcatgctaccatggatctttcatattcagcttgaaaagcttcgaatatgattggtgtgtatagcttgctagcttggattagcataggtgtcctcatttttattctgggtattttcttccttgattcaaattcagcatttagctcattttctcttttatcttccaccaccctttcaaaatgctgaagaaatcgaatgatatcaaaatcagatttgaaatgcctcttgagttcactatttacactctcacttaactgtgtacttctcatacctaatgtgaacacatccttcatgtaacattcagcccatttttctttcaccttgtatatactatccaaccaactttgcttgctcgcctttgccctatggtgcaaatgcttgttcaaatgtttcctcatcttcgtactcaaacatacatgcactaaaatctgcgagaatacttcgttcttcctcgttatcttcggcagtctgtttgggagaattactggattcttcatcctcgagttcagctacatgtttaacagcattctgcatgatatggaaagtgcacaaaccatgccatgattctaaaaacactttcttaattgcttttcccattgcagaatcctgatcagtatagattgttttaggttgcttgccattatgtgcttttaggaaggtctcaaataaccacttgaaggactcatatgtctcatcatacagtagaacagcaccaaaaaccattgtttccctaaactgattgaacccaacaaatacaccaaaaggcctactttccttgtttgttccaaaagtagtgtcaaaactgacaacatcaccaaaatatgcatagtcagtgagcattttagcatcaacccagaatatgtttgctatttgctcctcactatccatctgcaatgcatattgaaatgacgggttctcagcaattttatcttgaaaatgcatgagcatgcttcctgcttgaccatataccatctctcgttggcgtttgccccgtaaataattcttgtggtcacggagagtgcaattgagattaagtgagccaccaacttggatactagccaactgatgtgctgctttgggcccaatgcccgcatcgtcagctgtctcaatttcaaaaccttgtaactctgaaattttcctttgagacaccatcaagtgcgaggtttctggcaattgaaggatgtgattgtgttccaaaactagatcagccactttataattccctttctcctgatctagcacaacacccatgcgaacttgacaatcggttctcgtttcagctcttggacactttgttagatgatcccttttatcctcctttctatgaccctcatttgcacaaacatatctgcatgacctaacctttccatctgatttccttttgtttgagtacctttttctaacctcgaaacctttttgaccaccatagctaacccaaaacatccaagcctcatcaacagtattgaattccatgccaacttcaggtaacaaactaggtagcacacccactctacaggaacaaaaaaaaaatgatttggtggtcatcgaacaagtaaaatctacccgatcatggtgaaaaaagtaacaaccatagctttacagacctgttttcttccatctcaaatatgcagattttgctggaggcttctttgatgaattattccaacactgtctaatggaggaggtggaagacaatcaaataatttgctgaaaaaaaggaagagaagaggccagattacttcacctgtgcttgatcaacggtggaatccgtgctgaaaaaaaaaggaagagaagggttcagatgatcgcctggcgctgtggcctcgtttggcgccaaaaaggcgagcacggccgccaaaacgcatctgttcgcggtaaaaaggaataggagcgagacagacggcgctggaggacgaggcttgttgggccggccttggcccagactcacgacgcggccgtgcgctttttgggcggacggttcgatcaaacgtggacggctggatgacctcgactgctctctgctgtcgtgagggctgaagtcagaggagctgattccggagagagaagatagagagaagagggatgacatgtggggtcaaatgggtcccaccattcattattattttgcgtgtagctgatatgtgggccccatgatttttatttttttagattgaattgccacgtaagcgccacgccacgtggaatgaatacctagtcaacggagccacataggcgccacgtcagccaaaaccaagtacaatactgccgagggaccttctttacacggttttataagtatgtgttgtacccggttttgtactaaagggatgaatttcggactcagcgacaaattaagggacctagaatgaacttaatataacattttatgataaagaatgccatctcacttcagcaactgcaacctgtgggtttttatgctcattttgcaaatgcgctgctgggttaaacaatggcaatgcagggatagagtgatagatcaatatccaaaaaaaatatattagtagaatgtagtaaagcacgagatgtaaatttatgtagctcaactaatcttgaaattgagcaacgtttgatgacggaagctgtcaaaacagaacaaaaaaatggcgtggcgtgataacatagccatagacgtgggcatcggtatctgctgaattaccctccagtagcgcagctaaatgaaaatagcaacaaaaaaaataagtctgaacaaatatgtgactgatagttgttcaggtgctacatctggttcatgcaacgtcagatttttcacttcatcgagcttcacttatcgttcacgagggggctgtaaatagggtaccacatcttccgagccacaaagtcgactgtgtccgcctgtgcacacatgtaaaatgacacatttcagacgccaaactggcaaaaaattcaacttcagggatttgaaattatgtatgatgcagtacctcagtcatgctcttgaggtccctagcgtctacatcacaacgcccctcggccagatcttcatcaacagcggcacggacgactgcggcgccgacacgtgcggtgatgtgcctgatactgcatttttcatggtggtatgttgattagcaaaagtggaatggttggattatggtatcatgctgcctatcagtctgcaatggcgcaggttggatggaagagctaaccttgagattgatggaaagaggatgccttttcgaatttcatcgtctgtgatgtatgacgcaaggctgcgtcagaaatcactagattagatgcatagctcaagccgagtttagttccaaactttttcttcaaacttctaacttttccatcacatcgttctaatttcaaccaaacttccaattttggcgtgaacacacaccctcaatttaccaggaaaaaaaacaaatcatacaaaccatccaagatacattaattatagaaattgtgcaatttaaggtggagaaaacactactttgtcaaaaagtacggctgaagcgtgtaagctttttacgtcacactgtctaatatgctggacatcagtaattgtacttgttagtgcagttgagatcttaagaaatagagctacaagacaacaagcgaaaatatgatccgatcaaacaacagaataaaacttaccactcagctgctgattggagcatgccatctgtaatatgccgagcacctgaaagaagggctcctaaaccgatactgaattatacagaaacgtccatcagaataacatataaaaaaggaaaaaaaaacaagcatttcaaggtaagctataacagttgtcatacccaggaaacagatacatattgtttgcttgattagcgtacccttgtctaccattgcctgggacaaccacattataaaataagtggtcttatgcaaaagtgctagcaaaatgaaatgatatagagaatgttaaatagggcatacctaaagtgacattactgaaagggcttccactggcaaatactgcattgtctccaacatatttgaatacatcttcaggagtacattcggctgtaataagaaaaatataaatatcaggcatttatgtttgggtatcctagaagtaaatattaatgggtgaggtgaggaacctttagtagttgggttggacattgcaaaaattgcaggacgaggggaatcggattctttcatagccttgagaacctgcagaggtacaaagataaagttaagactccaatgttgaaatttataagagagaacatatgagtataccctaacagatgaaatccactaggatcatgatttagcacttcgcaacaagccggcttaatattattacatttgcaaaggagagaacttttgaaacctaacaacacaaatacatatttgatgctcttgtaaccatggtttactcacaaatcataatgaagcaaactaaaacagtatagaaatggcccattaatgtaaacctcacaaaatcctttataaggttggagaaaatattctaactcaatgtgctaccaatcactagcat

SEQ ID NO: 9542 - DNA, 7671 bp, Oryza sativa
  unsure (1)..(7671): unsure at all n locations
tggccaggtcattggtaagaaaagtccagttgcacttgttgatcccccgagatattcatcaaattttgttttgccgctgatcccggaccaattttgaacccccatagctctcttcctcaagattttttcttcttatgataagacctttcttgttatccgctgtttttccctcccatggtccattatgttgtatacatgcgagaatttgttccacttaaattgtagataccggggtcaggtccgaccaatcaatcagtttcatcctttcaaaagtttgaggctttaagttccatcttcagtgaaacgatcatcctttcatttgggccttttttgaacataaaagagnccccctcctcccgaacgcagccttagggatgttttcatcatccaaactaatggtatggtcttcaacagtagtttatggcttatgatctgctatccactacatataaggatccaacatcaaagatggcttgttctagcattgatgggttttatgtattaatcttggaatctcatgtatttgttgcttgatacgttttggcaacttttatcttcctgtccattttgtactctgaaattcctccatgtatctaatgtagggggtctcttggagattcgagttgcatcgtgctggtcaaaaattagttatcccagtaagtatctgttctactcctgagtcctatctggttctaatattttttgtttatcaaatattataatgcaggtacaggataaaagcatcaccgtgatacaaatctattttatttttcactgttgttgataattttaccccttcaataacatatgattccatgtataatttctttttttaggtttcactgacttattaaataattgtgcaggttttgctttcaactgatttcaatgcattacttgctaccagcgtttttgctattccttcaacactatattttctacttcaggttatcaattagtcctatcctatgttcattcttacccctgatttttttttttttgttgggaggattttcctgactggaatgtgatatttgcaactcctagcattatctcacatttgttacctttgctgcatcatcagttcactaaatgcaaattgtgcctttttattgattcacagacgtattttgtaaagccatactgtcttaagcgggaaaagcagaaggaacttgaaaaaatggaaagtttgtcttcacaggtaaaccaaggttgtttgtgtcatttgtattcttacttgtattagacagcttatgtacaccagtgcaaagggcggactggaagtttactagctggaaccttcacatagttttattttggaattagtcacccaactttggttatcacatgccagttcagttaaatctatacagatagatactccttccatctcaaaatatatctactatatttgaaaatgtagttttgcggcggagattaaggaagtaagtggaattgaataggggatggttgtgattgattgagatgagtggtagttggagaagtagctatattttgagacaaaaattgaatgccgaaggtagctatgttttgacggagggaatacatgtattagaccttccattttttccatgatggaacatctatcttttttttttttttgaaagaagaggacaaactatcttgtggcttctctttatcatagctcctctgcaatctgcaactgcaatgtgtctcttaactgcatgcccatgttattttctttgttaaattttatttaaacaaattctatacataaataaggttatcaagtgcttagggttccttcttgtatagctaactgaagccagacgcgcagcgaaaaaagcacaaaagttactagaacctgtctcaaatcgtaagaagaatagacagctggaggatgatggcttggtgattacaaaagctctgtatgggaatcgcaaaaaagttaaagagagcagcgaatcaaatgagttgaatgatgatgtggcttcgcaagtattagacgtgaccatcccactgaacttcctcgtctctgaggcaggccagctaaaggtatgtgccaatcacatataagtttatctgttaatacaaagctgatggtaaacaaatgctataatatgtagtttattttttgcatcctatctatccttccttttctggctagtaattccactggaaaatcaacaatataatatggtacctgcgggctttaacttgcaaatagacagggattacctgttatatattcccaatactaggctatgtttaactctattttacctttgtagattgtttgttcattgtagtagctcaatacattcctccaaagttaattaggtttatacgtttgatcgaaatatggttgcctgacaacaaatttccaccacttgcagcttcatgaggggatcaagaagtctggaataatgggcttctacgatccttgccctggtgatccaaagctgttacttgtagaatacacatttcatggtcagaaatacaaggtagagaataatctgacatccctttgacataccatgtcgcaacgctaggtatgcggatttgtgcattcctacataaagtccttgactctctttctgttggcaggtcatggtagatgattacgctgcactgttgataccacaagatattcatcaaatttgatctgccgctgatcccgaacaattttgagccccatagctctcttctcatagtttttcttcttctgatgaggcttttctgtttttcgctgtttttccctcacatggtccattttgttgtatacatgcgtggatttgttccacctagattgtagatacgcggggtgagatcccgacagtcaataagtttcagtcaatcaaaagttcgcgacattagttcaatcttcactggacgaaacatgcactgaactgataatttctttatctacgaagatgcagctgtcgcctttccacttagatcacagccaaccctctaacacatgcatctgtttttccttgtctgcgagcgtgcgacaatgtgatactctgtttttgtcatattccagttttgatccgtcagctggtgttcaggttctttagccaccgccagcagtgattttcaagaattccctttcttcaccattctcacctgttactaatataaactcatcataatgtcggtgttttccttgttttcctatgttgtgttctactttgaaattgcactcctgtgttcaaatgcaatcacttcaatacagggtaaagcgttttcttgtgaatcatttattcatttggcccttcatttgtcaggtaataataataatttttagagtaaattgcactcattatacataaacttatgatgtgggtacaaataggtacaacaacttgtaaattactcgttttagtacaataacttgactaggttatgcgaacatgggtcaaaataatccacacagataacctttgcgcgctagtaattgttttgttttgaaaaataaaatccgtactctagtagtgcaaacagcctacaagagattgtaatatagtaattactgttgttgattgatatgttcaaaattaagctagtgtgcttgcgtctgcacaactacaaacaactgatagcgtgcatatgtctcacactggttatctggtactacacattagatcaattttgcatgtgtgtgttgttttgtactaggttcgcacaaactagacaagttattgtaccaaaacgagcaatttacaagttgttatacctatttgcacctaccaagcaaattcatgtaccgcgagcgcaatttactctaatttttatcatgtcgatcaccaaccacatgcttcatccgagattagaatagatgcagactggggagaaccaacaaaatgttcagcgtgtgcactcctcgatcaccaaccccactgctctctgaattgacacatgacaccacagtaccacacatgcaaatgcaagcgccttctgttgcgttgcagctgcctcagctgcctctgcctccgggcaccgaagcaattaacctgcaaacaaaaacatggtttaggtgaggccaacacatccatcttgctggatctgtctctgctcctgcttggttttcttttcacagggagtccatcaggattcaggaacacaacatcctctcctgttgcgagaccggtgaacacatcctgcattcctgctgttgcgtgctcgtgcaacagattagatgctgtcggcgacagccgaagttccatgggcttactttgatttgctagttgctactctactgaactccaatgaagtaaagttttttttttatgaggcagtaaattaaacactcaatcaaaaatactactccccccgtttcacaatgtaaatcattctatcattttctatattcatattgatgttaatgaatctagtcatatatatatctatctagatttattaacatcaatatgaatgtgaaaaatactataatgacttacattgtgaaatggaggaagtacagagccaaaattctaggacacacatctattgtttcgacttaggccgtatttagtttcaaagtttttcatcaaactttcaacttttccatcacatcaaaactttcctacacacacaaacttccaactttttcatcacatcgttctaatttcaaccaaacttctaattttggcgtgaactaaacaaagccttacctaatgcaattttagcatcaaatcaaacctgtccattttatagtgcttgagttgaagctaccatctttttttttcccgattcatgaaaaacagaggcatacatcacttcgcatgcacaacaggttcacacttttaaagtaaagatttttttgataagatagtaaactgaacacatcattaaaattattagtaccacagtgccaaaattctggtacagccatatgtttcaccttaccaaatgcaattttagcattaaaccaaacatatccattttatctcatctttatcaaaattttatagtgcttgagttgaacctaccaaaaaaatttattcatgaaaaacagagtcatacataccactacatacgtaaaacagatataatacgtctcttaacatacttccagagcgaacattaaaattttgaatagtcatacttatatacccacgactccaccaccctactaatgatttcttcaattctagtagggcaacaaacccaatatctaatctcgcgaaatatagattttttttatttctacggaaatatgctgcgtccgcccagctaatacattcctagattgttcagaccagatgaagacttgaggtctaagcaagttacgatatttaagtagactcccgatgcaggctacatcaaaagctactggatttagtacagtcagtagtagcagcgtgagtgacatatctttgttaattgatcatcttaatgtaaagtatcttcaaaaggcatcctttaaaccatagcttttgtttttctatttgccactccctactgtttccggatcattggagatacttgtatgttcttagtggggttcactccaactgattcggtactttgttcctgttcttgttaatagcatactcctgtcatagaacaaaaaatattttttactgtacctccaataccgatcgagtgctcacttgaaataccattaccactgcttgggtaaaaattatacagtttttacatgtcttaaataggctagaaactcaaggctagacttgtatggtaacggggaaaatcgtattttcagttatatgccacaatgtatatagactaagtagttcaatatagattgaatccacgtaagtgggttgttgttgttcgaaataggatactggattaagttaaaacccacaccttaaaataaatcgcattcaactgccaatgttccctcacgagagaggtgaaatataatgcatttttaattcatgtgggtggaccatatagctagagatggctatcacatttccttttctacttccagcttttacattgatataaattgctcgtctagagctataagggttatctttttttttcacattatggatgccctaatatgatctcttgttctcaaaattacttaaccatgactttgtttcttagtgaggctagagatttaatgttagtctctattcctctaaacacacactctatgcgcacgtgtctaccatataatcataaaagtgagagagagaaaaaaaacggaccacctcttttaaatacagctaaaacttttctagccatatacaaatacacccaaaccaaacaggaggccgctccccttcatcgcatgtgtgcagatctagtacgcacaatcaagccggaagcaaagcaaatgaagaggagagagacgcattgccacccaaaccaagggatctcgcagtcgcagcagcatacggaatgtccattgcgccgcaccaaacgcgcattctccagtgcagccagccatggagctatcgatggatggatggatggatggatccagctaagctaacctcccctcctctgctctgcctgtcgtcctctcctccagcagacacgcggccgctcgccttcatttctgctttgacaatggtcaaatgctggggtagcccgttgctgtcacacgcttgcagcgttcagtattccggaatgttgctatctaaaatatgatttagtttgtcttaagacaatagatctaggcaacgattctatccagactagttatctttcgttcagattcattgttttaggatgaaccaaattttatcttagatagtactatctctgtttcaagttataagactttctaacattaaccatatttatataggtattaatgaatctagacacatatatatctagatttattaacatatatatgaatattagtaatgctagaaaatcttataatatgaaacggaggaagtaatattttaggacagggagtagtgacaatcacaacctgtatgaatgtgtgtgattagattaactatggtttttacccatagtttagtggtaatggtcctgcatattaagtatatcacactatgtgctcttaaccttttatgataatactgaagtactagtagtttagtacaaccaaccactccaggtgaagaacatgagtcaaagaaggttgagaagcatccagccatgcacactcatgctaagctcagctcagctgtaaccagtgcagcatgcgtccgtcccactccaagccttccccgagcctctctccccccgatcccgacctcccctgatcgatctcctccctcctctactgtaaacagcacatcaattcagagcaggtctcactcttggaaatttcagttgctactactccacatcactgctcaaattcagaatcccaagttcccaaccaatctactatattctcgtctcaaaatagtttcatttttcacccatccagcacataaaaaaaactaaaatatccctactttatcaaattctaatggctaatgcaattattcctctatttcatttattctctatcgttataaattccgatacaatgactattaaaaaataagcttattttagaacaaatgaaacagataaaaaataaacgtattttagaacggagggagtacttcatcaatcccaaaataagcaaatttaggccaaaatataatattatctagtacaataaatttgaatagaaatctgtacagattcgtagtactaggtaatatcttatctaat

SEQ ID NO: 9543 - DNA, 12307 bp, Oryza sativa
cgcaaccaccaccagcagaagcatctccatcgcagccgcccacttcgccattgctcgagctagctagcgcaagaaccgccgcttggttactagccgaatgtgatcgaatgtgatcgatgtggtgtaagggaaggatgcacgtccccggtatttatagacgagatcgaggtgttgtagaaagcagaccgtttcgtgtactctcttcataccaaaataaattgatgtgtagagtttagactttaccatagtggtagtagtactataactgttcttctttagctgaacggaggaagaatgaatgaagaagaaagagacatggatcctctcagtttcgtgcattttggatactcgtatttttacatatatgggtctctttgactagtaacagtgggtcgatatgtacacgtgcagcaaattggtgtctgccaaattaattgaatcacaacacaagaacaggatagcacccaagaaaatcgtccaagcagatgtacaagactgcacgcaggcatccattggagttcatttggtcatcttatttgttttttcgtggacacaggaaatcaattcaacactttttacacattaatatttgtcaagcttaatttaaatgttgttcggtttgaacgtcatagtcactccacctgtttttaaaatatagttgttatagactatcaccgtgcaaaatgtatcaagcgtatatgtttatagctccattttctctctcggtaccagcgacgtcgtcatatccatgaacggtggttgcttgagcttgaggagcatcgccttctcgagaacgccctctcgatgtgtatcttcttcttaattaggccctgttagttgcttcaaaaacgaggaaaattttctgcgcatgcaaaattaagaagctcgataacacatgattaattaaatattaaattttacatatttaaaaagaattaatttgattttttttaaaaaaacttctatataatttcttttgaaaaaacacatcatttaatatttgaaaaaagtgctaacgaaaaacgagaaagttaaccatttaaccgtttgaagaacgtgctaacggaaaacgacgaggttaaagcttgaagttgaaaagaaaaaaaaaactaagccttagtcatcgtctcgtacctgcactgcacggcacctgctctaccggattgctgaacgtgacagcgccaaggagaaatgatagaagaaaggaagaaacgaaggggggtcggaacgagagacagacgggcagatcagatgcattcggatttttgtcagttcgcgcagggagagtatacgcaagtgatcgagagatttttgtttacgtgggttctataaatcgatgtcaaaattgtagcaatagtagccagagttttgtgcaccttatgtgaactgcagcttcgaactagagctagagctgcccttaattcatccacctcgatcaggactctgttcttatagtttgatgtagtctttaaatgaaggaatttcatggtattgagctaattcatgcaccctctgtatttttaatgtatgacggcattgaccattcgtcttattcaaaatttttgtacaaatataaaaatatttatgtcatgcttaaagaacatttgatgataaatcaagtcacaataaaataaatgtattacataatttttttaataagacgaatgatcaaatgttaataaaaagtcaacgacgtcatacattaaaatacggaaaggagtatttttgtaagatctatgcgtttcaaaggaggctttatactggtacgagtaggactcaacaatattttttcatctattttaactggatttcatgtctacatggtttagtggcgtagatctaattaacccttgacccttgttgttatcgcagggattgaaggtgctattttcatagtcaacagggccaacattacgagggctttagaattttttttaagaaaactgaggagagaatagaaactatataaaaaaattacaaattgcatatctctactgttataattttcggagccgttcacgtgagggacgtgcggcggcgagcagactgcccgagaagccggaaaggctagcgagcagtgaaacttcaccttttacttgttttttcagtttcagctgacacgcgctactctttttattttctctgtttccattttctgcttttacgtgattcttatctttaatatttcttcttcgtgtgattctccccatattttctatttttcgttatagtctttctttaatgaaaactttttatatgaattatttctaaaagacggtataaagactttatatatttaaagtttataggtagatactttatgtgtataaagtttataggtaaaagattttatgtatataaagtctatgtgtaaggaatttaaagtttgtatagataatttgaaagtttatttaggtataaatttcaataaaaatacaaaagttggtctataactagatattttcgttaaagaaaatagagtccaatcctaacaaactattttttttccaacgctggtggtgacttcgtaaatctctccaggaggatttgccggtccagtcttcgaagatgttcataggggtagggttggtgtgcatgtgtttatagggggtgagtgcgtgtgcgttgtgagtgtctgcactgtactgtgtaatttaaaaaaaaacttgataataagaaaatgataaaccatataccaggtcatctaactgaaacaacggaatactagtgcttgataggagcaaattatggttaagcacgtcattacaacagaaaaggagtattttacagttaagcgtatcattatcgtggtttgatcagatgattgatttatatatatagtgaggggtggatctagcgtgagtgctgggggattcgaacccgctagatcaccattgatagaaggaaagaatgaagggagaaaaggaggaagattagtggcagctcaaggaggaagaaatagatgagtcatcctatgttcttaattattctggatccgtccattatagttcatactattcaaatgttttaaatttgttgatgattttgtctatgagaaatttcagttgagagattggtattctgaaatagcatttcaatcaaattgttaatgtgtgactaacagtgcgcgcgccctcccccgcggcgaggcacatggcgcgcatggagagggccgtggtggcagcgcgtgcacagtgtgaggcccgcgtggttttttttttcttttttttctgtttggttttttatttctgttttttttttcctctaggaggcgatgctcctcaagctcaagcaaccggcgtccgtggaaatatgacgaagtcactagtaccgagagagaaaatggagctataaacatatacgcttgatacattttgcacggtgatagtctataacaactatattttaaaaacaggtggagtgactatgacgttcaaaccgaacaacatttaaattaagcttgacaaatattaatgtgtaaaaagtgttgaattgatttcctgtgtccacgaaaaaacaaataagatgaccaaatgaactccaatggatgcctgcgtgcagtcttgtacatctgcttggacgattttcttgggtgctatcctgttcttgtgttgtgattcaattaatttggcagacaccaatttgctgcacgtgtacatatcgacccactgttactagtcaaagagacccatatatgtaaaaatacgagtatccaaaatgcacgaaactgagaggatccatgtctctttcttcttcattcattcttcctccgttcagctaaagaagaacagttatagtactactaccactatggcaaagtctaaactctacacatcaatttattttggtatgaagagagtgcacgaaacggtctgctttctacaacacctcgatcttgtctataaatactcgggacgtgcatccttcccctacaccacatcgatcacattcgatcacattcggctagtaaccaagcggctgttcttgcgctagctagctcgagcaatggcgaagtgggcggctgcaatggagatgcttctgctggtggtggtggcgacggtggcggtggcggtggtggtggcgcaatcgccgccgccgccgcagtgtgaccccgggctgctgtcgccatgcgcggccccgatcttcttcgggacggcgccgtcggcgtcgtgctgctctagcctgaaagcacaacaggggtgcttctgccagtacgcgaaagacccaatgtacgcgtcctacatcaacagcaccaacgcacgcaagatgatcgccgcctgcggcatccccttgcccaactgcggctaggctccatcgccgccgttcgccggtgctggctatgatgtgtggcagcatatataaatatatggtgtcctatgtgctcgtataaaataaaggacgatgtgtggaagcatatatatatatatatatatatatatatatatatatatatatatatatatggtgtactgcatgattgaataaaataaagaatgtgtgtttgaatacataaattaccgatcgattaatgcacccgtgtttggttgatcgatgaggtgtcttctgggatttaagtttgagtttctaatttccgatcttgtgggagcgtgaaatgctgtactttaagagttaataagtattctaagatgatttgtgttttcaagtttgtctatcgatctctcaactcaaatttctcataaacaaaatcgtccaaaaatttgaacacttggatcatatggactatagatagagcaaccatctgatcaaaaccacgatgagctatgcacttctcttcacgtctatatgaacgtgtgtaaactgtagtgcgtgctggaaacgcgtgcgccaaaaatagtagttctgggttgtttgcatggataaaaaaaatgcattcttcctcagtcctcgacgagtgttccgtacttctcgaaaaggaaaaatatactctctttttttatggaaatttatccaactgtcaacctttttcaccaccgtaactttactggtggtcttatgttcacctaaagaacaggtaatgtattcacatcttgagcattcaaaatttattccaagattgagctttccacctaatttctttatctcagtaagttacaactaacatttatttaatttctctgcacacttgttcatctcaaccagtaacaaccatctaatccccgtcccttcctctctctcaccgacggtgaggactggcagcggtggcagacttggtggacggcagcgttgggcgaggatcgatgggggctagtccgatgccccttcccctgtctccttcggacttcaacccttagtgagtccctatgatgcccattatccgtcagccctgctcgctcacatgttcacccccttcattggtccgtctaccaccgtcgcatgcctctctattgttaccaagaccttaaaaatcaaaccgtatcatcacccttttaataatttttagaagttccgccagtcgttaccacccttctgctcgtttgctttatgtcactcctcttcgttgacatcacaatctttaaaagtcaaaggtttgatttttatagtttttaggtgccttgcctatggccaccttcctattgttttgccctgtgcacctctacttccctaccacccaccccttctctttgttgtcatcatcaccttcatcggagttccgctcatctgcacgaacgcaccttctcttccttatcatcatcttcatcagggttctgcttgctagaccgcttccccttcaatttgttttcattggcaacttaaacaatcgaaccttattattgtcgcctcctccctactcatttgccacccctctacctaccactactcttcttagttatcgttggcactttacaaaatcgaattttatcattgtaagggctccattgtcactgccttactcctttgtcaccccttggctcaccctcccatggcaaccgccgtctccctactattttctcgccctttcactcacctgcctgcagcccttcctttgttatcactgacactttacaaaattcaacgtgttccctctaaatcgaacagtaaggtgttgcgttagtgcctcaagcccatgtgtcatgaactcagccatatttttttccacgttaccttggcaagttttagtactattgatgggttaggtatgagactgtagtcggcctactatataatactctcgtacgaaagattatataaaaaaatttattctggataaacataataaattaaattattgatttggaaaaggtacgattgactgtatatagaatatcgcttacatgtctacatacatatcggatgtatctatgagactatggaagattaatttacaaaactaatctactaattacccgatgcgtcctttttggagataatgaagtttcgaggtacacttgtgagtatgcatagcaaaggggaacttaggaggtaataatcatactccattgtatagtatatatccatgtgtatacgttgactggctataatgcacgtgaatgtgttgggttggcttcctgaccactgtttggccttctgaccatgcgtgatgctcgtacgcgcggctggttccgtggtcttattcatgccgtatgctcctgtgtcccgtggatcaatatgacgccgactagctagtagatcagagcggctatcctctctgcagttggcagtacgatgatggaggtctcgtgatcgataatattgaactgatattctccgcagtagcagtgtcttgaagttttttccatcccaatagattgaattgtcagacagcgatggtttcgatctaaagggaaacgttctccaattgggttatatctctcagagccaaagtcgtcggagtacccttgtcggaagatctttaatggcaattaatgtcttgatgaagattgtgacaccattgcttcctggtcttgtgaacgggctttgtgatcgatatgttgttcttggcgggaatacgttggaggaaagatcgatgacgtagcagcaaagaccagaaaagtgatggatccaacttggagaaaagtaaacgtcggttgggtcatatctcctaggccagggcgatcatagaagtcgacatcaaaaaatccgcctcgaactcatctcgtcgaaatcttgaagcaccaaatccctcaagcgaatacggtgacgcgtttcaatgctgtcttataatgatataatatatataataaatagatagataccacgaaattcattcatttaaagacgacgtcgagctctaagaacagagtcccgatcggagtcccgatcgagatagatgaatgttaagggcaactctcgctatagtttgatgctgtagtttatacaagtaggacaaaactttggctcgatagctacaatgtttaatatcaactagcatggtggcccgcgcaaattgcgcggctagcatccttatgttttctctcgtataatagcatatatatttctttttttattaaaatatctttaaataacaacataatttaaatttctatttcctaatttctattatttctaaattgtatttctgtatggactctaaacttctctttcaatatgtctttttttaattccgaatttcagttatttttaaaatgtatttctatatggactctgtattcttcttctgatattccttttttttaactcgaatttttgttatttctaaattatatttctatatatactctaacctttatttttaattttcttattttttttaattccgaattttcattagttctattgtatatcgttatggactctagttttctcttcctatattccttatttttaatttcgaattttagctattttaaaattgcgttcctatatagactcatattttttaatttttctctgattaatatgagaatttgtagttcatgagagtgaacgtggcggcttcgttttctattcctttaataagttaatagatttgtagaacccaccccaagccttccattctggtgatggatccagaaagtagccatgatagacagcaaatcatgtcaaccagttactgatccaatcagatcagacccttgtccttggtgctatcacgttcagtatctctgtggattaggtgcaggacgacattgatgaggttgggtagcgcaggtacgagaagatgactaattattagcatatgaataattaagtattaattattttttaaaaaatagatttaatataattttctaaagcaaatttttatatagaatgtttttttaagaaaaatatcgtttagtaatttgaaaaagtgcacgaaaaaacgagtgggttgagttgggttgggaacttaaacaaaagaacacaagcctaaagatatgcatgtcgaggacctctctaaggaggcgatgttcctccaactcaaaaaactggtgaccgtggatatgacgatgtcgccggcacccagagagaaaatggagccggggatatacgcattcaaagcaggtgtaccaacagccatgtgcaacaaagaaattttcgtcggtcgagttcgactactccctccgtcccaaaataaaccaatatcatattaggttgtgacacatactaatacgataaatttagacatactaagatgtgtcacgtcctattataatgttgatttattttgcaacgaagggagtacttttgaagtttgatttttttttctctgacacgattggcacagtgtgttatgttcggttttttttttttgagtagttttgattttaacttcagactggatgctcttatgattcgaaccaatatcttggccacacttgaacaggccaaacgtgacaatgacacctttacagtcagcttgtgttatttcacgtgaaaacgcttacgatagatattgatttgtacgattatgtccaaacgccttcagtttatttagcatagagtctgttcatttttgtagagcattcacaatgacattgaaggccaaacagattagcagaagattgatgagccatttattagggggggactaactatatttatgacaccacaaattttaaaaaatagtcaaatattgtaaattacatacaattaaaatacattataattatattgtaatttttgaaaattacaatctaattttttaaaaaattacattataattatgttgatattcattgtgtaagagatgggttacaaaatattaattgccgatgttgattatatatcaaaatagcgttgactaacaagcaaattgaaaaacgaaagagtaaggcccactataatttttaataagtctctatcacatcggatgtttggacactaattataaatattaaacatagactattaataaaacccatccataatcttggactaattcacgagacgaatcttttgagcctaattaatccatgattagcctatgtgatgatacagtaaacattctataattatgaattaattaggcttaaaaaatttgtctcgcgaattagctttcatttatgtaattagttttataagtagtttatatttaatactctaaattagtgtctaaatacaggaactaaagttaagtccctgtatccaaacactaccgagggatacaaatgtctctaacggcaagatatacggacgaacgcatgcaagcctcaatcactttgtggctgcagaattttagcaatacttttagcggacggacgcatacaagcccataaatcagtcacgaattgaggcggcatattttagcaatactgttagggcatgtacaatgttgtactcctatttaataaccgttctcttcgtcgacatataaataaatttaacgatatgaaaatccgcatgtccgaaacggcacgacacaattggcagtggtacagtactatgtacctactggagaagtaatagtaataaaatcttggtagaactgaaggaatcgatccaaatccctcgagagatatcctctcgtgtatctttttttctttcaaatccaatataaataattatgaaaaattatttaaaaaatccaatataaataattgtgaaaattatgtaaaaaattgaaagtttagattatagtgatatttgttagtccaccaaaaataagctcaaatttgacctacatgttaaggcaaaaaaaataaatttaggtgcaaacagtacattgttattcatacactgattttatccatttatatctttgacatgtaagttgagtttggatctaatatttcacgaaatgatgtataaatgttatatgagtgttaccaaaacttttagaattttttctaactgattaaatggtttttaaacaaacaagggaacatctcgttcccttcgaaggatcatatatatgtatatatgtatatatatatatatatatgtatatatatatatgtaaatttgtttggtgctccatggtgcccgggcaccacgattgaaatttactatatacccaattcaaatgagtatgaaactttttcaaatatttaggtattaacgttaactactttactaactagttcaaagcaagtttgaactgaattcaaacttgcttttgttagattttgattctaggtacatagcatccaaatatataattagttaggtatgtaataatggattgtgaaataaagttaaatttgagttgttttgttgctaggtataggtatgaatcgaatacttataactaggtatatactcacaatttgaaaattttgaaaaatttggacgaatttgtgtatttcataccatggtgcccgggcaccatggtgccccatatgagtgtcctatatatatatatatatatatatatatatatatatatatatatatgtatatacatatgtatatatatgtatatatatatgtatatatatatatatagtgtgtcccgtagaatcaatatagatatgccaccacctcaatttatcaatagcatttttttatagcagaatttataaatcaatgtttaaaatcacctgctgataatactaccaattaagaccatcataaagttactcaccattgcattgtttttatgatagcagagcaatataaattaaacatcaccttgattaattcacagtactccgtttttataaattttgttttgataaagtgatcaaaatatgcctacataggatgtttccccatggaaaagtaacacaattgactcaattcaatcaaacttttgaaatttaaccatcaacggctcctaaatgtttttagtctagaaacataaaaacgatgtgtgtagattttttttataggtactttcataatattatagttttgcttcatctaagaattacattctaataaaaatagtggtcaaaagttacacacccaaaccaaataaatcaatagtgtcatatattcaaatatggacgcagtaatattttaaaaagaataaatttttgaaaaccccatattttatagccagagttgcaaaaagaaaaactaagtattataattggtatttacataacttcagatattatggatctaaagtttaacaagactccacgcctatacttgttgagtataaatttacttaaatttttaaaatagaatgtgtatgaacttttatgttattgagctcttgacagagattggtagttttactctttgttacattgaaaaatattgtttcaaatatactaaaattaacttagatttgaatatatgcaaaatttataaaatatttaaataattaaatatgtgattatgtgccatgagtcataatatataactaatataaatattcgtatttttcctttcgtcacatctattttcgtcccgttcatccacgtacgcaatccgattcggttagcaatagccatggaaaaaaattgaaaaaaaaaaatcggcggccgccgacgccaccaccgccgctggaggaagaagagaggcagaggagggagcaccgccgccggatccgcccgcggtggccgccaccgccgacggatccaccctcagacgacgccgacgctgtcgttgccgtcgacgccgccgttgagagggcgccgtcaccgtcgaggccgacggggagagggagagggagggagggggagggacggccgtctctgccgcaccccgccgtcgttgcgccgtgtcggcgagacgggaaggagagccactgccgccaccgccgctagcgtggggaaggtcgccaccgccgccacagctagcgtgggggaagtgcgccgtctctgccacaccccgccgtcgccgcgccgtgccagcgagaagggagggagaagggcagggaagcggcgccggtggtgggagaggcggccagctggggggaggggagaggcgggagatggggagagggagcggc

SEQ ID NO: 9544 - DNA, 10365 bp, Oryza sativa
taggtgtctgttactaaaagatgcttctaatctcgtgattgttttgattttgttactagtctacctgtaaatttgtgtaggagtatttaatttgaagagaggatgacagttatagtctatgttaagcttttttttttcttttcgacaaacagtactaatcgacgaaatcaccacaggcgtctcgttatcgaggggtacgtcgtctaccactgaaagaataattagccgtaaatgcgagcactcatatcaaatctaggatttgaacccaggtgagctagttacagtttaagaaccaaactagttagcctacgctcacttcgcagtcttttgttaagccttggtgcatgaaaaaataaatgaagtgtaaaagatttgcacaacttttgcaccaagacaaggctgtgttctatcgttgaagatagaggtttagttttcgtggcacgtgaaacgagataggtcgtttagcttacggttaatcgagtattattaattattataaacatttatttgatttttgtaagaaatatttctatgtatattatctattattttattaaaggaatagaaaaaggagcctccacgttcgctctcatggtctaaaaattcccacattaatcggagaaaaagaaaaggcagagtccatataggaatacaatttagaaatagctgaaattcggaattaaaaaagaaggaatattagaagacgagactagagtccatatagaaatacaatttagaaatagatgaaattcggaattaaaaaataaggaatattagaagaggagactagagtccatatagaaatacaattaagaaatagatgaaattcggaattaaaaataaggaatattagaagtagagtatagagtccatatagaaatacaattaagaaaaaaaatagaaattcggaattaaaaaataaagaatattagaagtagagtatagagtccatatagaaataaaattaagaaaaaaaatagaaattcggaatttaaaaataaagaatattagaagtagagtttagagtctatataggaatttaaaactaactaaaatttgaaataaacataataaaattaaaagtagagtttagagtccgtataaatatacaatttataaataaataaaatttgaaaataagaaaaacatgggaagaaagtttaaagtcaatataggaatacaatttagaagtaactgaaattcgaaattaaaaattaaagaatattgaaagatgagtttagagtccacatatagaaatacaattagaaataataaaaattcagaaataaacataaataatattggaagaagagcatagagtctataaagaaatacaatttacagaaaattcggaattaaaaaaagaaatattaaaagacgagtctagagtccatataggaatatatgatattaaaaataattaataactaaatacatatataaaatgcaatatgaatatgacacattagtagtgttgtaaagttatttcaaaatttaaaattatgtttaaatataaaattttaatatatttgaataatataatgagaaaacatatatgctattatatgagagaaaatataatgatgttagctgcgcaatctgcgcgggctaccatgctagtttttgtaaatgacacaaatttgaagctgaatgttaaaacgggtcctaatgcacgaaacacatcaaaattccccgtttgatgtggaaattctcgtcaacattggatgtgtaaaaactgtttcttaatttctagacatgattcaccactgtttttttgagggtttattcggtttggaggaatttaaatccataggaataagaaaagtgaaggaataggaatgtttgcacacattaatccatatgaatttttcctatgagatttgagcgaatggaaaaattattatgtttcctctatacaacttgtaggaaaagaaattttcctttggttttcatgtacttcaatcctataaccagaatgacactcatagcaattagtccttaggactccaaatcctttgtttttcctccaaaacgaacatgcacttagaaacataggacaaatgcgagcaagctcatctctataacgcacacacagacaccttatgtctatgagtataaacaaaaggctaggttggcatatcttgaaattgatgaaagtcaccatagacatctcgttatcgataagtacgtcgtctatcattgaaagtcagcctcgttatcactatcattgaaagaatacaacatgtattggtattgacgaagtcaatcgatgggtacgttatctatcactaaaaacaattagccgtaaatttgagcccatgtcaagtcttaacttgaactcgagtaagcacacgttcctttacaaataatttaaccagttgaattatactcaattcgcgagctttgtgatttgattttgagcaattctacggtccttgaggaggtaccatgaggtaccaaaaatttaatgtaaaatttggtacctcatagtacctaggtactaagaggtaccaaatttacaatagaaaaaattgtacctcatggtacctccttaaagaccgtaaaattgttttttgattttccttctatttaatgtacaatgtttccctttggaaggagggttatgatttctatattatgttctcggtacaaaaggagtcctagagaaccttcagcgagtctcaactctcaaaagagagatcaatggagtaatccagcagctgttcgtggctaagctttgggatgttttaagtttgcaagtttaactttcaataccctttttgagactaaatgtttaactggccaactatttgtttcaaaacattttcaaaatgcatagacaactttttttttcttgacaagtttagtggtagttcctactcattttcatgagagagacagatccaaaaccgtagttaattctcacatttaactctataaaccatgcgatttgtggcacgtgtgtttgccgcgttggagtgagctgtagaagcagcagcagtgcctgtgaccagggcccactacgcagctcccccaaaaggtagctagctagccttgccaaagctaagctggccccacatgtcatcctctaccagaccacagttttgtcaacaccttaccaccggcaagcttgccattattaatcaatttccgtttgattttgcttgattgcttggttagaaggggatggctttgtttccttgtgtgctgtcccgtgtaaattcaactgtcacgggcaatgggagagttcttggccttttaggttgttagccgatgagagcgacatattatggttgttgagactagaaaatgtgaccactctagtctgaagtgacaatcacactagctttgttttcatctcgagtgtctacttgtattcagatgtgaagttgctgaaatgctattcataatttcaccaaaaaaaacttgaccacggtttgtttcattacatttccattgaagaagttttccttacggacggttttgcccggtaagtgggcggtcactgaggaaaaacgaattttactatttttttttaacatggtcgatatattgggcctttccattatcgcactgacagtaagcctggttaccgtggtaactgataaacaccggtcctaacatgtaaaagaaatttcttttaatagagcataaagatttttatttcaagggaataaaagttagttatttaggtaagtagcaggtcatctctgaaacgtctattgtcattttgtctcatgcctatacattatctccaatcctggtcactgcacaccgaaaaaaaaaacattgtagcatggcttaacaaggagaaaaagacatctatctgattctattctcttccttttccatcaagggggatgctagagattttgatgtgtggaagatgacagtagaatagggtgttgcatctttctcaagcagcagtgaagattctcttggcatggcctgcacaaatggggagtagaatagagtgataatccacatctgtctctccctttccagatccctgcagcccagttgctccaatgtactgctgtcccatttgcagaagttgagagagcaccaaagggcattatgcaagggggtagtggttggcatcacactacttcacacctgtgaaatcaatcattgttagttagtaatatatataatagtacatcagatattcagatgtgcactgataatattttactccctctgtctcacacagacttcatttctagcgtttaaaacttgtctcacaaaaaacttcatttctagatgttacaaccaatcaggctaagacatacacatttaaatacagtcaagaatattaatgagatgtatcatagtagtaatttctccatactaatttgtctgagaattgctagaaatgaagtttatatgtgatagagggagttgtacttttttttttggtgtgtgtctgggtgtaactgtgtgcatcagtgcatgagactttcaagtacttggtggattactttatcagattgtttagtttagtaatcttagtgacagccataattaaagatgcagagacaagctattgtaatgggagactggatagaacctaaccctttgacttgggacatcttctttaaaggcaggcctgcagaaacagcagagtgtgttttcttgtaaaaaaatcggtgcgcatgaagaaagaaaatggaaacggagaatttgccgttagctcaacagagtgtctagattcagaggccggcagatgacccagagttgaattgacgcattagattaatgaacaatcacatctttcttatcctatgattagtttaagttaacttggagattgatccagagttgaattgacgtatgaatatggagattttacgaaatgaaaatgtatcaataggcatcagaagttctcaaaattatgcccttcttttaacgaagcatatgccagttttcaaagttctgaaaaactggcatatgatacataacagtttggaagatggaaaatgacgctgtgttctgcagaacttcctctgaatttcatgaattccaaaggtaagaatcctgcagtttctgcaattttcagttagatctctggccaatgggcctggttgatcggcctgattgtgagtttgttatgctacttgatctcatgcttgctccctctactagttcagtccatgaggtgccaggcctaaattgggcacttccttactgctacatgttaggagtatttgggctttttctttctttctttttttgaaaccgagacagcaaatacggctgaagggaagtgtatttgggttttatcatccccaaagtataatgggctgatgaactactgaacgtatcagaaattcagtagactgcatggactcgattgagcgattcagaagtctgaattccaaaaagttcatcagtccatgcgactacttatatatggagagagtatatccagcaaaaagcccaaaatgtcgtcaaaggacaatggaattgcgaattctgctagctcacctttaataagtctttaactgaactgaatgattgctgcctgttcacatgagctgctgctgaactgcagcacagctagttaattggctgatgaggtaataaggtttcagctctcaggtcgtcagccttccatctcatccaagattcagcaaactttgctactctgaatgcatttacacatatcatctacagcaaactttgctaatgtaacgattgtgccatgaaaaccgagtgaactgacagttgatctgaatgttcagacgagcataaaaaaaattttgccatgagattgttatttagattccaaaaaaatttggccaaaaaggtcacatcaaatgtttggacacatgcatagaacattaaatgtagacgaaaaaaatcaattgcacagtttgcatgtaaaattgcgagatgaatcttttgagcctaattatatcatgatttaacaatatgatgctacagtaaacatttgctaatgacggattaattaggcttaataaattcatctcgcagtttatagacggaatctgtaatttgttttgttattagtctacgtttaatactttaaatatatgttcgtatactttaaaatttttacacgtaaacaataaaacacggcctacgttctgcgtttcgttcttgcagagcttgtcgttgttctcactacggctaataacccgtgcaacaatgaagaagcgaccaaaaataatttacgagtaaaacttctatatctatattatcagcgatttaaaagcaaattctgaaaaataaattacaataaagaaccccttaaaatcaactctaaaaataagttttgaaattcaaattttggtaaaccaacaagaaaatgaaattcctacaaaattcccgcactccaaacgctcttccatcatccgtaacctcaagggtgtgtttggataatggaaaatggaggttgggattgggattgggaaatgaatgaagggttaggattaaatgaaagaggaagaatgaatggttaggatttaaagatgtcttttgatgggtggaaaatgatttccccatcccattagccaaacgctgcccaaagttatcaaccagagaatggaaaaaacccaaaacatctcacgtagtaatgcaccatagtccatactgcatagtatgctgcagaatttcatatgagggcgttcactgaaggcagccagcctgtgccacggttgctctgtcggctagccgtcagccctggtccagcatcctcctcctcctgctgctgcctcctgcacgcttgctggggctatctatctaccgtcaaaatcatgccctgctccagtcaaattgctgcgtcggcagcatgccagcatccatgtgatgctgtgcacaaggatggataaaaaggtgccaccatggcgcactcaagagtacagagaaaagcgacgcggtaaatatgaaaagatgaacaacactgaatctgcttgcaggttacaatttcaggtcttggatcgaattggacccccacagatttcttcagggcctgcatgtgctgcaattatatctctgtgccagggacaaatgagtgcagatgtagtgataaatgtgtgtggtttgcaaaagtgttaatgggtgattatgatgttgcgaggtcttgcctttgtttggagtgtttaactgaacctgcaggttcgttcttgtttgactgcctgtcgttctccactgaacaaagctgatgctgtcttttttttttaacagtttttcagacgatcaaacagagttacactaccaaaaagaattggagtaaccagagttgatcctggtgaacaaatgcaaatgcacgaacgaatcgaatcaagaagcaatctctacccaccctaaaagaacccaaaatgaggtaaaaagaaaaatgaaaagaaagcgacaatggcaggcacaatcaagcggcacactgacaaattcatatcaacagagaaaacaggttacgatcctgaaccctgatcctaaacaatcccacacgacggagtcacctccttgcagaagaaaaacgtcgccactctacggcgagatcatgactgctccggcgaggagcagcattgctgctgccgccacccggctcccaaagacggcggccgccgccgccgacgtccccatcttgtggtgaggggtctgctgcctgaaacaaaccaaccaacacatgagaaatttgatactacctcatattatatgtcattttaattttttttctttaatcaaactattttatatttggtaaaatttacagaaaaatttaacaacatctacaacatcaaattagcttcattagatgtaacattaaatatattttgataatgcatgtgttttgtgttataaatgctgttatattttttataaacttaataaaacttgaagaaaatgattaactagttataatataaaacggatggagcagtatatacacaagaaagagccgggaaacaaaaaaaagagataagaaatctcgtgcattggattatactgacaaaagtttgatcttttttctttgaaaagaaggaaatttgggtttgggaaaattccatacttctggtacttgtgaagctggccgcagaagagggcgttgtcggggatggccatctcggtcttgttgccggtgtcctcagggttgacgaccctgacgtagacctcctggcccaggtaccatgagtccaggttctccgacctcacgttccagacgcccacgttgtccagggacaccagcaccgccgcccacgctcccgggtacacctgccaaatcatatgccacacccgcaatcgcaatgcaccacatgaagatacagtccagtccaatccaatcaaatctaaactccattgtggttaatctccagtactatgaacactgaccagtgtgcagagatagtgcgattgctatttgcaatcagatggtgatcaacttgataagttattagaaaacgtgattatttttacactctgttttcagctatttcattggattgttacagtgaattatttacttcacatatctaagaaaaatacgatttcgaaaaaaaattgcctattgtattgcttaaactacttgttgtaatagtatttattaagttcattcataaaatatatttaatttttctctacaatcaagtagataatcggctcttcaggtcaatgaaccgtaggataaaccatgttctatgcttttagaatggaatgaagtcctagttttcaaaaacaaaattagtagataattcgctataataacctgttgaataatctattctagtgtcaattttaaggtattattgacaacttttacgatgatctctaccaattttgctcacctgcacagtgctgcgggcgacgccgtcacccttgttgtaagtacccctactatcctccgtccattcgccgtagtccatcctgcatcgaaattcaagctcacccaccttaacaaagatctccaagaacagccatggcggatgtacatagctttcaagctaatttgtgccattgctagctactacttccttcgtccagaaaaataaacatagaattggacgcgatatatcctaatataacgaatctggtcaagagtcagtctaaattcatttcatatgtcacattatttaattctaggttcgttttttatttcatatgtcacattatttaattctaggtttgttttttatgggacgaaaggggtatgtatttacccgacgacgaagaaggcatagccgtccatgtggtagctctgcatcctggtgtcgttgttctggaagatgagctccatgaagccgcggtaggtgccgttgatgatggagcggcccatccggggggcgccgcgcagcggccgctccgggaagtcgagcgagtagacgcccctgacgccgtacgcgtcggcgagccgcagcggcgtctctggcggtgtgaaggacagcccgttcagcgtcgcgcggcgccgcccgttgatcgtcaccggcgccgtgctccgcagcaggtacgcctgcgtcacgttgatcgacgagtacctgaacgatccctgtgggttcggcctcgccgctccggcactcaggttccacctgcccaatgcaaaaaaccaaaacccaaaagcttaatgcgaataatacatcattccacgtatttaaaaaaataatttataggtaaaatttttataatgtattttagcgacgtaaatgtcaatgctgagaaataaacgataatactttaaatgaagttctaaaatttaaattttggcatcggttgatgttggataaagaaaacgatggaggctagtaatttttcttcttttttaagtatctagattgtcatatattgaatttttcagtttttcatccctttgaggacaatccaactattattttccttttcttatgtaaaaggttgaacaacatattcaaacataaaaaaataaaattaaatgaaataaatttacaattcataaaatttacagaatttatgttaagaaaatattcaaacttagataataataaagcaacaaaatcgtactaaaaagaagtataattgtacattgtatactactactcctacaattttagacttagaatttttaatttcctgaaatctagtaatgccatttttttctttctagttgaaccagacagtaagtttaactcgaaacttataagctaatgagcgaagtcgggcaattcactcgtacctgacggagcgagcttggttcatggagaaggacttgtcgaactggtcctggggagggtcggggaaccgacccttttcggtctctaccggctctatacatttccaccggatgctatttgtctcgggttcattctcatttggggtcttttccctcttcgaggctaatccgcttgcgatgctatctgatatagatgctcaattacg

SEQ ID NO: 9545 - DNA, 10154 bp, Oryza sativa
  unsure (1)..(10154): unsure at all n locations
ggttaggtgagcgccactgtgctcacctaacccatacgcggagcaaaaaacccacgaggggtcggggtgcctcggccctcggggccgaggggggtgcggcccgaccccctcggggggactaagaggagggcgaacgcatcaccctcgggcccgacgtccctcggggccacgtgtgcgattgtgtctgcctcaaacctctagtcatgatactcctgatcccatgtcaccgacagaccccatgtccgatagtcgatttatttgtgttgcaataacatctatttctttgttgattttattgggggtggattagagttctccctatgctgattttatttggatggatttgagtccgatttgactaattgaagttccccctcttccagtggcgtgttcgagttggcagtttggaatttggagatgaccaagatacgagctcgatcaggaggtgattcggtggaatacatgcaacgaaccaagatggacgataggatatgcgcgctacagcaatgaattaggcaaacgtcggacaaaaacgtattgtgacgatcgtagaattatgaatttttaaaaaattttaagtaggttagattagagtagatttacatcttttaaagagcctttatcctggtaagagtaggactcgcatttaatgcagctacattttttcatccattttagctggattccatgtcgacacggtctatgcccaacttatgactgattctgggcctaaaacaggtgtataataccgccccgtaattttttccatttgggctgaaaatgtgcgtttggatgggctgtgatcggattacaatccgtcggaaaaggcccattactaccagggaaaaaaactgcccaggagtctcgccttgccctctcgccgtccgtgccgccgccgccgccgcctgcatctccccttcctaatctgtgacgacggccggagacaccgtacgttctggctggctgcagaggagagatcagaggagagggatatggtccaaggcgacaacagcaacaacatcaattgccactggggacatatcctctcgtctctcgaccaatgcaaggcatggaagcagttatggccagttgaatttggattggagtttttgttgatgatttttacatctgcggtgtttgattctagtttgcttcgttgccaatgttcattgctctactatttcatgaattgattttggatcctagcttagcactcttcaatatttccatatgctaggtaacatcatcacccaacaaacggtttgtctaccaagggaaatttatttcactggtaattatgggtaacacaaaattacactcgtatttcaatcacagacagttgatttgtattttgtattctactccctccatttcataatgtaagtcattctagcatttctcacattcatatttgtctagattcattaacatcaatatgaatgtgagaaatactagaatgacttacattatgaaacggaggaagtatctatgttgtttgtaacctgtattgcaagcttaaatgctcagactatgtctctttggggctacgtacatcctacgggatgtagaggctgtatatgacatgtgagtcctcatgtgtccataacatgtagatccagtggtaaataatttagcaccactcgtaatagtagcatatagttaattattccggggtttaatccattattaaaaaaattaaataggaatattaaatatgaaactcttattcttttttatctatggaaggggcaaaaatattcagaacccctttcttaacttaaggtttccaatcttcactttctcgtttttcgcacgcacgctttccaaaatactaaatagtgtgcttttaagaaatatggccctgtttaggtcccaccctaaaatttttcaccatgtcatatcgaacgtttgaacacctacatgaagtattaaatataggctaaaaaataactaattgcacagattgcgactaatttgcgagacgaatcttttaagcctacttgctccatgatttgataatatggtgctacagtaaatatttgataataacggattaattgggcttaataaattcgtctcatggtttactgacggattctgtaattatttttttattagtgctcgaacaccccatgcggcaccatatataatacccgatgtgacacgttaaaactttacacccctgaatctaaacaccccctatatatatagaaaagtagacgtgaaatatcatattaatttatttttcaaagtttttaaataacacataattaattatgtgtgaatttgttgctccgtttgttgaggggagggttaccctccaaaagaacacaaccgaagtatctgttgttatcgattgaaggtgctgttttcataaccaacatgtccaacaatgcgaaatttttggacgattttgttgagttgagatatcgcaaacttgacaccataaatcatctcagaatagtgaactctgaagtagtagcatttcacgctcccacaagatcggaaatcggaactatgagtttcccagcatctagcttttagtttattttttgaattctacaactttagaatcttgataaagaaactagagtttgggagagtttataattctatgaaaaggtgcagcagctagaagctctccaaataggccctataatgtttactacctctattttagattataagactttctagcattatccacatttatatagatgttaatgaatctaagcacacatatatatctagatttattaacatatatatgaatgtggacaatgctaaaaagtcttataatataaaacggaggaagtaacttacacttctgctctgttaccacggtacgaaccgtaaaaacacttttatggtaactttacgacgatgctctcagtattatcaacattatcattcattaaagatgattttaacagttgatttatatgagttattatactatatcactagaaaactagtattctgttgtgagtagttataaggtggtaggctggtgaccgttataaaatacccctttcgtttcactatatagcgacctaggatcagattaggacgaatcagtatctgtaccctgcagtaccgtcctattttggatatgtttagttcacgccaaaattagaagtttggttgaagttgaaagtttgtgtataggaaagttctgatatgatgaaaaaattggaagtttgaaaaaaaaatttaaaactaaactcagcctttagtagaatttgatagtggcagctaccacttccacttgtgcgtgccgtttcggacattttgcactgcagctttcaataccaagcccgaacgttgaacggaaacagcggatgtagtactagcaaataaattcgggcagatgagcaccaataaatgggtcatcactcatcaatcttgtggtaatctgtttggccttcattgcactctcaatgctctacagaaaagaactgaaggcgtttggacataacaatacacatcatcaacatctcgcgtacatcctccgtcccaattaaaactaactttatagctacaaatttatagctaaaagttaacttattttaaatagaggagtaagtgttttcacttgaaaaaactcaagcttgtcaagttatcattcttatgtttggcctgttgctttgtggtcaaaatattgggtcgaatcatctattactactagcattaatgtggctccttaaatggtcccttagagagcgattgttgcaggcgagagaatttatatctgtccgtaacttaccgagagtctcctccaaaaaatcaaatctatagtactatctttgttttaaattataagtcgttttaattttgatcaaaataaactgcttcaaatttgtaaaaaaattgtaacattttcaatccaagacaaatatattatgaaaatatgttaaaataaaactaatttgttgctgtaaaaattaatatatttatctataaaattagtcaaatatttggagtaatttgactttcatcaaagtcaaaacgactataatctgaaactgagggagtaatgaaatagtgattgatctatctcaggacttcgctcttagggcatgaggtcgtttttagaatgaagtaatttcacaggaattgaaatccatgtaaaatttctgagttttgaagtaggatttttctctctccattttagctggattccagtcaacagccgtttaggggtatttgttgttatagtagtgattgaagtttggaagcatgtaagaattcttctcagttataattcttttatgacatggaaaaataccctaaaaacagccgtttggaaaaaaaatcttacatatttttaagttttcacacaatcattaatctctctcatgatatgagtttttcttctttttcctattcgttagctggacacccacctataataaagttataatcgatcgttaattattaatccaaacccacatcgttttattcaagtgcacacagtatctatgccaacaccgctcggcgagggctctttaagtcccggtttacaatcttttttaatttagttctggtttgcaaactggaacgtccaattagggactaaagatgtggttaaaataaatatggtaacgctagccagtccactagagtttttttttctttttttttcattgtttttttcattcattagttcactaaagtcatatattgatttcaagcaccaacgtcgtcatccctaaatccccacaaatcatgcacaacgaatcattcacaattcataggcccatccacaaaatcatccacaatccacaaaccatttataaaatcatccacaaaatcgtcaccaaatctaaaaaaatctacaacaatatttacgaatcattcacaaaatctaaaaaataaatccacagccacagtcgccgccggctgcccaaccgtgcgccgcctcccagcctcctctctcgtcggatctggcgaaggggaggccaccaccagccgccgcggccgcttccgccaggctgtcgcttgccctccccttccgtaggatctggcggaggggaggccgccgcccggcgtcgccgtcgtcggaggaggggggagggggagggggagggggaggagaggggaaggagagggtgagaaaatgagaggggaggaggagataaggacgaggcgcacggttcaaggcagcaattcacgatttttttttaattttggtgggactaaagataaaaagaacctatggacttttgaaccgttcctacttgaacagggactaatatgatttttgcatgtcccagtaaagatcacttctccactagtgcacgtatcatggccgcaccaacgggaggcggcgatcaagcctagaacagataatgaattaaaccggcctctacctccaaaacgaatgtacacacagctatcatactccaattaacacaagatgaaattcagagttcaaacttcaaataccaaaaaaaaaaggcacatcatcgatcgatcaaacatcgcgtactggataattattaattcaaactcacgcccttttcttcaagcgcacgtacacaccacgcgtatatatgccacgtacgcatcatggccggcggcggcgggagatcgagcctagcagctgggaatggggatgccgcaggcggcgatggtcttgcgtgcgttggtgttgttgacgtaggacgcgtacgtcgggtctttcgcgtactggcagaggcacccctccttctgctgtgcgcgtaggttggagcagcacgactctgatggcgccgtcccgtagaagatcgggctcacgcacgccgatagctgctcagggtcacactgcgccgccaccaccgctaccgccgtcgctgctgccgtcagcagaagcatctccatcacagctgcccacttcaccattgctcgagctagctctagcgtaagaactgcttggttactagccgaatgtgatcgaatgttatcgatgtggtggtgtaggaaaaggatgcacatcagggtatttatagacgagatgtcagaaagcaggccatgcatttcgtgtatactcctttcgtaccaaaaaacaaattcaggctttgtcgtagtagtagtagtactagtgccagagctgttcttcttctctagcaaaacggaggaagaatggatgaagaagaaagagacatggatctatcctcagtttcgtgcattttggatactcgtatacatatgcatttgggtttctttgactagtaacaatggatcgatatatatgtacgcgtgcagaaaattggtgtctgccaaattaattggatcacaacaagaacaggatcgcaccaaggaaatcatccaagcagacagtataagtttgcaggcaggcatccatggggcatcttatttgttttttgtggacactcgaaaccaattcaaaactttttacatcaacatgcatgtatcaagcttaatttgttgtttgtgtttggacgccagtaagagaaaccatctttagtcggtcaatccaaatccacaatagttacaattccattaaaaaccgggactaaaaagcagtttataaatataaagggactgtgtgatctttagtcccggttagtaacaccaaccgggagtaaaattaagatgatctttagtcccggttcacctcgtgtcagaggctgtcaggtcccagatatttttagtcccggttggtaacattaaccgggactaaaatcctaactttagtcctagtagttgttcccaatcaggaccaaaaatcaatataccgtgtataatctcttgctctcttatcctcaaaattttctatctcctattcatcctctctctcactcttgtcctctatccttctctttctattcctcatcctctcacagttgctaccgacgaggagcgagcggtggccagcgaggctggcggcggggtatggttggcggcggccggatgggggcggcggcccgcggcgggaagcaggaggaggcggcggcgcgacaggagctcgctgcggccggatttnnctttttttttttttncccctttttttttnttnttntttnttncttaaaaaaaaggggaattatgatttattggatctgtgttatttgatctatgatgtatttgtgatgtaatttttttttagaatttgtgatgtttcttttcgacaagttgtgatgtgaatattatgatttgtgttattgttactttgatctgagatgtagggagcatctctatttggaattgtgatgattttggtgagattggtgtgaaatcaatatggaaaaaaaaagagaagaatgggaccagagacgtggcgctaccctcaccaaccgggactaaaagattcccctctttactcccggttggtgttactaatcaggattaaagatcgatatttagtcatgggtatttgaaccagaactaaacatagcgatttttaatcccgaattcatagaaaaaccgaactacagagggttctaaaccgagagtaaagagcatttcttcaccattgtttttttaactggttatcgggggaagagctttcccacctgaatttcattaaagggagaacaatacatatgattagtttgttacattggggtgcagcaaggaggaaagaatttctttccagattctactgcaatcctgtcggcgcattttaacctttccgtcctgaggtttgcatcttctagacattttgaaattagccgggcggtggaggccggaggggttctgctttctgaagacgacgtctgccgatgattcaacagcccccagaagcggaggtactagaagatttcgaagtgtttggtcggaatccggcttggtctgggcagattgtgaagctcctgcatagaggtgatgttcaggttgatttgcaaggaattccagaatgcagctacgaaggggcatctgtttttaaatacgagtagttgttgttgattatcactgtgctacatatatcaactttatattcccgagaatccattttctctctcgctcccagcgacgtcgtcatatccatgtacacaggttgcttgagcttgaggagcatccctcgtacccgcgctgcacgacacctactccctccgttcgaagaaaaaaaaaagacaaactctatattttcgtgtccaacgtttgaccgttcgtcttatttaaaaaaattataaaaaaaattaaaaagacaagtcacacataaagtattaattatgttttatcatctaacaataataaaaatactaattataaaaaaaaattcacataagacggacagttaaacgttggacacggaaatcaggactactcgacagggtcgctgaacgcaaaaagctctgagtgtggccgcgtgtggacatcgcgacatctagtggccacactagatgtctttttaaacacgtcaatggctaacggtaacggagacggctaacggttctacaaatcgatgttaacagtgaattgtggcttcgaactagagctggagctgcccttaacatccaattatctcgattacgactctgttcttggagcttgacgtagtcttaaaatgttggaaaaaaactcaagcttgtaaaggtgtcattcttaattatgtttgtcctgctccttgatggtcaaaatattggttcgactcatttattagcattcctctacctgaggactctgttcttagagcgaaggaattttcccgaaaaaattaaatcgacggaattttacggagaattaaacttaatcatatgaaattcctgtaaaatttatgtgttctggattggcatttaataccagtttagtggtattgttttgctgttatactaggtaaaaccccgcgcgttgctgcggaaaacgcgcgggaattttagtatgtaacaataagtaaaaatagctaaacaatataaacttgcataagcactaaaatcaattgatgtgatatggctgatagagaagataaaaaataacattaactaagtgaggatgaacttacgtaagtaaataagatattataaagaataatgaagatatatattgaaatattatgttaattatgtgggatgataatttaatatacttttattttaaaagctctaaaatataaaaaaattaaattatagataatatagcatgtttgcatgatattaaatgtattgattgttagtggatgatgatgtatcaacttgttagtggatgataatgtggcatatttgcatgttaagttttagaagtcagtaggttataactttattataatataataagataggattagggaccgaaggtatcaccctttctataggaaacactcaccttcagaaggtcctccctcgtgttcttcccccaaaccatatgcaaggttcaagggctgagaagactcaattgagatttgggaaaacaaaaaaaaagtgttggtaggaaaaaatttcttacgtgcatgcttttgagttttcacttaatgtcttttacgttccgaggttttctctcctttttaagaccaccagtaaaattatcgtgggaaaaaggttgacaaccagtaaagtcattaggaaaaaaaaaggtccattttacttgtactttgtgaagaaaattgagtatatcattttcttttcaagtacaagttggacgcacgcacgtatcatctattcatcttggttttgatcatatcagaacgctcgtattatcccagggttcaaatttgtttatgagaaatttcaatcgagagattggggtagtacaaactagacaacacaggctgtgtttagttcccttcaaacttccaaaaattccgtcacatgtttagacatatgcatagagcattaaatgtggatgaaaaaaccaattacacagtttgcatataaattgcgaggcgaatcttttgagcctaattacgctatgatttgacaatatggtgctacagtaaacatttgctaatgacggattaattaagcttaatagattcatcccgtaatttacaggtgaaatctgtaatttgttttgttattagtctatatttaatacttcaaatatgtgtccgtatacttaaaaaagaatttgaaaaggaactaaacacggctatagatgagctcaagatatataaactgatgaccaaattcggaattcaaactttgaataccaaaaaaacacaccatcgacaccgatcaaattaactcacgtcctttattcaagcgcacgtacac

SEQ ID NO: 9546 - DNA, 31840 bp, Oryza sativa
gggggagggttagggttttcataaggccgtgggccaaccggcaagggacggaaataagtctattttacatccctcgggccgaagaaaaagagaagttcatttttagtacttcattttttcagaagtattacaattatagttattgaatgtgtttatttcgaagcaaacctaaaaggaagtatttttattcttcttccaattaaataattgttaaatgttatttgtattattaaaattagcaattaagctctgaaaattccaataaaatttcaaagagcgtaattaatcatagagaatttaataaaattaaatttaaccatgttattttatttctcacacttgcttgacttataaatttatttaattatacacatacctaattaaaaatatcaaatatttcagcgaatttgtattttaattaattgcatatttttctaatatgtacgcttcccgttgcaacgcacggacacttttgctaaaccaaacaacacttttggtcaatatacatactccgtaatcaaccagtgcaacgcacgggcacttttgctagtaatatatgaaataacgagattgtcatcgattcggttcagcacaaactgagttgggctttggcccacccctacaggcctacggagagtagacagtagaccctatgaacggcccagtactacggtacccactgactgcaaagatctcagagaagattgctaattaattattgcacgaactcggaaaatattctgatgttctaataaccctgcatcggaattgcttgaggactatcgacagttttcttgagtgaaaactgttaaattttttagccgtcgatttcgttttaagatttgtactgagatattttactattagatataaaccctcttttcacaagctagtcccatcattgcatgtttacggtagatttgttcaagttatatctaagttacattccaattacatgctagttacattgtagttacactatatttacattgtaactatagtgtaactacactataactatattgttatctctatataaattacatataaagttgcatatattattttaggcaacatatcctatgcacacaggccctcacgggtacacacgtgcacaccaactaaaaaatgtcaccaaaaactctagaaaaaatcatacacatactttcaattgtattacacctagggttaaaatcttaatgtcaaattcattatattttagccgtaacaaaaaaaaacaaaaaatctgacagttttaaggttgcaattttgtcagaattttatcttttttgttattctctatgtagaatgaatttgaagatgcgactttgcacgtagatgtaatactattgaaagtacatgtatgaatttttctagaattttttgtgataatttttagttggtgtacacggtgtgtacacgcgagtgcctgtgtgcataggatacactcccattattttaatacatatatatataagttattattattatagtatagttatagtgaaattatatactatagttaaatttgaaagttttcccctcaaaaaacactcgacacttttttaagctttgggaccagatgaatctgctgatctaagccacagtaaatctgacgaaacaacaagctatcaaccaggtgcattatttttcaccaatgcattattgtccgcttatagataatggatgggctcacggcatgtttcctaaattcctaaatttacgattttgtacaaaacttctgcatcagtatctcttaggaatctgtctaaacaaactttcaacttttcaatatttagttatttcatctccgctctcgaataattatcataacctttagtttcacccataatccatcatccaccagaattttggagcataccccttatgatggaactggtcacaccatattttcttatctcacttttctttcttcacaacaaaagccaagcatcaggaattatacaacacaacacactctagatgagaagctaattcatgttacagttacacacaccaatggaagaggaagaggaagaggaagaagaaagaaatattattgtggggggagatctacaatgctgtgtattgtgactgaccacacccttgctaacctgggtacctgtgtcctctgcagagcacctagatattgtcctcatttcatacaactcatccagctcaacagccatcaccagctgttctctgtgtatttcttcagggcacgtaccgtcatcaccagctgctgcctctcgccttcgacttccgcgaatttcaggcttatctctgagtacggcccgtgcagttctttcagctcttcctctagtgcagtgttccgcgcctttaccgactgatcatgagctgcattctacattgattgataattgccaccagcaaagtctgtcagcaatggaccatgtggtactgaattatagaaaggtaaagctttgctacagctcccggtggctccgtcgtatgcttgatgtgcgttatagaagctgttttaaaaaatcaaattaatttatttttaaatatataatagttaaaatttaattaattatgtgttatcgagcttactcattttgcatgcgcacaaaattttcctcatttttttgaagcatcgaacggggcctaagaagaagaagatatgcattgagagggcgtcctctaggaggcgatgctcctcaagctcgagcaaccggcatcagtggatatgacaatgttgctggcaccaagagagaaaatggagctggaaatatatatacgcttgatataagttgcgcagtgatagtcgataacgactatttaaaaacaggcggagtgactgtgacgttcaaacgaaacaacatttaaattaagttaagcttgacaaatgttgatgtgtaaaaagtgttgagtgtccacgagaaaacaaaaaagatgactaaatgaactagctcccacggatgcctgcgtgcaatcttgtatctgcttggacgattttcttgggttcgatcctgttcttgtgttgtgatccaattaatttggcagagaccaatttgctgcacgtgtacgtctcgatccactgttactagtcaaaaagacccatatatatatgtaaaaatacgagtatccaaaatgcacgaatctgaggatccatgtctctttcttcttcattcattcttcctccgttcagctagaacagttgtagcattagtaccgttatggtaaagtctaaactatacatatattaatttattttggtatcaagagagtacacgaaacggtctgctttctgcaacacttctcatctataaaaacccgaggcgtgcatccttcccctataccacattcgatcacattcggctagtaaccaagcggttcttaagctagctagctcgagcaatggccaagtggacggctgcgatggagatgcttctgctggtggcggtggcggcggcagctgtggcggtggtggtggcgcaggcgccgccgccgccacagtgcgaccccgggctgctgtcgccatgcgcggccccgatcttcttcgggacggcgccgtcggcgtcgtgctgctctagcctgaaagcacaacaggggtgcttctgccagtacgcgaaagacccgacgtacgcgtcctacatcaacagcaccaatgcacgcaagatgatcgccgcctgcggcatccccttgcccaactgcggctaggctccatcgccgccgtttgccggtgctggccatgatgtgtggcagcatatataaatatatgctgccctatgtccttgtaaaaaataaaggacgatgtctagaagcatatatatatggtgtactgcgtacttgaataaaataaaggatgtgtgtttgaatacataaattaccgatcgattaatgcacccgtgtttgatcgatcgatgaggtgtcttctgggatttaagtttgagtttctaatatccaatctcgtgggagcgtgaaatactactttaagagttaataagtattctaagatgatttgtgttttcaagtttgtctatcgatctctcaactcaaatttctcatacacataatcgtccaaaaatttgaacacttggatcgtatggactatagatagagcaaccgtctgatcaaaaccacgatgagctatatgcacttctcttcacgtctgtaaactgtagtgcgtgctggaaacgcatgcgccaaatatagcagttctggattgtgtgaatatgtgtatgtgcatccaatttgcatggagaaaaaaaatccactcttcctcagtcttcaaagagtgttccgtacttctcgaaaaggaaaaatatactctcttttttttcatcgaaatttatccaactgtcaacctttttcaccaccataactttactggtggtcttatgtccacctaaagaacaggtaatgtattcacatcttgagcattcaaaatttattccaagattgagctttccacataattctgtatctcagcaagttacaactatcttttatttaatttctctgcatacttgttcatctcaaccagtaacaaccatctaatccatgtcccttcctctctcaccgatggtgaggactggcggcggtggcagacttggtggacagcagcgttgggcggggatcgatgggggctagttcgatgtccctttccctgtcaccttcggacttcaatccttagtgagtccctatgatgtatgttatctgctagccctgctcgctcacatgtccacccccttcattggtccgactaccatcgtcgcatgcctctctattgttaccgagaccttaaaaatcaaaccgtatcatcacccttttaataatttttagaagtttcgccagtcgttagcacccttctgcttgtttgttttatgtcactcctcttcgttgacatcacaatctttaaaagtcaaaggtttgatttttatagtttttaggtgccttgcctatggccaccttcctattgttttgccacgtgcacctctacttccctaccacccaccccttctctttgttgtcatcatcaccttcatcagggttccgctcatccaccccttctcttccttatcatcattttcgtcagggttccgctcgctagaccgcttcccctccaatttgttttcattggcaacttaaacaatcgaaccttattattgtcgcctcatccctactcatttgccacccctctgcctgctgctactcttcttagttatcgttggcactttgcaaattcgagttttatcattgcaagggctccattgtcgttgtcttactcctttgtcacaccttggctcaccctcccatggcaaacaccgtctccctactattttctcgccctttcgctcacctatctgtggcccgccctttgttatcgctgacacataacaaaattcaaggtgttccctctgtatcgaacagtaaggtgctgtgttggagcctcaagcccatgtgtgatgaactcgaccacattttttttccacgttaccttggctagttttagtactactgacgaggtaggtattagaccgtagtcggcctactatagaatactctcgtacaaaaaattatgtaaaataaattgttctaggtaaacataataaattaaattattgatttggaaaaggtacgattgatggtatataaaatatcacttacatgtctacatacatatcggatgtatctatgagattatagaagattaatttacaaaaccaatctactaattacccggcccatgcgtacgtactctttggagataatgaagtttctaggtacacttgtgagtacacatagcaaaggggaacttaggtggcaatcatactctatttataccgtatacgttcgaaaagcctaatgggcgatcaatcaccccgagtgattaccccctcctccatgtggttttttttttagaaccgcattactttcctattttagtaaatttatgcacctaaagtatgaacatataaagtttacacatctaaagtttatacacctaaagtttagagacccaaagtttatatatctaattcaaaattaaatttgaattcaaatatttttatatttagtattttctaaacatctaaagtttatacacctaaagtttataaacccaaagtttataagtctaaaagtttatatacccgattcaaatttgaatttgaattcaaatatttttatatatagtatttctatacataagtttttctaattttgtgtttttttattttttttaaaaaaaaattatggtgtagagacctaaagtttagagacccaaagtttataagtcaaaattttttatacacgattcaaatttaaatttgaattcaaatattttttgtatatagtattttctatacatctaaaatttatacacctaaagtttatagacccaaagtttataagtcaaaagtttatatatccgatttaaatttgaatttgaattcaaatattttttatatatagtatttctatacataaatttttctaaactttgtgttttttattttttaaaaaaaatatggtgtagtaggaaaagaagaaggggagaaagaagggagagaggagcgtgttaggggggatgggggtgaacgcccacaacaatcacccacccattagcgacacccgtgtatgtttgactgatcatttggctataatgcatgcgagtgttgggttggcttcctgaccactgtttggccttgactatccatgatgcatgcacggcggctggttccgtggtccttattcatgccgtatactcctgtgtcccgtcgatcaatatgaagccaattaggagtggggattatcggtttgttaagcggtctacatgttaaaagagacctaaggttgtaattgtcgcggtattgccgtagctccctgtcaatttgcaccacctctgttgtttagtttcaataggaagtttacgatcttagtgcagttttctcctctgtcgatcttgttggatctttgccttaagccattccctttggcgatgtacgggagcttgcctccttgatctgttgctttaatatatgtttaagtttttttaaaaaagataagacaaggagagcggctatcccctgcagttggcagtacaatgatcgaggtcttgtgatcgataatattgaactgatattctccgcactggtagcgtcttgaagctttttcggtcctaatagattgaattgtcagacagtgatggttccgatataaaggggaacatacttcggtcggatatctcccaaagctaaagtcatcggggtatccctcgtcggaagatctttagtggcaattaatgtcttgatgaagattacaaataggctttgtggttgatatgttgttctcggcgggagtatgttggaggaaatatcgacgacgtagcagcaaagaccggaaaagtgatggatttgacttggagaaaagtaaacgttggttgggtcatatctcctaggccagggcaatcatagaagtcgtcatcagaaaatctgcctcgaactcatctcgtcaaaatcttgaagcaccaaatcccctaaacgaatatgatgacgtgtttcaaggttatcttataatgatataatataataaatagttagataccatgaaatttcttcatttaaagacgacatcaagctctaagaacagagtcctgatcgtggtacgtagatgaatgttaagtgcagctttcactatagttcgatgctgcagtttatacaaggtgtacaaaactttggctcgatatagctacaatgtttaacatcaatttgtagaacccaccccaagccttccattctggtgatgtggatccagaaatagccatgatagacagcaaatcatgtcagccagttgcgcgatccaagcagagatcagatccttgtccttggtgctatcacgttcagtgactctgtggattaggtgcaggacaacatggataaggttgtgcaacgcaggtacgagaagatgactaagtctgagtgtcgggaacttatcccttgcgtactgaaaacgaaataaatttattagcacatgattaattaattattaattattttttaaaaaatagattaatataaatgtctctaacggcaagatatacggacgtatgcatgcaagtggagggatacatatgtctgcatatgtctgtgacggcaagatatacggaggtacgcatgcaagcctcagtgacgaattgtggctgcagattgttagcaatacttttagcagacgtacgcatacaagcccataaatcagtcacgaattgaggcggcatattttagcaatactgttatggcatgtacaatgctagtactcctatttaataaccgttctcttcgttgacaaataaataaatttaacgatgtgaaaatccgcatgttcgaaatggcacgacacaattgggcagtggtacaatactatgtacaggagaagtaatagtaataaaatcttagtcaaattgaggggatggatcctaatccctcgagagaattgagatatcctcccgtgtatcttttttttctttcaaatccaatataaataattatcaaaaattatttaaaaaatccaatataaataattgtgaaaattatgaaaaaaaatgattgtttagattatagtgatatttgttagtccaccaaaaataagctcaaattcgacctacatgttaaggaaaaattaaatttaggtgtaaacagtatattgttattcaaacactgaatttatccgtttatatctttgacatgtaagttgagtttggacctaagatttcacggaatgatgtataaatgttgtatgagtgtttccaaaatttttagaattttttataactgatcaaaaggtttttaaacaaacaagggaacatctctttcccctcgagagatcaaaatatatagtttcccgtagaatcaatatagatatgccaccacctcaatttatcaatatcagaatttttttttatttatagcagaatttttaaatcaatgtttaaaatcacctgctgataatactaccaattaagaccatcacaaagttactcaccattgcattgtttttgtgatagcagagcaatataagttaaacatcaccttgattaattcatactccgtttttataaattttgttttgataaagtgatcaaaatatgcctacgtaggataatcccccatggaaaagtaacacaattgactcaattcaatcaaacttttgaaactttaaccatcaacggctcctaaattttttgagtctagaaacataaaaatgatgtgtgtagattttttttataggttctttcataatattatagttttgctacatattagaattatattctaagaaaaatagtggtccaaagttacacacctaaaccaaatatatcaacagtgtcatatatttaaatatggaagcagtaatattttaaaaagaatacattttagaaaaccccatattttatagccagagttgcaaaaagaaaaactaagtattataattggtttttacataacttcagatattatggatctaaagtttaacaagactctgcgcctatacttgttgagtataaatttacttaaaatttttaaaattgaatgtgtatgaacttttaattattgagctctagacagagattgatagttttaccctttgttactaaaattaactgagatttgaataaatgcaatttttataaaatatttaaataattaaatatgcaattatgtgccacgagtcataataatgtatgaaataacaggattgtcatcaattcggttcagcacaaactgagttgggctttgggccacccctacgggcctacggagagtagacagtagaccctatgaacggcccattactacggtacccactgactgcaaagatctcagagaagattgctaattaattcttgcacgaactgggaaaatattctgatgttctaataaccgtgcataagcttagggaccagatgaatctgctgatctaagccacagtaaatctgacgaaacaacaagctatcaatcaggtaaattatttttcgccaatgcattattttccgcttatagataatggatgggctcacagcatgtttcctaaattcctaaatttacggttttgtacaaaacttctgcatcagtatctcttagaaatctatctaaacaaactttcaacttttcaatatttagttatttcatctcagctctcgaatatttatcataacctttagtttcacccataatccatcatccaccagaattttggagcataccccttaagatggaagtagaactggtcacaccatattttcttatctcacttttctttcttcacaacaaaagccaagcatcaggaattatacaacacaacactctagatgagaagctaattcatgttacagttacacacaccaatggaagaggaagaggaagaagaagaagaaagaaatattattgtggggggagatctacaatgctgtgtattgtgactgaccacaccctgctaacctgggtacctgtggcctctgcagagcacctagatattgtcctcatttcatacagctcatccagctgcctgcctatacaaaaccctccggggtatcatctaaatcttttgtactacaacgtgtgtgaggagcatagatcaagatcacctcagggagttcttcagggcgcgcaccgtcatcaccagctgctgcctctcgccttcgacttccgcgaatttcaggcttatctccgagtaccgcccgtgcagttctttgagctcttcctccagtgcagtgttcctctccttcaggatttccagctcctttaccgactgatcatgagctgcatccctacattgattgataattgccaccggcaaagtctgtcagcaatggaccatgtggtactgaattatagaaaggtaaagttttgctatgagtgtagattatacctcctgtcatgcccattgcagtcaccatttgcattgtgtctgttggtgcttggcagcacgttacagctcccggtggtgccgtcgtcatgcttgatgcgcttagaagtagcatggtggttgtcctgaaaaaacacaacattgtgtgtaactttctaggtaccaaagcgtatgattacaatctaagcataggtatgtaaaggacaggcagctcaacaaatatataatatcacatcctagttagcggggacctctattcataaagatatcccctacctatcagaagggatctgtacaactgaatggtgaataaaaacaaatttatctccccatgtgcaaaaggatgtaaatcatgaaaaaaattcttatagaagatagtcctacttatctgtggtcacaactcgcaactacatgagtttttaagagtagcccagcatgctgacttcaatacgaaagggaagttacacctacttgttcaattgtgtggtcttaaggaatacttgtatcattttcttctaacaagtttctgttagttgtgtttggagcaattcaattgtccctaacaacttaaacctgatttggttatagatatgatggagaaaagcatggaaggaatttcaatgaagaaacttaaaaaggagagttagagaactatttgtgctacagaaatatctgattatgcaatatttacctcatctgatttgacaccattttgtttcacatcctccctgctttcaagggctctccgaagcttcagcacttgggaagcaaggttgtgtttctcagagtcgttagtggacatcaaaattttcaggttgtcatactcgaatttcaacgatctaatctctgattgcagcttctcgatcatctcctccttttcattctttgaactttttaaagtgtttatctcctctaaatatgtctgcacttggtccttgattgaagcaagttctttgttgagcaaagctatctcagcatctctatcctgcaagaacatatccttttgacaatttgcagctaattccttgtccttctgctcattctcttcgaagagattgtctcgttcatttgacagattctcaatcttagctttgagttgatctatttcttctgagagaacacttaactttgcttcgttgcatctcttctgattctggaactcatcactcttgcttttaagctccattaccagcctgtctgtctcctttgacttgaaatccactaaggtcagtaactgttgaaccttcactcggtgttgttcttggattgatccaagatcttcttgtgccttctgtagtaattcttccaactggcccttctgtaactgtagctctgcagcctcttttctagcttgcataagcaactgttcatttgcgctgaaagcagaggaaacttgtgaagacaacatcttgaattcctcctggagtcgttcagcagtagtggcattgttccatcttgctttcctcagggactcctcggcctttatggccctttgctcttgttcaacctttgcacgcattacctcttgtatgtcagcctctaatcttttggattgttcctggagttcattctccaggctctcaacattggcttcaagatcgcttattatagacaaatgtgctgaacactcgtactgcatccttagctgctccctcaactgtgtttgctccagcctagaagagatgtcatggttctcttgcttcaggatctcatagtcaagtgcaagttgctccatttgcatctcgaggtcttcacggtccttcttatacaactcgatttcattgctcagctcaacaattttattttgaagttcagaggtagcgatgccatcggttgtctttgccaatgcatccagcatcagctcatcttctttctcttgaactgaacttgtttcagatatgtctattttgtgtccagcattatgcacatttgacaatgctagctcatattcagcctcctggggatcctccagtgtttcttcatgcaaaagtgatatctccttgttcttctgctccagcatctcatcaagatccttcacagccagaagtagctcagagttggattcctgcattttctgcaattgtaaatgcagatctccatttagattcttctcatggcccagttcttgctttagctcttcaatctgcgaccacgggtcttccccgcttgatagtcttttaccagatccgtttgcatcatggatagtctttttcatccctctgagtgcttcacattctcttctgagagcatccctctcatccctcaagctacccacttccttggaaagatcttgccctcgtcgactctccttcacaatttgctttctcagtgtttgcaactccatatcggagacatccaatttccgcgtcaaagtggctatctcacttcttagcttctccacatcatcctctgcctccctcaaccccgcctcaccggagttgctggttgacccgtcggtgctagcatcaggagctgagcttcccgaccagtcaccggagctggtcaatgtgttcctcaggggtgagagggtattggtgccctcctgaagaaatgtgctgtgcatacttgcattgtttttgggggtaaatctccctgagctcccatctgaacccgacaccgaaatggcatcaaagctgttggaattgtgaaggtgatcgacaggcccacgcatgtttcttctcgctgaaaacctcatcccaggaggtttgtttatcaccaatccgtcctgtaaaagagatcaccacaaaaacaggcgaaagtcagatcctacatccattgttcagtgccaaaatctcacccttctcaagcaaaaagtgaaacgatatgattaaagttcagcaagagaaattctgatctcaaacagttcagcacaaaaaattctgatctcaaacaaaaaatatcacacagcaacaaaaaaaaaattaaaacagtacgattcaagttcagcaagagaaattctgatctcgaacagttcagcatgaaaaattctgatctcaaacaaaaaagaaaaatcacacatcaacaaaaacttcccaaatgatcaatcacaaaaatgtaagctccctttcccctctttttcttttgcaatcttctttgcatgccaaaagccttcttttttatccatcaccaaaacgaaacaaagcaatgcaatgatgatgcacgaaaaaggaaaagctctcaagaacacctccaatccttacttgcatagggctcatcgcatccgccgccgccgccgccgccctcgccttctccgcctcctcgtcctcgcaccggctcagctggctctgcagcgtcttcctcggcggcgtcctcgccaccaccggcgacacgtcgccgccgttctcactgccacacagcaagaacaatcactcacctcaaatgcctaaatctggttgagctcagagcacaatgcagcagcagcaatggcgaaatctgctgcggcagccgcagaagaagaaggagaagaagagatggtcgagattaaacaaccaccagcaacacacccacctggcgtcgtcaccgcacccaccgccgccgccgccaccaccacccaccacccgctggatggtcacctgtcacagggtacaagcaccaccaacatgagccccccaagaaccaccgcgagcgcgtcgccgtcaaagctcacaggaaaaacaatcgccgatcctttttaagggagagagagagagattgaggtgagattgggacgaggtgctcacgtgcagctgcgcgccggggctgccgctgagcggcagcgtgacgatccacggcttgaacgcgtcggcgtactcggacaggttcagcgtcgcctccccgagcagcgccgccttggtcgagccctgcattgtgcggcgggtgagacaaatcgtcgagcacatgacgggcaagcgagaagcgggggggtgagtaatggcggtgtcggtggcggtgggcggtggcggcgaggagagggaacgcaccgtgtcgtagacgaggaactggtagatcttgtccttgccggaggaagggagcttggtggcctcgtagaccggggcgggccactggcacgcgccgtcggcgacctgcgcgctctccgtcctcgccgtcggccggcccgcgtcccgcggcgtcaccaccaccatcatcgcctcccatcccacctccggcacctgaaatcaacccacccaaccaacccaaatcatcatcacaaaaccaacaaatcaacaacaacaaaaattcttcgctcgtcgcggcgagcaaattaattatccgtgcctgcgtggcgtggaactgcagcttgaacaccgccttcgccttccccccgcccccgccgccgccgcgccaccgcgccgacttgaacatcccgaccaatcagtctcaaccaagaagaaggcacagctcgctcgcctgtgcggcgctaagcttcttcttcaccggcggccgcattgcaatgcctccgcctccgcgcgacgccgtggcattgctagctgctacagcgagaggaggaaagacgaagagcaagacagcgagcaagtgagcgagtgggtggcacactgacacagccagcaacggcaagcaaggcaaggcaaagcaaaacaacggcaacagcaaagcaagccacacagatctagtgagagaaagagagagatagagagagagagagatcaactgaattttctctctctactactactacttgagctctgcttttggtccctttctctctttctctctctgtgatttgtgggggggtttagggggaagaagagaagaacaagaaagagaaggttctgagggctataaaaatggcggtcaattgttcggggcgatggactagtagtagcagtaggggtttattagagctaacagagagtgtgattggcgatggcgatggcgatggagtctggtggaactgtgcaagagacgagcacactactatacacaaaaaaaaacaatctttttttcagatattacacaaagaaactttttttttttagaaatataagactagtcccaacccaaaacactaagatatagtttttataaagtcacactatcaagaaactagtaatagacaccactctttcaatgcaaacaccacttttttttacttaaattaaatttaatgatacttatcatacatgatgttttgaatgttgtgtggaaaccatgtctcaagcaagatctggtttccttcccttttctcatttattcacttacgacatcatcttttattttagatgacagcttatttaatgctatagacatctcattaacttaaaaatggcctaatcgtgcaaaaaaaaaaagatcgatcttttcttcttctttttttcccgaaatcgagtctagtctcaagtctcaactgcagttgcagtagtataggagtacagccgttgcgttgcgtgagcgtcacagctgcagcggctgcggtcgtctgcagctgcggggacctgccgacggcaacggttgctctgcgtgaaggggatcgatgttgggtgttgggttcttggatccatcgatttgtcagtggcttattgtacttgcttgagacctaagcctcccctcctctcctctttggagttactgcctccatcttgtactagcatcatccatttgtctagtaaaaagtttgtttctgaagtaaattatactgctcccaatacgcatttaattgaagtattctatctgttcaataaaaaaacaaatctagtatgagatataacatatactaatattacgaatcttaacaaaccttgtatccaaaatttatagttgtcacatcccgtactactagaaaatctatcttatttcagcacactactaatttatcctattactactagaagtggtgtttttttttgttgacggagtgagtagcatgaaatatcttctcgcaaattactaatgtgtgctaagagcaggtacaatagtagactataagccagctataaagaaagagagagaagagcagtgagctacatatctgtagccagctgcagcacggacttcaagacgtaatgtgtgtatggcaggtgggaccaggtattaatagtatagtaagcaactattgtatgaattggctattacgttgggtatagatgatttggagctagcagtgggttatactattaaacttgttctaagtgtggtcgatgttgatgtcaaatcgcaatggtgtgatcttgctgtcattgggtgagattaggggaggggagtttggtggttgcatttcataggatatcgatgaaaccttcacgaatctgttgaaaatgtgttggagagttttgtagtttgttgcgagcattggaaaggattcattgagggtattaatgtggaagtgtaatgggtagtctatgtttgaggtcaaaatgtagtgaagcatatgatgtcattgaagtttagagcggtggcaatgatgacattacttcttgtctttttcaatagagtacaaaaaacacgttgaaatattatttaatttaagagtgttatttaaagttgtgtttttatctaattaataaaatggtggattaatgcaacacacttccccgaatttatggtgagatttttattaaaattttatgcatacaaatttctttaaataatcatttaaaatatattttcaactttgtgatacttaattaatttatatgtatcttcctcgaaaaaatttcatccatcttcaatgaatggaaaaaaaaggacgatcaagataaactaatcagtaaatgatgatgtaacaaatatcaaattaattactatgcagaagaacttatcaaacgcatacacgtccgattgcaagcaacacctcgtacacaaagccacggtcgatggatgtacatttcatcgcagcgtaaccacctacaaaatgaaatcccaacaaacacaattaattagtttcgtatagacaatccccaatcccagcaacaccattagagcaagtttaatagtatagccaactactaactccaattcatctatagccaatctagtagctcatttatacaatagttacatactacactattaatacatgatcccacatatcatatatacactgcgtcttagagtctgtgctacagctggctacaaatctgtagtccgctgctcttccctctctttatttatctccttatagctaacttatagccttctattgtacctgctcttacaccaccaatgacccatccaaccgtgcatgctccccaaattctggaggcaatggagcatggtggaaccatgcagccagccatggcaagcaggcaaaagcacaacgatgatgcttacaactcgacaagaacaattcaaacgaggacgagaaatggtgcacgtacgatgggtcagatcatgggtaggaaggatttcaggtgagcctagctgtgcttgtccatgccggccttcgctggttgtgtcattgtgtgacctcacctcacctgaattcttttctgattcaggcaaattctacctttggttttcattaaaacgttgtgttttatgtgaagttttcctataaaaaagttactctaaaatatcaaataaatctgcttttttataatttgtaataattaaaactcaattaactatataatgataactttcttactccctctgtagtaaaaatacaagggatttttggtggatgtaacgcatcctagtactacgaatccgaacagatagtattaggatgtgttaaattcacctaaaatctcttacggagtatattttagaacggatggagtattttattcgccctgctactacttagggcatcttttgccgggggccggttgtgtggctgacaggtgggtctcacgcggcagccccggcatggtgcctggggggccttggcgcatgtggaggttgctctgcactgatctactcctatccatccatccgtcgccttttacaacgcgatcggcgtgcattgcttttttgtgttttttcgtcgtgcttttgctggcaaccaacctcagcaagttatttcatccatccatccatccatcccgaatgtgatctgctttgatgaacacagcaacagcacgtatacccaaaaaagggaaaggtattcttacacatgtacacacatggtgcgtatgtacatctaaagaaggagcatatatccaaacagctagtatctactactatctagtacattgctcaaacagagtagtggtactagtgtactatatataccggtggttttttcctacttgtatatacatcgtacacatggttacttgaataatcatatgatatcaaccataaattagtgtattattgatataattagctctccgttctttgttggtggttaattgtactaattgatatatgaatgaaatggacaaatagcagaaagttattcttgcaactctagttacaaaataacaaaggacattttattcttccttcaaaacggtgaaagctggcacagtttttcgagaaggatatttttttagccgggctctatatctaaccggatatatgcagccattttaatcatgaacttaacctatcgaataggaaacttagccctcaaataactcaatctgaaattcactcctatgaagatttgaactcaggaccttgggtgctactcatgtcactgcaaccactaggctacatgccatttcacgcacagtttttcttataaacacgatcactatagttaggctcacctaagttcagaacatttaatttatactgttaaacgtagaaatgcctataccatgtagtaaaataacctatgattgacttataaagatataacataaagaagaataatgtactagatatttttaaatgttttgtgctagctaacagaaactaaaaggttgagagtagttgcagcacaatttgtagctgattattatagaaaaagagtggttctccctccaatgtaatgcttatgtgctagtatatatattactagttttctatttagtcggtgatgcagtcgtgcatcatgcaaactcatctccaaccatctattatgtattttcttttgttccactttttataagagccatcagtttattttgacttttgagctagcttctccagaaaaatccaataatcttttttccctgatctaaatatggggcccctgcattttttctgatataaacaacatcctagttactgaaactgtcggtgcgtagctgatgtgctttcttcatgtacacttagcttaatcaggccactaattaattgactgaacacctttgactactatacaacacagtctctctctcacacacacactgtacttgcttcatccacaaacaagagatatattctataggtgtgcacagtcgtatatagaatcatataaaaatcatacgtgtagagatttgtctctcgaggaattattttaaatgacagtagcacaatgcaaattagtaggtctaaacagtacatgaatttggttaatgccagctgtttggagatgtatatataacctaattaaattttggctaatcatttacttattgtgagagggagcagtactgaaaaccagctcaaatatattgattgattggggctaggcaaaccaaccatatggggacctaactaatccaatcttaggttagcgtaagaagattataaaaaaaaataattgtgaaagggaaagaccaataggtatgactcgactgggaatcctgtagcatctacagagttaatagttttttaattaaaaaaatgtgtgcaactctcactcataagtggccccagcacattcttgatatgtttaagctagttatggcaacaaaatagctgcacttgccatcaccgttgattaatgtactgtccattggaaaaacactgattacatactactttaatacttcctctatctaaaatatatagcaaaccaaatttaaaattaacataatatagtactacgaatctaatcatattatataaaatccagtactaaattgctatattttagaatagatggtacattatattcattctgtcaaagaaaacttctgacataatatagatttgtagtgtaatactttaaagcattagacatgaatatcttcttaaaatttggattagatgtataaaaaccatatacgtagatttgttaaaaaaaatataccagtattttaaaatattatagaccgtgtcaatgtccaaaacaatatttttttaacatattgaacaatagttctaggatgtttggctaaaaacttattcggacttttttttttacagagcaagcacaacttctagcctctgcagtaacaaacaatgtgtgcatagcactggacgaaaacgacggtttaaaactttaaataatcactgtgctgcagcatcaatcaagtttgggttgaactaaacagttattacagctaaggtggtacacaggattaattagctgtttggcacggtattgtggttgaaaagctacggcatctgctggtcctaaaaccccacattaacccagtaatctcacgatcacgtgcaaccatagataaccaccactagtactagctatacacacaggctgcagctgatcgatcagatcacccaaatgaaaaaaaattcagaaataaattaattcagggaatatgtagctgctgctggtagtgtgtgctgcaaatggataattgatatggatatgtatgcgatgcaatggatggtccctgctgattagcaagagaaaaggttttgattaattagcagctggaaacgctttctaaaagcagagggtccagcttcaatgggtggatggatgggttggatggaggcttggatcctctgctcatgatgcctcggccgacagtggtttctctgtcggtttagatgttaacctctaggctttgttgctacaaagtattgacataatcatacctgtatttcgtttaagtgtacatagttcttctagttaatttatatatgtaaaatttttacatatttttatttaattagttactgaaaaaagattgatgtaccagtgttgacgttacgatattgatgttacagcattataaggtagacatttatattttagtacgaatctaataatatttatcataaaaacaattggatcatatgaatgacaattaaataagcactagctacttcgaaacataagatgtagacacaattagatcctacgaggttttagtttatattactcctacaagtttacattgctggaatagcacacaaaagaggtactggcagtgaccatagcatttatatatgcagcaataacaaattgtccctgacaaaatactttaatctatcctattaaaaaacaatcctagggatgcaggattgaatttacagagagagtatactagctgaacattttttttggtttacttgacgaagaatcaaggcatcccgacacactgatcgaggattgaactaccactgatttttgcctttttgcctccaattctaccagtactacgtacggaaacctaaagcctataattactttcgaaaatttcgtactcctactatactgaattttagattaaccgtacagtgtactacatactcgtagtttagtcagtacggttcgcgtagataactatcgatcgaaaagcaaattaatgcatctggacaaactcatcaacgatagtcacttacacgcggggccagataaattaaaattatacagctcagcttcatcacttgcttgatactacttcagctgaagccaaatttgttattaaaaaaaagctgaagacaaatttaagttttaaaacttaattttatatagttggttttaaggttctattatcatactaagaacacaaacatacaaaacattatctatcttcgtttttttttcggttatcacccgtagagtgaactataggtgctaagtgaataataataggatatatatacacgatattaacagaggcaattaatggttgtatttcaatacttactttcccgtctcaaagtatagccattttttaggtcggcacagttattaagaaagtactccctccattccataatataaggcacaaccattttttttagatgttccataatataaggcatacatgcatgcatgccattaactatgacaattctccattaaattactattttttaaaatccttcactctcatattctctaactctattggatgcatgtattacatttattaggatgatccaaactacaaggtgataataactatttcttggtctttgggttaagggtggttgtgccttatattttggaatggatggagtatgtgagaatgattggaggaaatatgtgattagttgaaaagagaaagtagatgaagaagaatggttgtgattggttgagaggacgaggtaggtgaagaaatagcttcatttgagataaggcactgtgctagaaatagctacgatattttatgacggaggtagtaccaagctttaatttggtggcgacaatcctacagtaaggttttgcactaccaacttattagagcagagttaaaaaaatgtagtatttagtttttctatataggattcggtagaaggtttgatatgatatattaccaaaatttcgtcactatcaaattttgacatgtaacaaaacccaatcaagatacactgtatgacatctagggagcatcatacacagtaccttgtcttctgcacaactattgtaccagattatactttagttcattggatccatagctttgctgttattgggtgtggcacccttgttaataaagatcattgtactgctccacttttgtctttagagcctttgctacctttgcttcgtccatgttttctccttagagcaagtataatagttggctttaagccgactaaatgctgaggtggaggagagagatgagaagcgggctgtaaacttacagccggcttgtacacaagaaccaagaaactatgtgagagacaagtgggccctatatataggtgggttaagagaaagctacaaagaatcttatagccaacaagtcggctgtattattaaccttgctcttataaaaatcttctggtttttgtgaatgtactactctagctaacaaagtctcaataatagtcagaacaatgcaagtacaatagattaagtaatcttaaatctttttctcagtgcacatgactcatgttttcacaacaaaaaagaacaaaaaaagaagcaaagtcagagaagtgggtttagatttttggaatcattgtatggtgtgccgtacttcagagcagaggtagttcttgccagcccaacggtcacttttccaacagacagaatgtgggccctgccatattttttatattttcttttttcatttctatatacttttagatgttctagtatttcatgattgtattgagaaaaggatgtctcaactacaagaaaattaatttcctcccatttgacaatctctgatgcatatatgccgttgcagggtaggtgtaggtatggatttggaaatgtgcttgtacaatagcatcaggacagggaaatggatgttggagacagattgttagggtttgtttttgtctatatgatggtggagtttgctgatccatccattatatctttttttaggccactctgtagggcatcttatgttatgcctgcatgatcagtgccacatactgcaaaagatttgtactttaattttctggtgtcattagcagataattaaaacttggtctgttgaagtggaggatgatgaaattcgaataatccatagttaatgtgcattgacaaaattttcagaagttattcataccaagggctcgtttggatcacttaaattttacaggattctcagaagatttagatcatgtttggcacaactccgttcctagatccgcgctagattttgacttttgtagttttacaatgatttaaaattctatattttatctaaaatcaggaagaagaaggtttatctaaatgttattaatgtaatcagtaatcccagatcttagatttctagaattagaagaaaaaacgtagcttaaaaagtttctatgagttcctctgaagtttctcaatcaaaggagacctaaaaccgtgtaatccttgatcttcttctacacacaatagtataatactccactacaaatcctacttgtgcagatatcacactttggacagaggactgaactgaattagacagtagttaaatttggcgacgcattgaaacgatactgtccgagttgttcagcaaatttatggctccagctagctctacatgccaattaagctcacctctagccattaatctcagtactcagcttctctgaaaacagagtgatcagctgtacattgcagtgcaaagaaaggaccctgcttgtttcatggccatgtggccgctgtgcttagctgcagcgactgcaggtacaagcaacctgaattccttgttggcccaagcacagctaaatctactgctcttcactgctactcgtacactcagagggtgtttagatccagaggtgtaaagttttgatgtgtcacatcgggtattatatagggtatcatatgaaatgttcgggcactaataaaaaactaattacagaatccgtcagtaaaccacgagacaaatttattaagcctaattaatccgttattagcaaaggtttactgtagcaccacattatcaaatcatggagcaattagacttaaaagattcgtctcgcaaattagtcacaatctgtgcaattaattattttttcaacttatatttaatacttcatatatatattcaaacgttcgatctgatagggtgaaaaattttgaggtgagatctaaatcagggccttaacacatgcatcttgtgcagggtagggattttttttagataaaggttgtgcagggtagggtttatgtgtactgttggttcagattgaatgctggtaagagagtcataattgattttcagagataacggttaggattatactgttagatatttcatccgtcccaaaataaatttatttttcatctatctcacacatatcaatacaaaaccataaatactaaaataccttcaatgtatcaaatcacaatgcggttatttctctttttatctactcctaatgtatttatcacctacttttacaaattctaatgctatgatagtttaaaataaacgtattttgaaacaaacagaaaaaaaaatgatattattatgagatggagggactagtcgattttgttggttaatgctagggctaggcaatgatccatgatgcgtacattgcattgatcatcctaccagttggaacagcaaggctatggacaatgattcacacttggctgtttgcataaaacggtcggaagaaaaaaggcagcaagacaagctctcctccatgtcccagttgcagtacaaggttttggtgtttgtcagtagtcaagggtcagacgcagggttcacgtctttgggtgtgtttagtttgggaaaagaaatttttttgtgtgtcacatcggatgtttgatcggatgttggaaggggttttcggaataccacaaaatttctaggactcgacgcgagactaaagtacattctaagagaaaaaaattaaatggttttcataagttcaaatttgaaacaataaatctaaccaaaacttgatcaaaatttgacgaaaatcgttaatgccgctgtttggagttgtttagccgccgcagtagtttttgttttcttagccgcattttttttgtttttttttcttttcctggcataggcttgtctggccgattaagttgtgtaacaaaaactctttttctttctaatatattgatgtgcaatctattttgcgtgttcacgaagaagaaaggtaaactctaatcagaccaaacaataagcacaactagataaattaactttaaaaggtgaaagaaaaaagaaaggctaagagcaactctaaaaatttatccatcttactctccaagataaaatttcataaacttgggaaaaaaacatccttcaacatacttatcatttaacttgccaagtcaaatggctggccaaatttctcacttggctagccaaatctagcgcgttgaaaccatttgtcaaacatggatcccaacacttgccaaaggggaggaaggaatgtgaggctaatgtatggttccctatcatagactcacgacagagaatgtagatggagagattgtcggagcacaaatgaaatattgagacgattttttttatcaacttataccaaatactcctacaaagatggaggcctgatttaagtaggctgttggagatgctctaaatcaaacaatacaagtcagcaatcaaacgcagttcaccattacacaccgcaatcaactactccatccgtcccaaaatataagagatttatgttagatgtggcacatcctagtacgatgaatctgaattggctcttagtccatatttgtagtactaagatgtggatgagcctgtttagattcgtggtcctgttcgagaacccaacagatgggagattaagttttggatttttatggcacgctttttaaactgttaaacggtacgtttcgtgcaaaaaaatttctatatgaaagttgttctaaaatatcaaattaatccattttttaagtttataataattaaaactcaattaatcacaagttattaccaccttattttacgtaaaacacttaatctttatctttattttcatcttcagttgattcaaacacagcttaaaaccactgaataacctagctctagctggtgctgctctcctgggccgattgccatacacacgccgcaaatgcgcagcacgtactactactacctgctcacaccgcgttgaccatgagctctgcgtgctcgagccctccatgcctctccatgtggcgcaatcgatgcgatacgaagccgcctgaaaaaaaaaaaaaaaaaagtggaacacggcgttttctctccatgatttctcgttgcctcttgcctatttcgccgatagatcgcacagacggatcatctcgatcgagtccgagtcgagtccaccccgtgatcatttacgcggcctcacgccctgcatttgccgccgctagtgcgatcgattccgacgcaaacgcagctggatggatgatgcatagggattcaagtggatcgaaccgtaaattcatttatagataaaattagtaggtaatttatagattaactaataagttatccactaatttagtctataagttagtttaaggtagtcctacttgtatcccagaaagccggacctccgatacggtaactcgtgggttatccacttatttgatcttttaagcgggttcatgggtcggttcacttatattgttaatgatgtgtcgggcacgggcgtgtcggcattatcaaaaaacgcagtcaactcaactcaattcaattccgtgtgtagttaagtgtgctcactgctcaccctgtcctaagttggattagtgtacaattagtgtatgcaactcttgagcctgaccttactctggagtctggaggaggactggagtaggatgcagagacactgtcccagcggttctgtcagggtcaggaccatccggatcatccagctttatctcatctccctgctggtaggattcgagcaaattaaatattcgatttctgaataactaacattttctgctacactttttgtataactaactcttttagttgatttttttcttataactgttgttctacataggctgaatttgttctacatgaagaaaaatatcaggattagtgtggttctatcagcttgatgtaaaagcttgctttatcttaagaaaaataagtatcaaaatggcttactgaatgcctgaatcttactgagggtttgtactttgtagtactagaacaacagatagatggtgatcctgaaagcatctttttgatttcatgaatagtggcagtgaaaattaaggcgattaacgcgtacattttgtttctctgtcaagactattattcatagattagttgtcctatcgctgcataatgatctctttcaggtaaagcaggtgcatgatacttttactaccccacacagttctttcacaaaagctgacagtgaaacacattaattggtcccctttcttttttatgcctcagaaggtgacatgttattgttgctttcatcgctgatcatctcacatagagatctagcattggttggttggtctgatatatactttgatagggtggtttctctcccttttccttcacatgcactttttttttctgaattttccctcttgttggaaagtgccatggatgtactttgtgataatatgatgcggcacctataacttaccagtaagatgttaaaatcaaggttagccaaagctaatctggtagcaagtgtgaagcatgaaccaccggccttggcctgcattgcaacagaaagaataaaatgaattggcagagcattttctttaaaaaatgtatatattctactttacacagaactgttaggctgttagctagcttgccttcaaggtaggaaaacactcatgctgtcatgcatcagaagcttgctgttggagccttgcatggttccaagcagaaagaaaaggagaggttggggatttctttgctgatatgctcatatgcagatgtacttgcgtgacctgaacttgtttattatcaatggttttcacttttcagctcatcctgtcagagaaacaatgcagaatgagatgggccagtaataactgtaataacttgccattggtgaaaacatctgttctactatattttcaatgcttccagttggaaaggtgcgtaggtagttgaactactgaagaagtctgatgagcagatttttttttcacaggctcaataggttagcatgtaaggccaagaaggttaaccaaaagaagatctgcagactgaagctaagtactgaataaagcaatgcttcataagctcaaattgatatagctttcaatgcaagtgaaactgtgtatgaatagaagtatagatagaaccactcacaagtcacaaccaagtcacaaactcacaatgtatagtgtacagttttcctctgaaagtgtacagtagtagtttgtggtgttaataaaggcagaggtgaggttgtgtatgagtctgagcttagaagacatgacaagagagaaagaaaagagcaggatttcttggatgccttggcacgtacagtgcttccaacaatgccaagatttttcttctcccatgttaagcattttgatccattaggacatggcttaaaatggcatgtgagatctcctcggactgaacgcaatatcaacctgatgaatcacctacccccgtttcagatagattattgatcgaatcattgctacagataagaataggttaaatattttgagaaataaacttaatagataatccctccgtattttaatgtatgacgccgttgacttttagatcaacatttgaccattcatcttatttaaattttttgtgtaaatataaaaatatttatgtcatgcttaaagaacatttgatgataaatcaaatcacaatacaataaataataattacataattttttttaataatacgaatggtcaaacgttggtcaaaaagtcaacagtgttatatattaaaatacggaggaagtagcttataataacaagtgataatgtgcagtggtagaaggtttctttgagaaaacatattttagagacacgtagcaaataatccgcagcaataatctggtaaccgactagctagcagaacaaacagcatacaattcacatgacatacctgaacattttttctttgtatgtgtatacagacatatctgaaactctgaactaccattcatgattcatccaatccacatcatccggtttgccttgttctgatctttgacataacaagcaaacgagtctctgaatcgaaatagaaccaaagactgaacaagacaatacatacagttgtgcacgctcgttgctatcgttgatccaagagatggcacgcggctggatccgacgacgggtggatcggacagaacgaccctgccgctgccgcattcatggccggttgccccggttaggtgccccgtcgccgtcgctggcgtctgccggccgtcaggcttcgtcggatgccgcgagcgggagggaagcgcgcgcgcgcgcgtgcagcggaaatcagagatccgggggaggacgaagaaacgaaggtttcctcgaactcgaagggttcgatcggagacgccgatggggtggtggtcttcttcatccggcgaactggcgggtcgccgtcgtcaccgccgccgttgtcgccggagggatcgaggaggagacagtaaggatggggccacctgtcagtgacgccgaactaccggagccttctttttttttttccttttttgcacgtctcgtttaccggaataccatttcggcccagtggcgtgtagaatttttttagcccatataagatcaccacggccaaggacagcgtcgcaagtggcccggtaacatcggatgggccagactgccatagtaatgtcggcccgctggtcagtgacaccgaacgggcatttaactttttatcacttttaagatgtgacaattaagaatttatcacccacactctatgatatgtaggtcctcgtgtgtctataacatatgggtctagtaacaaatcattaattgtcactttgtaaaagtggcaaatagttaaatatatcttgggagggggagggaagagggggaggagggagacgctgacaggtggtcccacgtggggctcatgttggcggctgttaagagccaaatttgtaccgccaatatctacataaaactcaaataatgaaacatctaacatagtgatatgattcatttctagcatattccacgagcgtccagaagttgggaggaattacagactaatgtgaaggagaattgaccttaagaaataccaacaccacactcatcacgtcagccaaaaccaaccactataatgctgatagactaaagttgacatggtattgtgag

SEQ ID NO: 9547 - DNA, 17750 bp, Oryza sativa
ggcgctcgtccccagctggagctagcgtgttacctcccagagatggcacgttagtcctggtcagatatatgccaggcttcatcctaaccattacaggcaagatgttgtgtgaagaagggcgaacatgtagattgctaagctgacacgtgggggacaagaatgaccgacgtaactggtctgacaccggtcatgtcgtcagcagacagccacgattccacgtcgcacctgctcccggcgaaagtggaggtagttgtggcccgtctcatcagaaggtgactcggacggcaactatacaaatctccgtccatttatgaaaaggtagggtaagtccccacagaaaaagagagagatggtgcatgtggtatccccttaagatataaaaaggaggaccttgcccactgagaaggggaggggacttttccagattttaggacgtaatgttgaggcttatgtcgatgacttggttgtaaagacgcgcaaccaggaaatgttactctcagatctagcggaaacttttgagagtctccgctccgcccgcataaaactaaaccccgataagtgtgtgttcggtgtacctgcgggcaagcttctagggttcttggtctctgcccgaggcattgaggccaaccctgagaagatacgggctatagagcggatgcgccccccagcaaacttagggatgtgcaatgcgtcaccggttgcatggccgccctaagtcggttcatatcgaggctgggagagaaggcgttacccttatttaagcttctcaaacgctccggaccgtttacctggacggaggaagccgaaaatgccctcacccagttgaaggcgtatctaagctctcccccagttctggtcgccccggagccagacgagcccttgttactctacttagcggcgaccccgcaagtagttagtgcggcattggttgtggagcgcgatgagaacaactctcatttcacgcttccccaccctgtgccgacttggcccgggagagagcagggaggagaggctcccgagccgaacggtggcccaaggcccccgacgaccggagttggccctctgcccgcttgtcagacggtgctaggagcccccgaccccaggaaggccctgaggccactgtgggaaggccgcacctatcgcccttcgaccccgaggctaaccctgtgctgacccgacccgggaaagagcagggagaagaggcccccgagccgaacggaggcctaaggcccctgacgaccggagttggccctttgcccgcttttccgacgacgccaggagcccccgacccccaggacggccccgaagccactgtgggaaggccgtccctgttatcctccgacccagaggtcatcagcacagaagacaagtgcgccccgcgaggctgcttggacgaagagtgccccagggatgcggcccctagcaaagaggatcggccccaccgaaaggtgcagcggcccgtctactttgttaatgaggccctccgggacgccaaaacccgataccctcaggcccagaagatgctttacgctattctgatggcctcgaggaaactgcgccattatttccaggcgcatcgggtcactgtagttacgtcttaccccctcggtcaaatcttgcataatcgagagggtacaggacgggtggtgaaatgggcaatcgaactttctgagttcgatttgcactttgaaccacgccacgctatcaagagccaggccctcgccgattttgtggcagagtggaccccagctcccgagcccgtctcgatccccgaggccagcacggacccctcgcagctgcctcacaccgcccactgggtgatgcagttcgacggctccctgtctcttcagggcgccggtgcgggggtcacgttgacctctccgagcggagacgtcctcagatacttggtccgcctcgactttcgagcgaccaataatatggcagaatacgagggactccttgccggactaagagtggcagctggactggggatccgccgcctcctggtgttaggcgactcccagctggtcgttaaccaagtctgtaaggagtaccggtgctctgacccgcagatggacgcctacgtgcgccaagtacggcgtatggagcgccattttgacgggattgagcttcggcatgtgcctagacgggataacatgattgccgacgaactctcacggctcgcgtcctcgcgagcccagatcccaccgggcgcctttgaagaaaggcttgcccagccgtcggcgcgacccgaccccttaggggagacggatgcgcctgaccggcccccgaggcctgtcggagtccaggcctcgggacccgaggggagtgctcccaactcccttagattgattgcttggatcgccgagatccaagcatacctcacagataagactctacccgaggaccgcgaagggagtgaacgcgtccatcgcatctccaaacgctacgtgctggtagaagggaccctctatcggcgcgcggctaatggaatcctcctgaagtgcattcctcgggaacaaggcgttgtgcttcttgccgatatccatgaaggcgaatgcggagcccactccgcctcgcgcaccttggttggtaaagcttttcgccagggtttctattggccgacagctcttaatgatgcggtcgacctggtccggcgatgtagagcgtgtcaattccacgccaagcaaatccatcagccggcccaggccctgcagaccataccactttcgtggccatttgctgtctggggactcgatatcctgggaccgtttaggcgggccccgggcgggtttgagtatctgtatgtcgcgatcgacaggttcactaagtggcccgaggcttatccggtcgtcaagatcgataagcactccgcacttaaattcattaagggcatcacggcccggtttggagtgcctaaccgtattattacggataatggcacccaattcactagtgaactcttcggcgactactgcgaagacatgggcatcaagctctgcttcgcctcacctgcccaccgcagaagcaatggccaagtggagcgcgccaatgcggaaatcctcaaaggccttaaaaccaagaccttcaacatactcaagaagcacggcgattcatggatcgaggagttgccagcggtgctctgggcaaaccgaactacaccaagccgagcaaccggggaaacgcctttcttcctcatctacggcgcggaagcggttctcccatccgagctcaccctgaggtctcctcgggctaccatgtattgcgaggctgatcaaaatcagcttcgcagagatgacctcgactacttggaagagcgaaggcggcgcgcggccctccgagccgcgcgctaccagcagagcctgcggcgctaccatcagcgccacgtccgggcccgatcactctgcatcgacgacctcgtcctacgccgcgtccaaacgcgtgctggattgagcaagctttcaccaatgtgggagggtccgtatcgagtggtcggcgtcccccggccgggctccatacggctggccacgggcgacggcactgagctgcctaacccgtggaacatcgaacaccttcgtcgcttctacccctgaggcgggggtcgggtgtcaggtttcgggctcgggccaaccccgcacccccctcgggcgtgcagggttggccgggggctacaacatatgcatattcttatttctcttatatctgaatttctataaaagcagtttcaatttcctaaaggctgtatctgtgctgttttttccttttgaagaatcttgacttgaaataggtcactcgtgctcaatcctgccctcgggggctcgggtcggctaaaatcgccaaacggggcccagaaccgagccgcgccccgaggcgtggtgaactccggggggggaatcggcaaaaacccacaatcgggtcacccataaccctcggtcaccacgttcccggcctggccagtctcgacatgtggatctccccaggcactagccccgacccgcgccttttgaggaccagaacctgggcacaagcccttattcaagctaagacacaaaaggaccacggcacagatcatcctcatctcatactcacagcaagatgaaattaacacaaaaatttcttcatttttgattacagattaagttgatctatacaaaaaagaggcccgaaggccttagaagaaagaaaagaagaaaaaactgaagaatggcgggggactgggggctcaatccgatgcgcccggatcgccggcctcgacgtcactgtcgtctgcaccaccggcattgccctcctcgtcggagttgggggcgaacgcaagccgaggggccgagccctcgaagctgttgacgatatggttggcggcatcccggacctgcgcgcgcgcgcggtcctcggtcccaggagggaactcatccagcgccatccatggagagaaattggggtccctggcctggtaactcgccaggacgagctccaccgctccttgggcgaggtccctcgaggatgacttaattgtcttctcgagctcctcggggagccgttggagagccccggccatcttcgagaggcgctgggcgaggcctccctggttggcggcgtactttacggtccgccctctccagaggcccacttgccgaccggcgcaatctaggcgggagacggcgtcccaaagcatgccgggccctacctcgcctgccaagcggagggcttcgacctccctggcggacgagtccagcgagccctgcagatcggcgatggtgcgttcggcagctgcgaggcgggcggctaagtcgctttcgcccgtggccgccctgccgctgcgcgccctcgcgtccagctccttcgcccgcgcctcgagctcagcggcccgttggttcagtacggccctctcggcgcgggcaccttccagattgcagcgcgcctgctcctcctgcgctgcctcgcggagggacaggttgaccgccagctgttgcgccgtggcctcggccccctcgagagctcgctcccgtttggtgagcgcgtcctcgcggaggcggagcgtgaactcttcttcggcgcaggcagcctcgtgcgccaccagcgttgcttcccggatggtgacggcggcctcgcggtccgccagatccctctccacgacgcaggcgcgctcttccagcgccatggcgcgcgcctcaagggcctcttcgcgccgccgggacgccgcttcggtctccgccgcccgctgttctcgggcagcggcagcgtcaagcaccccctgggcggcgtcgagcttcttccctagctccgcctcccagctcccgtattgaaggcggagggtgtcctgcgcctcgttcatcacggtggtggcaataagggcagccccccgctcctcctccacttccttggcaatctccgccagcaccttcttacgggtttcaagctccgagacgtgccggcggtgagccttacggcccacctccaccatggcctccatcgagcgtcgcccctcttcgacacgcgcccacgcggcgtcgagctccgcccgctctgcctgcaggacctccacctgggcacttaacccatccaacaccgtggtgtttgcggcggccaaggcctgcagaaggggctctgcgttcagtagggcgatagaaggcgtggggaagagccgccttggagaggatgccacgcggctcgggccgccgatggaagtgccggactcggggatgtcccccggacccggttggtcctgagcgtcgcccgagggagtaggcccaagcgacgcgcccgcggcctcgacgccagctgccccggaagttgtcgcctgagtgtcgcctgagggagtgggcccaagcgacgcgcccgcggcctcgtcgcgagctgcctcggaagtcgccatcgcctcgtcctggcgaaatccgacctcctcccgagcggcttccccggcctggcgggcccgggcggcctcctcccgagcggcttccccggcctggcgggcccgggcggcctcctcccgagcggtttcctcggcctggtgggcccgggcggcctcctgggcggcctcctcggcttcccgtaggcgacccgcggcctctcgccggtcagattcccacctgagggcctctgcggccgccggatcctcggcctcagactggccggacttggaatggcgggagggacgcgacgggatctcgctgaaacaaaagaaaaaaccagaagacgaacaagatgggtgagtgaaaactcgcgttaagagaatacagtcacgatgggtgagagacgaacctgcgagggggtcggttaaacgaccactttggaggggaaatgaggtttccccgagatggttctgtctcccccatcttgcggggccgcttcttcttgcgctccccctcgggctgcgatgttggcgcggccccctccgggcgcctactgctggcacgcgccgccccgccccctcggggaggagatgggggaggtgttcctccctgcttcctctttccccgggcgtcggcagggcggctgctccccggacccctgtcacgggacccagaagcacgaccccctctcggggtagattgttcccccctgcggctcccgcttgcgccgtcgtggccctttggagctcgctcctctgaggccccgaccgccatcataatggtcaggatggaggcgcggtctggatcgctgcagagggggaggattccttggggaatgagggccgcctctacggagttgagattcagcacccgttggaccaatatcttgaagtcctcaggagcccagtcccatctcactccctggtgggtcctcgtgaagtcttcggacccggtgtactcccaggcgccccgagcgcgccgctggagcggcgcaatccgacgacggaggtagtcgccgtacaccatggcccctgtgagcccctgggatcgcaggcccgccaggcggtcgaggacggcgtcatagccattccccagatctaccggcgcccgccagctggaggcctgcgctgggggctggctcggaagtcggaggcgcgcttcgtcggcgaggggagtgtagaaccagtcgctcttccagtcgtcccacttcttgcggagggcgcaggggatgtagcggttcagcaccggcccccgtggctggaagtagcagccaccgactaccgatggcggcgacaccgactgcacggtgaagaaccaccggaacagccgaagagatgggcgcaccccaatgaacatctcgcacagatgcgcgaagatggccaatgtcatcaccgcgttgggggtgaggtgcgccatctggagatcgtagaactccagaacatccatgaagaaagaagaaaatggcggaaccagccctgccattgcaaaggggagaaagaagacggaccgccccgggtagtctggcgccgggcgtccctcgcccagcgtgactatctcccggccggtggcagattccggcatgaagcggtgcgacagcccagcctgcctctcgctcacgatccgggaaggcggcagcacgctaccatcgagcagagcggaaccccgtgccatggcgccggaggaagagaagattaagagcgagcgcgtgtggcgaaggtagggcacaggaaagaaggagttagggcgcaagcggcgaagacaaggggaataatggcgaaaggaaggaaacagatcccttcctcagtgcctttatactcttgccaacgctgtgcccggctcctcgcttctcgcgcccactatttcgccccctcgtttcccgcgcccacgcttccactaatcccattcgcccgcttgcggcgcatgaggtggatatgcggttgtggcagtcgagatagatcatatcgtgcgcgcgttaattacgcttgccgaccgaagcgacgttaccatatcttcagacgaaacgaatcgccatgtccagattcgtgtgctactcaagtaatgtggcagtcttgaagagaccgctcattgttgacagccgagttaccattgccgatgtgcgtggtttgtgaccgttgggtttctgcccaattgtggagaccggtcccacctgtcaccaggtcttaggagtggcgtcacgcccgaccgtttcccttaaagagggcgatcgccctggcataacgccgggggctactgtcggtgacatgggatcaggagtatcatgactagaggtttgaggcagacacaatcgcacacgtggcctggtacccgcgagggacgtcgggcccgagggtgatgcgttcgccctcctcttagtccccccgagggggtcgggccgcacccccctcggccccgagggctgaggcgccccgacccctcgtgggttttttgctccgcgtatgggttaggtgagtacagtggggcttacctaaccacatttattgcggtttggttgagcgtgtcacgccgcatgtaacgcagtgcagtgcactcgtttatccggtctgtgaccagtcacagaccggtcagatcgcgggttaggtggcgacaggcgatctgacacacgcctcgccccatcccgtcaggacgagggcttctaggcgctcgtccccagctggagctagcgtgttacctcccagagatggcacgttagtcctggtcagatatatgccaggcttcatcctaaccattacaggcaagatgttgtgtgaagaagggcgaacatgtagattgctaagctgacacgtgggggacaagaatgaccgacgtaactggtctgacaccggtcatgtcgtcagcagacagccacgattccacgtcgcacctgctcccggcgaaagtggaggtagttgtggcccgtctcatcagaaggtgactcggacggcaactatacaaatctccgtccatttatgaaaaggtagggtaagtccccacagaaaaagagagagatggtgcatgtggtatccccttaagatataaaaaaggaggaccttgcccactgagaaggggaggggacttttccagattagaaacccagaacaagggagaggctggctcatactttgtagctcctttatacacagatctcccaaaaacacaggagtagggtattacgcttctcagcggcccgaacctgtatacatcgcccgtgtcttgtgtgtttcctgtctcgcgagccttccacatacagagagcttagaatctctccctgagcccccggccgaaccggcaaaggggggcctgcgcggtctcccggtgaggagccccacgctccgtcagggtctgttcgactggcattttttacagctgcacgaaggctagctgcagctgcacaacacaagcgctgcagccgtagcactgtcgtaggaatggcagtcgaacatgcccatgggatatacgactccatcttgacctccttcaggcttaggattgatcgatgggggtctggtcccgctttaagggaccatttgattccgtggccatgccgtcactaattgcaccctctctccactgtcgcctatacccagatccacagaagatgggttagtcaccgacctcagtcctgctcgccgctcttcgcccattgtctatctccgccttgttagccgtcctccgctgtaggcctccacagaccttgagtggagatgggagggtcgaggcggaggacgggaggaggagaaggaggtggcgaacccgcagccaccggctactcaccttctcgatttaggtttaattatcatgcgggtacgttcaccttctccctttctttctcttgacactgacgagagacgagctaggagagagattgaacaagaatcgatgagagagcgagaaagagagagataagtcttgaccggctgctcgtgctgatctggcccagccggccaactcaacgtggcaaacgtgtgcaaactaactggagaaaacgttgcactattgtattgtgtgattatacaatgcacgggcaaaaaaaagtcatccatttttgaaaacactatactacctccataaaaaaaaatttctatgaaattaaggacaaattataaagataaacaaatgatcacattaaccttaattatttaatgaacacagtacacgcacacacattatatataaacttgattaaaaataaggttgagacaagaggttaagagatgaaatggaaagaaaggagattacaaggaaacaaattttgatgtaatcaatttgttttgttaggtcccacattagtagacataaaatttttatgggacaaagatttaaaggtagaaattcaatttttatgaaactaaggcagtagaagtttcataaaagaaaacgtgtgatgcaaaaatatttaatgacctcagtctaaattttcatcaattgactacagcgcaaagaaccgagtcgttcacgaattaaattttaaaatatactgttcattcatttttttctcaaaaatattcgggatgcaaaattttttacagaaatataccgtcggtctcgcacaactgttgcgcaaaaatgatgtgggaatgacgtcgtgggcggtatcgcgtaacggaatagcgagaccgaacggtctcgctaaagcaacgagcgacactgtctgacagctccttttgattagtgattaattactcaattaacaattaactaataataattagtgattaattatcctgattaatgattaaataattattaatcaataattaattaatcgctaatgaaatcggcatggcacggtatcgcgcattgcttcaacgagactgaaatctcgcgccgctgcgcgctttcagtgcgcgataccgtctgacgtcattcccacatcatcttcgtgtaatggttgtgcgagaccggcgatatatttttgtaaaattttttgcataccgaatatttttgagaaaaaaatgaatgaacagtatattttgaaatttaattcaggcgttcacccatctgtttctcccatgctaaatcatcaggcacacacatcaagatcatcgttcacatcccgaacgtgtagagccattgtttcaaacaaaaatataccttttgtggtaattacactccgtcgatgtttatgattttgctccggtgcttggataaatcattgaggtcaaacctcatccaccttaccattacccagtgcaatgcaggagtattttgcaaattttacaaaaaaaaatgaattaacccaactagcaggatgtctcgagcactccatgaatttatataacgatgcaaaaactatatatacgctatatcctatattataagtagttgaaagtttgtcctaaatgaaacttcttaaaagttgattaagttggtataaaatacactgtattttaaccataaaaccaatattttatgaaatatattcaatagtaaatttaattaaactaatttgatgtatgccgtagaagatgttatattttttctatatatttagtcaaacccaaggaagtttaacatagtacaaacccataacatcttatttttcaataatttacaataatcaactcgttgactttgtttgtcaccaatagtagatttccatagtagtagtagtttcactgccatctcatctagagttctgactttatcatagaagtactagtgctacgaccgttcttcttggcaaaatttaccacatgataccaaaaagtcatctaattggttgggatatatcaatggacatcacaaaatttgtgtaactggttgtagcgcacccgagacaatattgtatcatttccaatgaaaaagatatataggatagaaatttcaaaagaacataaatgcctccggcctcaacagcatgtaaaccggcctggcctattggatcttgttcaagttcaaccggactcaatcgcactaatcgttcaccctcacaaccgaaatccccatccaaacctaaccctaggcagccggtggcggtggctttggcggcggtgggcgagcggatctgggaatcaattgtggggctttaatggaacctcaatgctcgtaaaaaaaagccactttcttccctgctaacttcttcctcggcgacatcatccccaatgccgtcgacgcctaccaatttcacagctccaccccccgtcgattcccagagccggtcgctcgccacctccaaccacctagggttagatttggatgagaatttcaggtatggggttgaacggtgagtgcgtttggttgaacctgggttacatgctactgaggttgggggtatttttgtccttttgaaatttctctctcatctttttcaccggaaatggtaacatattatctcggatgtcgctattgctaattatataaaggcaaattttgctacaggacactccttatatgtggttttagccctaggacactgcccaaactcacttttgggggaaaatactccataaacgtggtaatttgccagtggacaccgcgccgattaaaataataatttccgattgaagaggaaagagaaattgcgtgaaatgtcaaaaatgcccttgggcccacatgtcagctctatctcctatctctcttctcctcttcctgcccacatgtcgctccccgccggtcgtcgaccgtgcacgcgcagacagcggcggaggcaacggcgagcagcagcagcaccccggccctctggcggcccaccagccgcagcgcgcggtggagcagctgcagccgctccttctccccgctgcctcgccaccctcaccctctgcccccacccttcctcccgccgccggccgacgcgagcaagtcgtagctcccgcaccgcatctccagcgccaacgccgagccactcatcgccaccgccgccgcctttctctcatcccaatcgccgaatcacgacactgctgccgacgacgatggtgacgagttcgaggaggaagaggacgtgcgtagctcgtcccccgcccgccaccacccgtgcccgccgcatccagctcatctccgtcggctgtcgcccgtcttcaccggcggcgcggagcggggcggtggctggcacagcacgcaggccggcgaggaggtggttcgcggatccggcggtgcagagcggggcagtggcggacgacgacgacgatggtgacgagttcgaggaggagcaggatgcgcgcagctcctcccccgctgccgcccgccgctcgtgcgcagctcctccccctgcgcgggcatggccgaaggccggcttggagagcgaaatgtgggcaagaagaggagaagagagatagaagatagagatgacatgtaggcccaagggcatttttgatatttcacgcgatttcactctcctcttcaaccgaaaattattattttaatcggcgtggtgtccactggcaaattaccacgtttatggagtgttttcccccaaaagtgagtttgggcagggctctagggctaaaaccacatataaggagtgtcctgtagcaaaatttcccttatataaatcttgtggtgcctatcagcaatgtcacgtatttgcgatgtctcttaaccaattacaatacttataatgttatgcaacaaattttatcaagaagaacacagtcgtagcactagtactactatgataaagtctgagctatagaaaccaatttcttttggtactaaaggagtacatgaaatggtctgccttctgcaacacctctcatcatctataaatacccgggacgtgcgtgctttcccctacaccaccactagccaaagcagcagtcaactgccgcatcgatcacatcacatcaaccagtaatcaattgaccaagcggttcttgcgcctagctaggtagctcgagcaatggcgaagtgggcggcggaagcgacggtgatggtggttctggcggtgacggtggcggtggcggtggtggcggcgcaggcgccaccgccggtgcagtgcgatcccgggaagctgtcggcgtgcgcggtcccgatcttctttgggactgcgccgtcgaagtcgtgctgctccaacctgcgcgcgcaggagaaggacgggtgcttctgccagtacgcgagagacccgatgtacgcgtcctacatcaatagcaccaacgcccgcaataccatcgccgcctgcggcatcgcctttcccagctgctaggctagcttcgatcgccatgatgcatggcgtatattaaatatatggtgtgtgcttgaataaaggatgtgagtttgaatcagtaagaactatcgatcgattaatgcacccccgtacgtacgtgtttgatcgatcgatcagctggtgtctcctgactatttaagtttgagctaatttccgatcttgtgtggtactatcagtagtagtactactacactactactagtactactactataaacaaacatatattttttatgtataaaaaaatatacacatatacaaattttgtatatgatgtgtgtcaggattacggataaggtataccttctacccttggatttatgctgtataccgatacggtatacctgtgcgtacacggatgtttcctttactcattaaggaaattcatcgtgtaacagaaacgaaatccacggacggaaggagtcctactcggactgaactgggtcgttactgtatcgtggtctgatatctccgagttatacttggagatcaactgacccgcgatataaaagggacccccggggggacctaaggcatcgaatctcatcgccaacacaaccaccacagcctgcgaagtcggatcctacaggagccaagttgccgggtgatctagtcgaacaactcgactacagtctcgtcggtatcatcgagttctactattccctttgtaatatgtggtttccattatataatcccataccaactggattagagctattacctattaaggggtctgaaccagtataatccctatttcttgtttgcttgatgtcgtattacatagatcttcgtaccagcgtaccccaataccctctatatccgatctacgagtatccatcgtcgacaatgtgtataaactttatatacgatgtgtacaaactttatatacgaagtgtgcaaactatgtatatgtacgtattaaaaaaccaaaaaaaacatcatatgtatacatatacgtatacaagtatacatactttatatacgtatgtataccaagtttgtacatacgtataaaaagtttgtatacgtatatgttaaaaaaccgagaaggaaaaaaagaaagaaaaaaccagaaaaaatgaattcaaaaatgaagaaaattttctgcgcatacaaaatgtgcaagctcgataacacatgattaattaaattttaattattatatatatttaaaaatgaattaattttattttttaaaaacaacatctatataatttttttaaaaaaacacactatttaacatttaaaaaacgtgctaacaaaaaataaggaagttaaccatttaacagttttaaaaccgcactagcggaaaacgagaagtttaagtctcaagttgaagaaaagaacgaagccttagtcattgtctcgtacctgcaatgcacgacacgtactctacaggatcgctgaacatgacagcgccaagaagaaaggatagaagaaaggaagaagggaagtggaactagagacgggcggatgcatttggatttttgtcagttcgtgcagggagggcatacgcaagtgttggagggattttcgtttacgtgggttgaacaaattgatgtcaacattgtagctatcgagagccaaagttttgtgcaccttctgtgaactgtggcttcgaactagagctagagctgtccttaacattcatctacctcgatgaggactctgttcttagagtttgatgtagtcttaaaatgaaagaatttcatagtattgatctgagctaattcatatttttgtaagatctatatgtgttataaaactagctccgaaatcgacattggtagctaaacgcggaagaaacaccataggagatccaaacacgataatgacaccgagacacgatatttagtaacggagttcagccgcagcctacatcttcggggcactgattacaggtgttcctcttcgatctagcatattacagtgtatcagagctacagcgactcacggccggttgccgccggcagctgctccctctcgctatgctaagttgccatgaagttacaacaagcacacccttctacttatgagagatcctaggatagagtccgactcttactctagtcctaatacctattacaactctaagtcctaaactttaaccgactttgtaaacatattcatcacaaactctaacaaactccacctaacactaacaaacttcaccttgacaaatatatcacgccaacccgaatctgttacttgctcaaacctccgttacatttccagccaacacagtcacctctcacctacaaccatagtccccacgtcttcgcctggtcgtggtcaagatctggacgctggagcttgcctaaccgccaatgcccctagaaagctgccaccgagagcctccaccgctgtcatctccatccgccgtagccaaaccgaccatccaccaccatcgtcatgtgcattcgactgacctgccatcatgaggggagggctagcccccaccgctgccagtgttgccaaccctcaccacgggtgacagtgaagggacgaaggactagtcaatgtctccacccaacggcaccgccgcccaccaagttcaaaggtgacagtggaagggacagcggactagcccccatccccgcccaacactgccgtctaccaagtctgccaccaccgccagtcctctcactgtcgatgagagaggaagggacggcgattagatggttgttactagttgagatgaacaagtatgtagagaaattaaataaaagatagttgtaatttgctgagataaagaaagtaggtgaaaattagctcaatcttggaataaattttgaatgctcaagatgggaaatacatcacctgttctttaggtggacataagaccaccagtaaagttatggtggtgaaaaaggttgacagttggataaattttcatggaaaaaaagagtatattttccttttcgagtagtacggaacactcttttgaagactgaggaagaatgcattttttttctccatgcaaattggatgcacgtccacacactcacacaacccagaactgctatttttggtgcatgcatttccagtaccatacgcactacagtttacacacgtttatatagacgtgaagagaagtgtgtcgctcatcgtggttttatcagacggttgttttatctatagtccatacgatccaagtgtttaaatttttggacgattttgtttatgagaaatttgagttgagaggtcgatagacaaacttgaaaacacaaatcatcttagaatacttaactcttaaagtagcatttcacgctcccacaagattagaaattcaaaactcaaacttaaatcccagaagatacctgatcgatcgatcaaacacgggtgcattaatcgatcgataatttatgtattcaaacacacatcctttatattattcaaatacacagtacaccatatatttatatatgtttccacacattgtcctttattttattcaagcacgcagtacaccatatatttatatatgttgccacacatcatggcccgcaccggtgaacggcggcgacggagcctagctgcagttgggaaaggggatgccgcaggcggcgatcatcttgcgtgcgttggtgctgttgatgtaggacgcgtacgtcgggtctttcgcgtactggcagaagcacccctgctgtgctttcaggctagagcagcacgacgccgacggcgccgtcccgaagaagatcggggccgcgcatggcgacagcagcccggggtcacactgcggc

SEQ ID NO: 9548 - DNA, 51286 bp, Oryza sativa
  unsure (1)..(51286): unsure at all n locations
aaccgcaaacatggacggaatagttcatttggatttgtccattcgtggaaactgatttttttttaaaaaaaattaaagctttcagtctttgcaataactaataaaacatgagaaattttataatatttgagatgtaccaaaatctttaatctaaatttttatttatcggaggtaccaaaatttacagtatattttttgtaccgccttaaaaattataaaatcattcgtaatacatactattatgtaaccataattatttttgtcactaagattcaaaccctgacgaatgaagctgtacgtgcccgattccacgccgcatgaatggtgcttcacataaactgataaattcaagttgcgttttgtttgtttccagagaaaagaaataatcaaatgccactgtcagccacgtattgttttgttcttaattagcaaagcgtgtaaaacacatcccccgctaactaaatgccatcgaaatttctgttcatgtgtttgactgccgtatagtccatgagctttaatctagttattcgatttatcagataggcaagtggtttaaaagacatagttattcaatggtgagtcgaccgaaactaaactcgatttatcatgacataatagacacggttgccacttgccacagaaagaataagagcgctgctacacgtacttaaaagtgaaatacttgcaaaatccttacaaacaataatctgaactgtttgatttaactagacgagagttacagaaaatctatatatactcacagtttgataagagtttagtagaaagaatttcatatttatagcctttttccagaagaaatgatcaaatcaagaagtgaaaccggccggagaaagtctacaccggcaggcccggctcatgcagcccacgttaggaagcctggctgcactgggtggcccaacggtggggtgggccacctcgggccagccgcagcagaatgcatgggccggcccataaatgggccactccaaagcagaccggcgctcagaggtccatcctgatgaatgaacattcatgcaggtgaccggcccaaaataattacagaaacccaaaaattacagaaaaactacgggttgttcatgttataccatttcagaacataccatttttttaaagttgataaatatacgtatccattaagttttttactaataaatacgtaagaaatcctgtcaaaacttggcaatattgctaaattgttgccaaaactttataaggtttattttagctacaatctaaacagaccttatgtatttgctaaaaacttaaaaaaaagtgcagaaaattaggaatttgctcaaaaatatggtaacagtttggaccattagataagcttaatgatttattctagcgagagattcttgctggatgtatgcatgtaaatatattgtaattacaccgtaattatgctatagttatatttgaaatatttttatcttaaagaactgatatgttatatagctacttccgaaaactagcacggaaatgcttttttgaaaaaagaaacatatgttctcctttctgtgtgaataaagcacgagcagttccagttgtatatatatgcgtccaaatatactgtcccgtggtttattcatccaaacgacaaatccttttttctaaaaaaaaattccaacgcattactttcttcccttttctctagcgaaaaaaagaaagcaccgaccaaagtggctcaaaaatggacgcgtccaaagatcgcgctgccacatgacaacggacttcgatgaaattatcgtcaatttttatcaaattccgatcaaatcattcctcgtcggcgtccatcccggatactataggtggacaccttcgagtcgcttctctcttctccggcgacactgccactgccacgcgtccctcccttcctccccgcccaacccccacgtgtgcgtccacgtggcacccgcccatctcacctcctcctcctatatcctcctctcctccgccattgccgcacctcatcacctcctcgtcttcttcttccacctcgcaaatccgatcaacacatcagcttgagaaacaatggacgcgccggccatgctcacgaccaagcacgtccccgaggacgtcggcctccgcaacgtcggtgagtttgcgtgtgtgtgtgattgatttgatcactgtgtacgacgccgtcggcggcggcggcggcggcgacggcgaggttggtgattaatggtgggggtgtttgttgcagcggcggcggaggaggaggggggacaggggcagatgcaccgtggggaggagaagcagcacaagccggtgctcaagaaggtgaaggagaaggtcaagaagatcaagaacaccatcgccggcggcggcggcggcggccacggcgggaacaacggcggcaggcgctagcggaagcagtagcagcagcgaggagggcgaggacgatgtggcggcgcagaggatgggtgacgtggaccagcgcgggtaccaggaggacgtcgaggaggacaagcccgtcgccatggagtccgatcccgaggtccatggcgctccgagtaagctcctgctccgttgatctctctccctgcgtgcggtgccgccgccgccgccgtcgtcgtcgttgtcaggttttgagaacttgtttggttggttgcagtgtacgactcggcgaggatcccctcggtgcaggaggtggagggcgacggcggcgcgccgagggtgcggctcggcgacctcggcggccccgtcgtcgaggacccggcggcgccgcgctccacgacgcgcgtgccgcgggagggggaggacatcggcacgacgcccgtcgtccgcgccttcgagtcgatgagcgtctccgacgacccgaagcacgtcggcgcggccgggaagccggacgccgacgtgcagaacgacccaatgccggtgtcggacgccgccaccgccggtgaggagtggaaggacgcgacgcccgacagcgcagctgcaggcgcgacgcccggcgcgacgtacaccgacaagatcaagtcggcggcggcgggcaccacggagtacggcaagaagctggccaccacggtgtacgagaaggtcgccggcgtcgggacggccgtggccggcaaggtgcggcaggtgacgcagtcggccggcaccgccacaccaggcgtcgccggcggcgccgccggctcacagtcgcaggacgacgtcgacgcctccaccaccctcgcctccggcgagccggcgaccggggggcagcagcagcaggacaagggggtaacagtcaccggctacatcgccgacaagctccgcccgggcgacgaggaccgcgcgctcagcgaggccatctccggcgcggtgcagcggcgcaaggacgacgtggcgcagcgcgttccggccgtggcgccggcggcgccgggcgacacgatcgccaaggtgcgggaggcgcccgcgcaggtgctcgccaaggcgcgcgacgccgtcacgtcgctcaccggcggcacccatgtctccgacaccgtgcagcccaccaccaccacaggtacataaacacaaacatctcaaatttcacttgccattttcgcagccggatcatgagctgatgatcgagttcgttttttttttctctttttcgtgtgatttttttttgcagaggcggatggcgcggaggtggaatcggcgccggtgattcgcggggaggagatcggcgagacccaacgtcagccgaacgtaagcatgacatgaagcgttgtagaaatggatcctctcgtgtgtgtctgtatgttgccacgtatacacgtgtaagtgtaagaaaagtgtcagtgtgcttggaataataagccgttatgtacggcttttgtgtcgatgtgcagtttttgttttttgatgtcttctgtgtgtatgtaagcaagcccgttttgaaaatggccaagttcagttgaaacttgtaatggtttgtggacttgtgatacacactgtttgtttcaactaattgctagtacaaaagtgttcaccgttttcttcctgatcactgatgaaagttcttcagaaaacacactgggaaatttccaatctttgcagctagctatttttcacctgctgagtggcgcccagaagttcattgacgttaatgtccccttttgcttctcttccgagcgattcagaccggtcatctccatgcattgtgtgtgaaagaaactgtgaacagctaatcaaaatcaaggtgcacgccgaaattgccaaatgtaacagatgactacttactccctccgtttcatgagataaatcattctagcactttccacattcatcaagttattatagcccttcttatatttatcacccctccgtttcaccgtgtaaattattttagcacttttcatatttatattgatgaatgtagaaaatgatagaatgacttacattgtgaaacgcaggaagtagcttacaagtgccatgaatatttcgaggtgcgagtgcgacaacgatatcgtgttagatcaccggacgattgagtaattgactaccaacatctccggttcttcctgctgatgcatggcctgaatatgaagcaggaatgatttggatttggacgtttggtccaaagtggcaggacgaagctagagccgtgtgcctgtatgggagtcgagacacttgggtggttgactgtctgaccccatgattttggaaacaaccttctttactgcgtctctttacaataaataatcctacaagtgaattttaacatccgatacataattccagatcgatattgaagtcctataattagtttcataaaaccatattgttaactatcttgcgagacccaatttttcctcttcttttttgggactttgagttactactatagcaaatagcacagataataaatgaaatgcttaccttgttactgtggccaaaataataataaaatgattatcttaagtggctaaggcttacaatgaattgaaagaattcataaatttaatttaactttagagcttatggtggatgaaaaaaagaattagtcgatgacgtggttttatgaaactttagaatcataataatactatgtttattgttacgtgtcaacttttatttatgtaaagagttatagtactaggctaatttatttcctcaccattttcaacttctacctttcgtttttcacgcgcatatgctttttgaactgctaaactgtgtcttttttttctttgcaaagttttaggtattccaatataggtacttctaaggaggttcgctagtactcagaaacccaggaggccaggcagtgaaacgttccgcagactgctcacccggccacacctcggagccgatgaaggctggcaatacaagcatcatatagaaatgttgccttaaaaaacatattaatctaatttttaagtttattttagttaatacagtattaaattaatcatgtgcaaataagttgtttcgttcgcgtgcgcgtaggattaaggtccctacatgttttgtccaacccagcctaagatatttctttttttttttgtaaaagtgttttctaaaagggcttaattgtgaaaactacccaaacatgggcctcgtagcccaacacaagataccatttcggcccagacaaaaaatcgattcgctaccagtagcggcccagtacggcgccggcggtgccgaagccgaaaatttccatccctcgcagtcgcagcagccacctctcgccaaactccctcttcgcgccgccgcccgccattgccgccgccaccaccaccgtgcccgagctcgccgaccaccaccccgccgtggctcgcgcgagatgcgttcacgcgagcccctgagcgctccctcgcaatgaacccgggcgctcgcccgcccgcgttgcagacgctctccgcccgcctctggccgcgcaggcggctctgcggagtccacgcggggagccggagcgggggcgaggggcctggagctagggagagtggtggtggtgacgttcgcattggaaggggggaggaggaggaggagggagggttggatggcggacgcgtcccgcaggaagtgctgctccggctgccgacgccgcccggccgggctgagaccgacgacgatgatggcgaaaacttgtcccctggcgcggggtccggttccaggaggaggttctttgaggagctgaggttgaaggcggataggattgtcaagatcctgcttcaggatggcccggggttcaacacccgccaggcgctcgacgaaatgcgcccgagggtgtccaatgcccttgtgagggaagtgctgctcaaatttgttgtctcgatcgatggcgtgaaccgcgctaggtacccgaggctggcttacaagttcttcctgtgggcggaggaacaggaggggtaccggcacggcacgagcatgtacaacctcatcttgaagatctttgcggagtgtggggagctcaaggcgatgtggcggctgcttgaggatatgacagataaggggctgcctgtgtcttcccggacgttccacctcttggtatgcacatcggggcgggctggattgaggcggaggctggtggagaggttcatcaagtcaagtaatttcaattatcgcccatttaggaattcattcaatgcgatactgcacactctgctgaccatagagcagtattcgttgattgagtgggttcaccagaaaatgatcgccgaggggcactcacctgatgttttgacatacaacgtggtgatgcgtgccaagtatatgctcaggaaattggatcagttccataagttgcttgatgagatgggaaaaaatgggcttgcacctgacctctatacgtacaatcttttgcttcatgtgcttggtaaaggagacaaaccacttgctgctctcaatttactgaactatatgagcgatgttggctgtgtaccgactgtgctccatttcacaaacttgatagatggtctcagccgtgctggcaacctagaagcttgcaagtatttcttcgatgagatggtcaagaaagggtgtcaaccagatgttgtttgctacacagttatgatcacaggttatgtggcagctggggaattcgatgaagcccagaagttcttcgatgatatgttgctgagagggcagcttccgaatgtgtacacatacaattccatgatatgcggactttgcatagtaggagaatttgataaagcatgctctctgctgaaggacatggagtcgcgaggatgcactccaaactttacagtgtatagtactctagtgagtaggttgcgaaatgctgggaaggattctgaagctaacaatatcattcagtacatgacaaataagggtcattatcttcatttattgtcaaggttcaggagatatagaagatgctgatatgtgaggccccatagtcagttacattgtaattttgttgtattgtttccaacttggaaagatggatcataagggagtactttgtgaggtaaccattcgcactctaactgttactctagcacatagggttccttatctatttattcagtacagaaatgcaacactgtatacttaaactgttttacgcactaatggaatgggataggatggggtggcctggcgtgtcctaaatcctaaccgactcatgatggaggagttcaaccctgatttactagtcctaaataggaaacccaaccttagttctgttgcaatgtagtacacaatatttgatttacttccacttctggtctcctgaaccagattacatccaatcttttgttttcaatatactttttacagtgccaagaacttatgctcaacaaaatatggggcatatcattttgctaaattacaacagaacttaggcttttgattcggttggatgcaaagcacaccgtatttctctcaattctcatttctgtcaaccctagcataggtttagcttagtggattatatgtcatagatcagataagatccatataaacattgtgcattatcttgcagcactaagagatgaaaagcctatgcaatcttgtcccttaatgatgctctttaggtcattagcatctctcgtcacagattgcttttatcattatgcatttatgtaatgtatgattaaaaattctcagtgtcttaaaaagatagcaacaaattaacacaccgttaagactgcctccagtcacaaataagtgacatttttggcagcgacaaagtctccaaacacagccacaacttctaatatctattgtgatatattatacacacggtaaaatgctatataaaatagaaatatttaagcaaaatatacacacaccattttcgcatgtccagtttaagtatttatagagatagcgattgttaagctcttaatgtttggttgcatctaccctggcctgaatcaccactatcttttactggaggggatattaaatattgtttaagtcagtttcaaccttggtatctctgactctggtcatccattattttttgttggaaaaaaatatttgaattaatcaatacgataggtacaggcctgcaaagattcatcaaattagcaatgttctctaagttcttttagttgccaaattgactttggcatcataaacataaagcattaaagttgatgatattgtcatatgtgaagacaaattgctgagttacagcgtgttgatgttaatagagcaattgacaggttgtaattttttttttgtaactgtaagcaatattacttacgtgtaccaatatgttctttacagtattatggtacagagtaatttcacataaaacatcgatcaaaagtccaaggtattggctgtttcacttgcagatgggagagacactatgcaatggtgttatatatttcataattttatcatttcttctcttctttcttttcctctttcttctcctccttcttctcttccttcttctcttctttcttctcctctttcttttcttccttcttctcttcttttgcaggtccaacagacacaatgtcaatcttcccaatcttctttaacttctttgcaattgccactgtgtccatttcaccgatgatggtcatcttattgtccttcaaatctgcagctatggaatcgatacctgtacatgaaatgaggtgtgtaatgcattagattttcttgttgacacagtaatagtttatcttacaaaatacttctttgaagatccaatcttgcatcattacatgttcagctgataatacatgatgtggagcatccagttcttttgtctaacctttagaaactaatgtacagttgttcaccgcaaacagcacatattaataatcccatacataggggggaaatcattccgtatgcctaactatatcatcgatcgtcatcttcattgtgttatgtgatgtaacaaacaatttccaccttacatgatatctcttatcaaacctctgcctaaaaccatgctaatgcttccaaatgtgatttgcagatgttttttgaatcagagatcaaaacatatttttcaagtttcagcagccaaagaagaaaggggatggtacagaatgttaccgtagatgtctgcaacggcttcaatggctttctgcttaatcttgtcgtcggtcatggttggaaccctcagcaccaccttctgctgagaattatcatccgacgacacgaaggcgtgaaccgccgaaggaatcagggaattgaaccataaacaagagttgcacttgcttacctgagccatctggaagctgtgaatggagtggaggaggggaaaggcttaatgttctgctgaggtatgaacaatgagaagaaaccaaggctggtgatggcaccggccgggcacctttatatgcaaagggtgcaagtgtgctgtcactattctggaagaaaccatatcaccaattccattcagcactggtatttatttctctttctccacccaattggtgtttggcgatgagtcagcagccaagccaggccagtttctgtttgctgcaagtgaccagtttattcatccgtccgtctcgtcgatatctgatgcgttggagatgaggtacgcaaaaatactttcaactctttcggccgctgccagtttcaattggttcactcatccctggcttttctttctgatcaaaattgttgtgatgtccctttccatccattcctgaacatgcctttgctacgtaggattgcagggtcggtcagtgtcctggtgcgaccgtgggacgggtcagtgccaaccgccacgccggcacccggcgcgcactgacgcgagacgacgggattctgtccatggagagaagtggtggtggactggcgtgagagtgcgggggcggcagctagtgacgggacggcggcggcgtggtggcgacgacgtccagacatctctagtaaagcggcaaaagcgggtgaggatcatctaccataatgtcgctatcattataatcactgaatacaaaaggacgagaaggttgcagcggcttggaggttggaagaaaaatggcagggctgttcgcctctcaagtctcaacgttggttggtagtggggcagtgaggctcaggagcatcgagcagacatgcgaccgtgtgagtgacatgatccagaggaatttcttcgcttcttttactggaggatctagaagaatttggtttgtttggttttggtgtttggcagtattggcacagcgcatgattgaaactaaaagtgttttgtgaaaaggatggaagctcacaactgatccctttcaggcttgagtacacgagaacgtgcacaattgggccgggcgtgtttttgttggtgggcctgttcttgaacctgatgggctttgctggctgggctgggctaccacgagttcatgagtggggtgatatacagggtcagtcagtcattgtctcctcgttgcattcgttttatcttgtgaaactatagtgccaaagaaagattcaacggtacgaattccatggcgacatgtatgtatatgtggtttgacaaatacacctcttcatggacgggtgcaaatttctgctccagcattacggatctgaaagtgagactagcagttttggaaatacagatttttgaccaactcgaaatgcaggcaaaacttggctatcaagtttgcccccccagccaacttggctcccaagttttaccggaccgaagacacgcaatttgcaaataaggcggtggttcgttgggccttttctgccgcataatcagttttctgtttgcaccttttaacgcataacctcaaattatttgtttccactaggatacttaaaaaaaatctctctaacaaagttctcaactctttgatttacgagatggtgggggttatagggaatacaggccacatcagcgttgagttttgttttttaaaaaaatgcacctataataagtctataaccacaaaaaaaaagccacattttcgtaacttccacaatgtccacctataaagttgcaaaaatatggtaaggtctcactcaaatcatacgtagtatgtctttgtatttttatttatttatttataaaataataactcgttataaaatttggtaatacctaagtagattacttttcgggaaaaccaaacataccattatatttactgatcggatttccctcaaaaaaaaaaatactgatcggatatatcaatcccagccaaagcctacctcgcagccgcagccgcagccgcgcggccttcgtctccgcgagtcgcgaggagcgccgccgccgtcgtcgccgtcgccggtggcaacgccgccgtgtctttttctccacacacacccctttcccgatcgattccgccgcctactccgatcaagcaaggtaattaattagtgtgatcatgcctgcatccatcacaaaaccgtcaataccactttgtcatccgattccaattgatacttccgtttccgactcttggaagcaagaacgccctattaatttgggagaaggccactccggccggcgacgcgcggggctgcttccatctcgctccggaggcaatgactatcaccggcgccatggagaaggtgagtgctcgtataatatactccctccttccctaaatgtttaacgctgctgacttttttaaacatgtttgaccatttgtcttatttaaaaaattatataaaatatgtaaaactatatgtatacataaaagtatatttaacaataaattaaatgatagaaaaagaattaataattacttaaatttttcaaataagacgaacggtcaaacatttttaaaaaagtcaatggtgtcaaacattttgggatggagggagtattagattagaaatttcttgtgggagtgctcgtatgtttgtctggtacgcaagcagtaagattgaatggcttaattaataatacctacagtacacacaatagattaaaaacaaacaatgtagcttgtatttctgcgttagcattgcgctgctttggttaattcctcgcaaaaacagctctttgttttggtctgatgcatttgatatgatgttgtgtgttggtggcttggtgcagccactcgatgagaaggagctggaaaggaagctgaagaaagatcagaaggtactcactctagtaggattgctgttatgtacttctgttaacaattcaaaggaatcgtgtccagttcaccagttgtttggtgtatgaataagtgtgttatgtatgtaataggcaagagagaaggaggagaagaggctcaaggcgaagcaaaaggaggcgattaggctacaggtgttaaaaataatccctgctcagataaatgtgttttactgtcaattctttgtattgatgtggttgtctgcaggcacaagcagcatctgatgaaacaaagaagagcgacaagaaacaaaagaagaaaggcacaccggatgagaatcctgaggatttcgtcgacccggatactcctgctgggcagaagaagctgcttgcttctcaaatggccaaacaatataatccagctgctgttgagaaatcgtaccgcctctcttgctttattcctcgatttaatttattttcaatgaggatatatctttcatatcgttagaaccttaggaattcataacatgaaatttctcacttatctgtccttttttccggtatgttgttttcatgtagatggtattcttggtgggaatcatctcaatattttgtagcagatgcgacgagttctaaaccaccatttgtaatagtaagtccactataatgcaaagagtgcatgattatatatttgtattcaggataaatactttatcatgattactgtgtgagtagtatgtcctatatgaaatacacaattgaagctttatttctacttctcattttgcatttgcaatgtttatttttccagatcttgccacctcctaatgtaactggggtccttcatataggccatgcgattacagtagcaattgaggtatttattgattgattctcctgtttattcattggccatataagcatcagtattgatgtctttttggttgttgcatcgtgaacaattcaggatgctatgattcgctggcggaggatgtcgggctataacgctttgtgggttcctggaatggaccatgctggcatagctacacaggtctgtcatgcatataacatatatatggtatctgtttctaacatataacctctacaggaattattgttaacttgaatacaaattgacttttgctgaaacatcacattgattgttaaccaactttctgttttagtttttaagggtagcaggctttatgtaacaaaatttctcttcatatcaggtggttgtggaaaaaaggcttatgcgtgacagaaacctgtcaagacatgatctggggcgtgataaatttctattggaggtaatcatttttttcttacctattgcatattgtattaacttcacagttagtttcatttttatttatttttttcattcttcaatcttcttggcaggtcctccaatggaaagatcagcatggtggtaccatattgaaacaattacgtacacttggagcctcacttgattggtcacgcgaggtataatttgttttgatttcccctaaggttgtagacagccagaggagagcaccatttatatctaagcaatatattttgttgaataaatatgacaaaactccagacattatggttcagattgcacaaaaccacatgttttttggcatgttgcacataaccaaaggcattatggtcctataattggttaatggtgtggtttagtgaaatcttaataccataatatttgtggttatgtgcgatgtgccaaaactctgagttttgtgcaacttgaaccatacctggggtatataaaatgtattcatatattgttttgctttgttgttaaatagtattgattttcttgcaacttgtttcagtgttttacaatggatgagaagagatcaaaagctgtaacagaagcttttatcagactgcacaaagaaggcctaatatataggtcagtgtcaaaatatcgttgaatgtgtagtttaactttctatatttgttctgcttcagtaattttctattcgaattgtgtgtttcttagtttatgttttcttactgcagcacatcttactttgtaaattctgtatgatttacttgcagggataatcgcattgtaaactgggattgctcacttcgtactgcaatttcagatattaaggtatacgatacttctaatatgattaacattttgatttgttgatgaggaggattgtatttttatgttttgctcgctacttttcaggttgactattgtgaacttacagaagagactttgttagaggtccctggatgtagcactcttgtccagttcggtgttataataaattttgcttatcctctaaaggaagggttgggtgaaattatcgttgcaacaacaagaatagaaacaatgcttggtgatactgcaatagctgttcatcctcaggatgaaagatacaagcgtttgcatggaaaacatgctctccatccctttaatggccggaaactcaaaataatttgtgactccaagttagtggatcccagttttggtacaggagctgtcaaggtaagtgtactcactgaaggagtgtctcgtatatcttaattttattttccatacctggattgattatattcatcaatcagcaagctcttatttcttttttctattttgctgttgtttccatacagatcacgccagctcatgatcttgatgacttcaacactggcaaacgacataaacttgagttcattaatattttcacagatgatgggaacataaatgaaaacggaggtccacaatttgaaggaatgccacgtttcactgctcgggctgctattattgatgcactaaaggcaaaggtattattagattatttagttttccatttccttttctaattaattcctcgatggtattgtagtctctcacaatttcagatggtttattatcatgctttttatggaatttattttacatttatcttctctctctctctctctctctttctctctctctcaatggtgcattgatgtattgtcactttgtcactttattagtttctcacaatgaaatactattgttctctatgaaaaacattatgatattgggatactgttgagtgttgctattatgttctgaaagcatctagagtatggttaagctatgaatataccattcagctttgttcttgagttggcatactgattaatcttttagttttatttggaaatttcatcttgttgcctgcttaactatctttcatgtgccaccagtactttcctgtattctattgtcttagaagaaatgccaaattacaatcatttacaccttttcaattaagggtctatacagaggcacagaaaataataagatgcgcttgggccgttgttcaagaactaaagatattgtggagccaatgatgaagccccaatggtttgtcgattgtagtactatggcaaaggcagctcttgatgctgtgaaaactaaaaggatcgagatcattccaatacaatacgagcaagactggtataggtatatcctattttcttttctttaggaaaacataattggtaaatcgcaacattggatagtagaataacccattcacttctactgttctgtggtaacagatggcttgaaaacatacgtgattggtgtatttcaagacagctttggtggggacaccgtataccagcttggtatgtaacgctagaagatgatgaggagaaagacataggttcttacattgatcactggataattgcaagaaatgaaagtgatgcaatcctggaggcaaagcagaggtatccagggaaaaattataagttagaccaagatcctgatgtgctggatacatggttttcatctggtcttttcccattgtctgtgcttggttggccagacagcacagctgatcttagttcattctaccctacttctgtacttgaaactggactggatatcctcttcttttgggtagcacggatggtgatgatgggaatgctacttggtggtgatgtgccatttcagaaggtaatatttaggttatttcattcttaaatagttcttggtcaaatctgttagattctagtgatagtgatagttcagtatgattgccttctaaaattatttgatatcattttaagtttggtaacttagcttttggtccttgtcgaatcatgttaacttttctatgctaaaaatgaatcaatcattaacacgcggttagaaacttcacaagtactagtaatttttaaaccgtgactcatgactgcttatctgtctcaggtttacttgcatccaattatccgcgatccacatggccgcaaaatggcgaagtgcctaggaaatgtcattgatcccattgatgtaataaatggtatatcacttgaagatctcgggaaaaagttggaacatggcaatcttgatccaagtgagttagaaaaggcgaaagaaggtcagaagaaggatttccctaatggcattccagagtgtggtactgatgcccttcgttttgccctgatctcctacacttctcaggtaaattttcccaccagcttttgttgttccttttactgttagtaaaaatttcttgtagtaacatttcttgtcttgttcagtctgacaaaataaatctggatatcaagagagtgcacggatacagacaatggtgcaataaactgtggaatgccgtccgttttgccatgaacaagcttggagatcaatacactccaccagcggctattgcgttgtgttctatgccacctctctgcaaatggatactctcagcacttaacaaggctgttggcaagactgtttcatcgatggaagcatgtaaattctccgaggccacatcgtctatgtactcttggtggcagtaccaactttgcgatgtatttatagaagccgtaaaaccttacttcaatcaatctcaagagttggaatctgaaagaggtgcttgtcgtgatacattatggatatgtctggataccggtttgcggttgctccacccgttcatgccttacataacggaggagctttggcagcgccttcctcagcctaaagaggcttgtaggaaagattccataatgatatctgagtacccctcagttgttcaggtaaatacatacttcgtactgactttggaaaaaaaaatgaattcttctagcttgtaacttttcagagatcagtatggtagagtcctattgcataacgattaaaagcaaaccactgtaaattctagcactataatcaatatatgtaaaaatgatgaagaaatgattaatgcattgtctgcctcagttggagagaccatagatttaagaaattctgcaatcctatgaaaaaaaaaattctgcaatgcctattttgactagaggttttcttttgacggatgacaggaatggacaaatgatcaagttgaaaatgaaatggagactgtgttggattctgtgaacaagctaagatctcttcggccacatacagatatacatgaaaggtatgcttatgttcaccagatgtatattcttttggtgtgcttcaagactgtcacttcctttttatagttttattcttattttgattcataagaatttgttcattttgaagctaataccttctgccctattttcatctggacagacggcctgcttttatgctctgccgtggggtagacattgctgccattattcagtgctaccaggcgcagatttcaactcttgcttctgtttcatctcttaaggtttgctcggtcttatacctctctggctctctcaactcggccactcacctcaagtcactgtttatgaatgccttgttcttgatggataatggcataatttctatttctatttcaattcaattcactcgagttttgtctacagatgtgcttatatttttgctaatatattttatgtctaaaatgcctaaaaagccaaaaaaaaaggagggaaaaaactgattcaaagggaacttttgcagatactgacagaggatgatccaactccacccaactgtgccacaaatattgtcaacaaagatctatccgtatacctccagctacgaggagctctaaacactgaagctgagcgtgagaagctaaggaaaaagcgagatgagattcaaaagtaagtgccctgttaaaccatctgaacataaatttgaacgaaccaatttgaacataaatgaaatttgtagttttgttagtggtaagacgttctatttcccactgtaattgcaggcaacacgacaccttgtcgcagaaaatgaatgcctcaggctatcgcgagaaggctcctcagagcaagcaagatgaggacatgaaaaagattgctgcattactggaggaacttgagatcattagagaagccgaaagtgaactagaatcaaacaactgaaagggttttgatgtatagctttttaatgacctactgtgacttgtacgaacgcaggtgattggcatattttatgaactcaagcaagctcgctttcagcttgtagggatcaagaaacacttccactttgtaaatccattcgttctttatattttaaaggaatgaaaggaaaattttctgttgatgtccatcataatttggccttctcttgaccttttgtttaaactaggtctaggtcacgcgcttcctcttctccccctccccatccggccgtttcaggccttgttaggttacatggccaggattcgttccgggccggaaataatagaaataatagatataacaaaaaatttataataggtagaacaaaagaaatttatagtaggtataacaagagaccaggatttattcatggtcggaaactaatatactcatattaagtacaacaaaacatccagattagttccatactgacatctaggccgtgtttagtttcaattttttttttcaaactttcaacttttctatcacatcaaaactatcttacccacataaactttcaacttttccgtcacatcattccaatttcaaccaaacttctaattttagcgtgaactaaacatagccctagattagttctatacgcgtgaactaaacacagccctagattagttctataattcttggctagtggatgattctttctatacttcttagctagtggattgattcccgttctcttatttcttgctagtcatttccggcccgaatttgaatccgggcataaccgaacaaggcctagggatccctcgccgcgtgtccttccgcagcgtgccctccggtgatgccgccgcatgaagacaccctcgatgccggcggcggcgacgtgctcaccttcaggctccaccccctcgccgtcttgaaattatccgaccgcatccgcgagttccagtaccaggcggcggcggcggcgcgcgtcagttacagctcctcctcctcctcgtcttccgggacggcggcgccggaggatcctcctcctcctcctactcggatgtctgggtgcgtgatcggggttcggcgtggtgggacggtggatgtctccgacatcttggacatcttgatcttgcacggccccgaccccgcaaccttcgaccgcgccttactggagaaggatcaggagatctgtaactaaagctgctagctacccccaagtcctcccgtcatttttaggatccatcgattataatttgtgggtggttaatttgatttgtgtttcttgcggttcagacaagaaggccttccccgacttgtccgttctcgggtggtactccattgggaccaatgtgcacgccaccgacatgggaatccaccatggggactacaccgacatgcaaatccaccagacagtgagttttttttataaccatttaaatcaactctatttgttcgagtgctaaatatatcacactctcatttggcttgtgctttagtgtttggtcttattatgaacaaaatgtggggtattcgggtgtaattcgctgttagtatacttaccactagttgatggtagttgagatgttcagtggacaacaattctgatttaatgagtggagtgtctgctggaaatcctgttgcgagaacacccttgccccgaaacgccacgtgtccgagtttccctttccgagtaagggcccctttaaatcacaggattaagaaaatctagaaatagaaaaaacgtaggattttgataggaatgtaagtgtaaaacagatgattgcaaaacacaggaaaaacacaggaatgaccgtttgattgaaatacaggaaaaacgcaggaattggatgagagagatagactcaaaggaaagttaccaggaggttgaaactcttgctaaattttctccaaaatctctataggatttccattccataagaattttaaaggattggatatgattcaatcctttgtttcaaagggcttcataggaaattttcctataggattaaaatcctccaaaattcctatgtttttcctccaaatcaaaggggtcctaagctttgttagacacgtgcttatctacacgtagagaaagcagctattctgttgtctagcatgaccatgcatagctttagcacagctttagatgagttttcatgcatttttttctaccttatgaatatgtagtctgatagaaagtaattgtgtaaaagttcttgatatgaatgttccgattgctgaatacaattcatattggaagtcttttaaggcatcacccaaagctaactggctacctgctgaaagtttcttttcatcctgttggaaatcgcctaatagaaagtttccccgttgaatgtctcctagtagaaagttttaccattggaagtctcctaatagaaagtttcactgttgaaagtctcctaacagaaaattttcttctccatataaaatgcattttttaactttgatggaaatctgcttctactcttttcagaaccctaagtgaaattgattgattacacactaagaaaaagcaaaataaattattttccatgcaagccaagcagtgaatttgtgtattaaaaaaaatcccagtggctactggtttgaatgcaaacaaaaaaaaaaggcgtatcatgaacttagcttgcaacaagaggaaaatgataagagttccttgctcatgcaaacactcacatccacgtaccatatttttattcaatccattatatttcgcatatttatacttacaacataagttgataaagtcttttagtgcttgtggaaggttggggactccctcattatagtatgcgtaaagtgcatagccggtccctaaacttgtacgactgagtcatttgagtccccaaactctcaaaatgcatatatccaaatcccaaaacttgttaaattgtgtcaatccgatcacaaactgccatgacacctccaggatcctacatggcatgccacacggacgatgatgtggcagcatcacaaattctacaccaactgacaaatgggccccaataaaaaactttttttaatatccttttctgttcattcccatcttgtcctttcttcgtttctcctcttttcttcctactgcattgaccgtagccatggcctctggtcgagctgcctcttcgatgacatgaacagcggtgcgtccatgggcaagaaggcaccggcgcgacagccgtgtcgacggaggcgctgcagcgtgtgggcagcggtgccagcgcggtgatggacgcggttgtgtcctgggcatcgaggagactccggccgggagcggcgcgactgcgtgtggctcggcacgtttaccagcgaggccgaggcggggcacgcctacgatgttgcggcacggcagttccgcggccatgacacagtcaccaacttccgcccctcgtcaagtctgacccgaaggctgccgtcgagctctgtttcttcgcctcccggtcaaaggccgaggtcatcgacatgctccgcaagcacagctacctcaaggagctcgttgttgagctcgcgacgacgtggcggcggcggcagcagggcgagctcgtggcaggagcgcccgtcgcggtggcgacggcggtgcgaggcccacggcggtggcggcgtcagccgtcggcaggagctcctggaggtggtgctgtcggcggcggtggctgccgacggcggccgcggtatccggagcgtccacagcggctcacggccggtctgggtgtggccgagtgttggtcggctagcaacgtctgttggcgacagcggcggcggtgtggtcgtggcagttggcggcggcggttgctagctgcttggtggtggagggcgacggcgcagcggcggtttgcggaggcggtggctcgcgtcggtggcagcggcgacggcggccatgactgtggaggcagtggcgatgtcggcggcggggatggtgacggcgaggtggctgagcgttcggcagcagcggctgcggtggtggtgaccgtgtctgcggtcatcagaggcatggcggcctcggatggcttgccgagggcgtgggagacggctgcaactggccggcgcggcatcgtttggtggaggggtcggagaccggcttggcgcagagaagcgcagccgatggcagcggaggccggctcggcacgagaggcgcgggcggcggagatggaggccggcttggcgcgagaggcgcggccgatggagggaggccggattggcgcgagagacgcgtccggcagaggaggctggcctggcgcagataggtacggccggcggtggaggaggcgacctaggtgtgaggaggagctgccggtgggtgtggagcagtctttggcgcacgaaggctggccgccggggggtgctggtgcaggggtcccacatgtcggcagagctagtgttgtggtggagcattggtgcgtcagtcgtggattcgcaggtggtgagcggtgggtgaaaacctagtccggccttggccggaccgacaacgatggttcattccccctcctgagggcgttgtcgtgctgtctcacccctcaagggtgtttgccgggtgaaagcccagtcttggctccttggagtcctgatggacggctgtggcggtcttccgtcgcttctcttcttgaagacgtcgttttggcatccccttgggggcaatctcatctgtgtccctttgttggtctagtggcggtcggtcccgcttagcggcggccgttccggtgctagccttctcctaggcttgtgtgttggtgatgtcggtgtgtgggtggtggtataattttttctttttcctggctacgaccctccagggtcgtaatcttgtattttttttccctgctctatcaatagaacttcacaccgtctcgtgcgagtcgttcaaaaaaaaaacaagtgcgccttcacctccatctcccatcacctgttcgacaagatggtgatcccgaagcaaccagaccccgaagaggccacgtcgccgcctgccaccgccgtcggtactggtgttgcgcatggtacacggcctgctcaagaacggcggcagtggcgttgtcgtcgccgcgagggtggcgaggttggtttgccgttgcgcttgccgtcggcggagccgttctggccgaagcttagggttattgccgctggctttgacttcggaattcgtcgccatcgtcgatccttatccgaaattgaggtctctctcatcttctccatgccaaactccctccttcccctctcctccccgtgccgtcctgctgttggagctcaccggcaaggtacccgtgtgccgcggtgccgcctacctgttcggccgccattgtgtcagcacgatgcgccgccgctaggcgtccccgcccaagccgagaacacctccaggctccagctccaagttgacgccctgatgctcctaggcagccagccgtgcccagtcggaagctcgccggagcgccgctacttcgcatgcccccgccgcttgtacaacaaaaaaaagagagagaaatagagaagagaaaggaaaaaaaagtgaaaggagaaagagaaaaaggaggaaaagagagtttttaagtgggtcctatttgtcagtcaatgtataggtattgatgaggccacatcagcgtccgtgtggcatgccacgttagcgccatgtaggatgccggaatggtggtggctatgttggaccaaaatgacatactttagcaagttttgggacttgaatctgtattttttgagttcggggacccagatggcacaatgacacaagtttagggaccgggtatgtagtttactcttattattgatggtcggtaaccacttgccataacctaatcaatgtaaacacattttgcttctaataaggttgtattcaaagtttaacatttgaggatacaatgttcactcctgtgagaatgaaaactgaaatttttgatgaggtaacatggcattgggatatagttttagcattagtttaagttcttggagagtctgagtttaacaagtatgcggaatgattacggctgatgaaatagccagcaataattgttatgttgggatgtacactgttcttaaactttatgtagagctctagcttgttttgttggatggatggaatggtggaaattgattttggctgagaatatatggttgagagaatatttgtcaaaatggatgtttgtttgatctaattttactccctgcataacctttcccttgtactatttttatgtagttgatggatgctaatggaacagccttttatcttctattaaatcctgcaatcaacttttcccagaaggatatccctgtgactatttatgaaagaggtaagaatcattgaatgtatcacaatgtccctgcaaaaaagaatgtattgatttctcttgatccttggttccaccctgaatcagttatgatacttgagggggtttatatgtgctgcattgactgtcaaggtttgattttgcgtatgtatcagatatgcatgacttttgtgaatctttcctcgtgtgtaaactaccaagtttagcattcaacatcttagtgaattgcatgctgattaactttattgtttagagcagcaaatgatagttatttagcgagctgaagattaactttattttgcttctgcaatttcaagtgttgtgccattccaatgggagtcccccggtcatctttgtccaaggaaactatacagttgaagtttgtattctccccatgtgtttgtttagttacaaatactacttacaaacactacaagcatgttttattgaagattgtaggggtagagaggatatctttagaccatgctgattttgtctatccaagtccatgcgtagttttcgatgttcttgcgccacctcttggaaaagagtaagtacaaattttatttccttcctatgagatatgacttgaatcaccttacaagtaaatgtgggatataaaacttcacaaacaaaacaagtttaatactgtggggctgtttggtaggttcagtgttttgggctgtgttgcacagccccaccatttggctagagtaggcatagctttgtgctcgccatttttgaatgcgaacaaacgctgttgcaggtaactactttgtgctggctacagccgctttaggctctgtaaatatagatttgtttcctcttcttgtcacatatgccttgaatctacggaaatgctatataccgggatcccgtcgggatgggatcccttcgtccccttgcctaatccaaagaggagtgagagctgagcgcacgcctgagccatgaggaggaggtggctgcccgcgaggacctccggcgagggccggggaagaggacccgctcgacgagaggaggacgcggccgccagcgacgagccctgcgcagtgagctcgaggaccttgtctgggtcgcgtcgaggcaatggcgcgtcgcggccgagccagtggcaggggagacatcgacgaagagagggagggcggctgcggccggagctacgggaggggcggctgcggccggagctacgggaggggcagcggcggtagtagccggagttgggaaagggagcggcggcggcagtcggagccatgggagggaggggcggcggtggtggtagccgggggagggagcggcggcggtggtagccggagccaggggagggagggacggcggtggttggagttacgggaggaaggggtagggcgacggcggtagccggagccgagaaagggagcggcggcagtggctagagccaggggagggaggggcggtagtggttgttggcgtcagcgccgggtaggtgtccggcttctgatacccattagaaatcacctgatatctagtaagtagcgcctgatatctcataggtatcacttgataagaatcgtatgataccttacaggtattacctgatacttcgcaagtatcacatgatacgtgataggaatcgcctaataccttataggtatcaggtatcacctgatacctcgcaagtatcggcttatacctaacatgtatcaggtataaccatcaagtatcaagcaattcctaccacgtatcagggatacttgcgaggtatcagatgatatctatcaggtatcatgcgattcttaccacgtatcaggtgattacttccgaggtatcagatgatacctatcaggtatcatgcgattcgtaccacgcagagggtgatacttgcaaggtatcaggtcctgatacggtatccggtatcgggtgatacctaccaggtatcgtgcgattctaccacgtatcaggtatcagacgattcttatcacgtatcaggcgatactcgcaaggtatcatgtgatacttatcaggtatcgcgcgatttctacgacgtatcggggtgatacttgcgaggtatcatatgatacctactagatattaggagctgggcatcgaggcgtcgttgccggcggccgcgtcctcccctgtccacgctccacaccgaacccgaacctcgtcgccggcagccgcatcctcccccgtccacggtccacatcggagctcatcgccggcgaccgcatcctccgtcgggagctcgtcaccggcggccgcgtccgtcgtccacgccttagccggcggccgcgtcctccacgccgaagctcgtcgccggtgccgttgccatcaccacacaggatcctccaccgtccacgccccacgtcagagctcgtcgccggcgccatctttatcaccaacaggatcctttgccgtccatgcgaccatgccccacgccggagctcgccggcggccgcgtccgcgccgccggtgtcagcctcgtctgcgctactcccacggaggcccgcgctctcgcgtctgagggaggtggagagggagcgatcccgttgggacagtatcccaacgggattccggtatatagcagccccctgaatctaaattactaaatttataaaatcgcaacaaaacaggctaatttactaaattactttggtcttgtacttgcagaaaaaatgcatttaggacgatgctgtttgaaaccccttcgggatttgtaatgttccgtgtttcagatgttttgtttagatatcctgaggtatgtataacttttcattcaccctagtgtgatgcataattcatttttcttctgttacatttaggccctacaccttatctgattttcctttccttttgtaggacatatggtcgagttttactgatccacgtaccgcacaccaggtacattttaactcctaaatttcctttcatgctttttgtttgtttatatctatttatcgatttattgttttttgcacctttactatctatgtacatcctaaccattactgttttatttttttttgcacctttactgtaaaagtacatcctaagccaactaattattgctttattattttttgcatcttaactgtacatgtaaatcctaagcctttaaatgtgtttcatacaattctatttgtatgtcatttgttctcttggttttattaagatcctaagcctttaaatgcatctatttgtaggctgttcgtaccattggttttattgaggttggtaacaaatctcttgtatgggataaggatattggtcctggcgaggatttagaacaatttatcctaaaattcccaattacaaaatcattggttgttccaaacgcacagcttaaattcgttattgagaaaaaacttggaagtttacatctaccctaatgtattttaatgttgatgtttatttaatttttttgttagtgtggaattattaatgtttccctgttatatatttcttttttcagaacattggctgttggtttaatgggcgtattgttcctgagttgatttggggactaaattatgccctggatgaatttgtgcctcaagagaagggcaacctatcaaatgaatgccattttccactgagcaagcaattgcatgagcagttaaaagcatatggatttagtatctcaccacaattagtatgttttctcctttgctaatattgttattattctctgctgaccatccttttattgttttcttccttggtctgttgtgttaccttatttatttatttattgttttgtgttaccttatccttttattgtttaatcccttaaaatatttgctactgtactatctgttgggttaccttacccattattgtttaatcccttgcatatttcttgctattgttgtgttgccttattattttatccttttcattttagattaacagagagtttataaccagtttcggttacttaaattatctggaacgtacttcgaagaacatttccggggatttacaccagaaatttgatcgtttcttttgtggacttgagatgtctgagggagtgtttgtaaaagttgttgcggaccgtctctgttccatggaggtcagtagatttgctaaaagcaaatagtactaataattaagtggtggctactgatgaacaatttattttctttgttttctgtaggaagtggcatcaacaccaggcagacgagaggcattgagcaacgctgaatttcttttgacggttcctaagaagaagtataacacattatctcgtcttaagcgtatggaggcagaagttaggggttcagggccttgggttttcgtagctgtttttgcagtggccttcggggttatggaaggattgcgcattgcaatgaagcgagcaaattagaactgggtaataggaccaatgaggctaaattaggatccgtatatatggtgacaacttttgtgatctaaagtgaccagtaaacaagtactgttttaccaccagttcatatattcattttttttttgcataaataccaacacgcgtcatttactctgagaaggcgaaacgtggtgcacatgcagtgggagaccaggaggaccggtggggaaaccggacaaaaaaaaaggaacggttccattgctcacccaatcgaggagtttctgcacctgcatagtacatggcacacctaccgaggagccgaaaaaaaattcaaaaaacagagccctaccaggctttactatcttattattactctagtaccatcctcttttgacactgcaaatgctaatgaaatttcagaaatcatgtaggtttcagaaaatcccagaagaaaattcataaaacacaggggcaagactgtaatgtagtagatgggtttaactaatatgctctattttttctagatttctgtaacgtaatgggtctaactaatctgatctctttttctagatttgtctactaattgctgatacaacagcatgtactgatacacatactgtaagatggtcaacatgaatcaatagaccgttcactgacagttcttctgagcacatcaacgtagggcaaaatcctctctacatcaggcccataatacagcgagaatatcgcatctgcccgggcgaatgcagcagccgcgcttgcgccatctcccatggaaagctcgatggagacgagcttgatcaactcgtgcgcgatgatgatgtgcctggggtggtaaagcttctcaagaatctgcatcatcacaggagagggtaactcagaagtcagaacaatgaataacagatgtttctatagtccctagaagggcgagtgagtgactccgagtgatgatttgaggaaaaggagaagattattaccttgatggatgcttcacagtgttttcttgcttgttcttgatctcctaccttagcaaaggcctcagcaattgtgtcgtgtgactacagatttcaatatggtagtaaaaatgaaagaacttagatcattcttttttacatcaagtgcaagaaaactcataattaaactagtacaagcaccaaacctgagcaagagtcttgctatatgggtgccttaacttcttaatgcgttctaaggattgtagtgcttctgcaatgaggactttagggacattgtctagagatggaagctccttcaatctgtcagcataattgtcaatttgtatgtgtaaagagcacagacaatggaatcaaatccagcaattcatgtgcaatttcacaggaatataggatatacctggttatctttgatgttgctctatctgacatagcaacagcagaagacaagtcaagttgggatctgcaactcatacagaatccaggatctatgttgaacatggtatcactcttgaaaaatagttttccaaccttcactatatcctcatcaaacttagatacatcctgatgcaaaaagaactgttataccaccaaattactaacaagaaacttttgagaaaagaatatgtgaggagaataatcttacaggtaatgataatgtacagacatgagattctcctatggaaacatgcacaaaattctctttgtgtctatgatgaattaattctgatacagcaccaaggcaattactttgcggacagcaaaatgaattcatgacaaggtctgatagacttagtactgaacaacttgaacacccacaactgaagtagtaattctcccgaagtgacttttgtctctctggaagatccatctcaccaacctgaaaacgagaaacatagacaatgcagaaaatatatgtgctacacgtgatgtcagtatatcacagagggagggaggaaagatacctgtgggccgtatgacagctcgattgggctacctgcttttatatattctgtagaccttagaatgagagtgcgcgaatgaaaatatgcatgtatgttgggccggcacgagtggttgaaaaagctaccagacatgtaaatagcttgagcaaccctgacctaacaatgcaaaactaaacacaggttatagatggtcaagataataaatgagctgcggtgcgataactcaactaaagcaaagtaagagtaatacaatactgtgcctgatattgctatttattgcaatttaagattagctacatgttgtcatgtgtttgctgaatttactacaaagaatttttcaatttccaaattgctatttacctgaacatgattcagaaacatactatcctaaataatgtactcctatagaaacaccatggttggcaacaaatatcaaacagcttttatagggtgatgttactagagaagataagaagaggagacaaacctgttccacactacacataacatcaccactaaatccagaaaacccctttgtcagcgccttgactccatccatggatttcatatgaacaattgcaattgagttgactttaatttgacatatcaaaagaaccaactgcagatatagttacaagaattagcttcttcttcagtaattataaataaatatgaaaatagtgttccatcagttctctacaatctacatcctagggggcagaagtatatggcagaattctgaaagtttaagaaatactccctccattccaaattgatctacatatagtatttttgaggttattcctaaatgatctacatatttgtgttcattcattaagcctattcgttatttgtgcattggagtaaatggacattgatgcatgcatccatgcacacaagtataacccacatgcaatatcttgatttgctattggctaagaaatagtggggatagtgcatgcatcaagtttgatgctagagtaaatatagtatgagagagttattaacttttcttggtcttagtgtacctatgaaatatgtagatcaatttggaatggagggagtactgagctaatataaacaataatgtcaaatctgatatccagaacaatccaaaaaatctgactaaagcagccatcaagctcaagccacagttgtaatgaaacaagcaattgaaaatgtaaacatacaaagggaactcttgaggacaaatgccacatatacctgtgataaagaatcctctgcccacgagacacctgatttataatagctctggaggcataagaacaggacagttgcatatatatgtgactcaaatttgctagcagaagaatcttgatcatagtggtgaacgagatcctgcaacagtttagttcattagttcctgatgtaacagtacttatgctataacatttgagtgcttgcagacatgaattctcttataccagatttggaccagagatggtagatctctttccgaccagcaattgtttctctatgtactgtgccattatccgcccagctaaaactatatcagctggcaaaacagctgcccaacaggcacctccacattcatgcctatgttcagcaatttgtttagagtctggagtcttgctctttgtagaagttacactcaattttgcaatatccaccacattattgttagattctagatgagtattttgattacaagacatttgtcctatagccttctcctggcacctgtttgaacagtaaatgggtattgtacatgaagggcagactacgacatctgctggagcttcactaaagcaatagtggcagtgagtatcccggcaagatttcatgataatctggcataccnaaaaaaaacccctttgggtttaaacccaaaaaaagggtgttttaaaaagagcatatagaacttcagttcaagattacaatagttgactgattatttaacaatgctcatagagataagctactgccctggcataataaaacagtaaaaatatactataacttatcaaatttcatatttgactaggacaaagatctaatgaaactcagtatagctttaggtggcacgtaaaaaactcatttggcataaacaattgaggagatgattcttgatcataccacagcaagaggatcctcagcatgaatcagtgaggctggagaaatatcatttggagacgacattcctctacctttgttgggtgtagaggtacattctagaataaccttaggctgttgctctgccatttagccatatcgttcacttagtatacatacgtacctaacctttttgaatactaaattggttgtctaccatcattaccgacctgtatgtggcatatctgcattgatgcaattgctgcttgctgtcccaacttcattcacattttgatgcttttgtaaaatcaacttcaactcttgttctatgttactctttccagaagaggttacttccatgctcaaagcaacctccaaatcatgtatggaagatgaatagttcctaaaagatgcatttaccatcccccttctgtaccatgcctgaaacccataaacagaaacaggtgaaatcatcagagtaacttagtttccattctttagagtgaaatcctgcaaatagagacagaacaaacaacccaagcatataagatgcattcaacaaagttcccaaaccgtattgctaccttagcataattaggtgaaacagaaatggccctgtcgcaatctcgcagacactcttccaaaaggcccaatttctgtaaacttcagaaacatgatcagaacgcatgcactatccagtaatgaggtcagatggcaggaaaaaaatccttagatacataaaagggaataagctgaatataacctattcacaatgcactgtttaccatgaaacaccaccaagaactagaacattacatcaatatgtccagaatgcaaacaggtaaatgaaagactcacatgcatggtagaggcacggttgacatataatgtggctatcaagcttgcatccgttccatcaggactaatcgggaagtaccgtaacgcctgtaacaacagagaaaaacaattagctatcatcaagactgatagattgaatatcaataaaatgggcattgtcccgtgccgatttgttccaaaaaaaaaaagacagatagattgcagtccacacacataaatgctagtactgaaaaggagtgaggatcattttcttttgcaatatcaacgcatcactctttaaaaaacagaacaggtgaacaacaacaaacttcgaacagtaaagttacttctgacttctgaacttgcactcatttttaccaatcgaatcagaacccatcacttcatcacctacacaatccaagcaatcaagaggaagaagaagaaaaataaacgagtaacacaacaaatcaacctgcgagtagaatccaagcgcttgctcgaactctctcttggagaagcacgcattccccttccccttcagctcggccgccctccccttgtccttgcggcacagcgcgagctccgggtcggtcagctcaccaatcacctgccctcacaccaacacgccacgcgaacgataccatcaaatctagccgcacccccccatgcctgggggaagaggaggagcagcggagcaccgagcgacgggaggtggttacctggcggaagagagggagagcttcgaggaaggcgagcaagcgggaggtggtggaggggaggtcggccgccgtgccctcgccgacggctcgccggagctccgccggcaccgccgacttgagccgctccatgggcgagggagagtgtgtgggctgtgggcagcagcacgcggcgctcgggctttgagcccaactggatgtattgagcctacgtgggctgagatgtgggcacagtatagttgggccttttgggcagaggctattcgtcccactacgacggcccaatgaggtgtgcagcgtagtttggacttttcatttgggcccctgaattgacaagtattctccatttgggccactgttgcattttcctactttgctaccttgcttggatgatggatataaatatacagaaaacctacaccacgggcttccgggacaactactatcactaaatatctagcatccttatcctcttctttgtctctttcccttccttctcccttctctctctctctctgactaccagcacgaagatgacgatggtggctagctgtgcggggtggcgcgttgggcgtggaggacgctcgtcggagccagtgcccgccgttgtccccgtcgccgtcgccccaccgccgcggggtcgaggcgacgacgaggagctcggcgataggtgcggtgaataagagggagagtgggagcgggacgtggaggccgctgctggcgccggggacggcgttgccgggcgggagcttctcctgtcggctcaagacctcggccgccgaggaggacgacgacggcgcggccccggcaagggtcgccctcaagctcgcctcccttaccgcgctgctctggctccccgccctcgttggtcttctcatcggctgccccaccttgacgaccatcggattcgccgctgcctcctcctccacactccgcctcgccgaccaccagattcgccgccgcctcctcctcctgctccaccacgtggctgccttctcctctctctctctctctccttctcctcctccaagttaccaggtaccaggtatcacggataccaggtacaaggtattaggtatcatggtaccagataccaggtaccagccggtaccagatttcaggtatcaaaggtatcagtcggtaccaaaggtaccaagcaccaggtaccaactgatacccaaggtactaggtatcaagatggagtgcacgtggaagcggagaggagtcacttaaattatcccgttacaacgggatcccgttttgtagccgctctcataaatatattataattataaccagtctcttatagttggattacccaccatggattagtctcttgtagttggattattcccccaccatggattagggtgattaaaccggacctcttgttgtgcaggcagtaaaaggtggttgtgtgcttgttgtgacacaacatttacccccaaatttagctctcatttgagctcgtcagctaattaaatatgtgaagatcaagttgctgcagttgatgattttgaattatggatcattcaatcatgggaaagagacaaagaatggtacactggtaatgatcggactttgagccgatttatatatgaggatcatttaaacatgggaaagagccaaagaatggtaagctggtactaatcggattttgtgagtcaatttatatatgaaaatttctgcagtggacaaaacacttggtactgctgtcataggagttctagaggccttcaagagcatggtttctggtcagcacggtagatttcatagagttgtggtgcagaacattctgaaaaacctatgtgcctatgccaaaccagacagtgactgccaatactccatgcagaaattttctgtagacaacatctcgatggtaagaacacagttttgtacctaataatttagctaaacagattaagatttgatagttgtgttgtttgatgcatacaagggactaatgtttatgctggttaatttgtaggcacttagaactatgtatcagacagacaatcttataggggaggacatggaggcctttcttggccttgttttgcagttcagcaaacttctctgtgagaccgatttcatcgaggctgtcaacggaaatggaatcggcttaaggaattttgtacagaagctgaaattaatcctgaagcaagcaaattcacatagaactgaagcaagcgtacaccctggaatcagaagatccgcaattgagcaggtcatatggatggcgcaactgaagcctgaacctcactgcatcgaccatttcatcgactgctaaatgcgggacgatctggtgatggcgcagcagacagccagaagggcatggcaagagaatttcaagctttcatctggaggcgtctctgtcctggagtacgaagagtcccttcgctctgttgcctcgagggcactgaagctgatcctcggtgtagggatgaaaacggtcggaaacggtcggaaaaaccctctaccatttccattttcattttattttctcgaaaatggaatcggaatggcatactcggaaacggtaacgatatcggtaatgtcggtatatcggaaacggaaccgttggaacgggaatctaccgatgtcggccagaagtcgaaaattcatgtcggaaacagcgaaccgtggtatcatcccacatttaactatatatgaagatggccttataatttcacctttgcatgatcacgctgccacaccccacaacaccgttatatgatgattaataagttgacaataaggtcgacaaacaatataaacaaagttcaacgatacttcaacatcaatgtggctaaagcatacaatgtgggttacatgataggattacagcataactaatattgtccgactttttttagatatagatttgagtcttcgagaacacggcttccttcttcggaattttgtcggaaatttgacggaaattaccgataaaaaacggttaccgacaaaacggtcggaaaaaagcccatatcatttccgctaacatttccggaagagattaccgttttcatttccgacaccgacaatttccgataccgactgaaacggtcggtgcaaaccggaaacggtagccggaattcttggatatttccataccgttttcacccctacctcggtgagcacaatgcgccggtaatccgcccgagctttctgccatgtaccagtagcgaccactcgtgagttcaggggaaatttcaatgcaagccttgttctgtttttctttgaagaatgtgttgaagtttaacacgaccggggcactctggttatatttgtgtttggagtaaacattgtaagccatatgtgctaaggttgttcaatttacatcgtatcgtcgtgtttcacttgaaaaaaaaaagagagagcgagaggaaaaaatagatctaacttctgattgctcatatatgaaaactcagcaagtgcacttctaggtcgctatcacgaaccaacacaatcacaccaaatttctcacacaagtgccaccgatatgttgcaaatccactcaagaatacaagtgctcaggaatacaatcaagagagtagaatcagggattgggaagagtaatatagggaaggcagaagcatgagattggaattagagaaatagaatcagaggaggtagagttggaggaggaagagagccatggcaaagccacaagttgaatatctgttcatcaatacccccaagaactgcagtgtggcttggttttatactcctccttgctgtttggttgggcctagagccagcccagcccatgtacatgacagtcgcttcctgaatacctgcatagtgttcatcaatctgggcagatcggtgagcccaacatctcacagtgaaccaagcctgaatctatttggttctcgttgcattgcatcaaacaactgctcgcaggatcgccggccacaggatcgagattagagagggaggccattggggaatgagagcaaccgggaggtggttgaaaggaagtagcggagccatcataagcgaaacggtatatttgtgaacgaaatgtaatttataagtaaaacttttatatccgtgttcttagcaatctaaaagtaaaagctaaaaaataaacttcgatgaaaagacctcaaaatcagcttcaaatttaaggttaaaaatttaaattttactccctccgtttcacaatataagtcattctaggatttcccacattcatattaatgttaatgaatcaaatatatatttaaattttactccctcgatttcatatatatggtaacattaatacgaatgtgagaaatgttagaatgatttaaattgtgaaagggaagtcgaggcagtctctcgccgtgccctggtcgagcttgaggaagatggggctgggtggctttacgtgcggcaggaaaatcggcccagtggtgttagatttcttgggctggatgtttctggttttttaatgcctgtttgattcgttgccgaaatcgacctcgccaaatttcgttaaatgcaaaaattagttaacatggtgaaaatgttgtttagtttgagaccatactgaaatttgatatggattggcgagtggaaggttcaggaataaccaaattttgatacgaatttataaggttatgagttatgacattaagagtttgtttggtttactgttataccaaaagtaattgtaacacctcaaaccagatacctaaattcaaggaaccctcacatttggctctttgcttttgggttgctacgaatggcaggcaacttcctccgtttcaggttataatactttctagtattgtgtatattcatatatatatatttagattcattaacatatatatgaatgtggacaatgctaaaaagtattataacctgaaacggaggtagtactatttgtttgggtggtcgttaccaacaattaattaatatcgatcatgtatttttcatttgggcccttgtttggtagtagcgatcatgaatgtttcatatggcctctagatttcaaccagtatttttcatttgggctaccagttgaatcgctatcagtggtaacgatgaagtgtttttcatgtggaccctggtttggatctagtataggtcgttaccttgttgttttttttttgttttttttttactccctgtaaattttgggggcttggatggatgtattacatgtgcaagaagccaagaactgtgggggttttggtggcctaaccgatcgtctcacacgggcaccgtgttgttaccggtcgataccaaaatatgggaccgatgtgggatgtcaggtcgcacagatgacggacacactcatgtaggtgaagagaggttgtggagaagcatcaagactcgggcattgttcggttggaagaggaaacttggtactgttctgggaggatatctggataaatgggtcatcgatttgttagttggcgccttccatctatgatgcggttcctgcgagatttcgcaatcacaggacagttgcagaagcacttctcaacaaaagatggattcaagacataactggtgccctgggaatgcaggctattctcgagtatcttagcctctggccagtgatgaagtctatacagctctcggaccaggaggattcgctgcactggagatgggagacgtcaggtgaatactcctctcggtcggcctatcaagcacaattcctgggtcgcattcgcttccagtccagcccaatctagaaatctttagcttcaccaaaatatcggtacttcatctggcttgttgcccttaacagatactagacagcagatagacttcgaaagcgaggacttccacatcctgccaagtgtgtcctttgtgatcaatgcgaggagagcattgatcacctgctgatcgtatgtccagaatcttgccagctttggtggatggccctcaatgcgattggacatgcaggatgcttgccactttcagattcgtctttccatctttggctatgtgacagcacgatgaagcaatgcaaggaacatagacggggatttgacaccattgtggctctggttgcttggaccatctggaaagagcgaaacaatagagtcttcaatcagcagcaaagatcctacatgtggccagtgcaatggcggcagaagctgaactttagcgacttgcaagattggcagtgccggagctgcgtttgtcggacggagacatttggtcgcaccatcagttgcgagattagctcctagtctttttattttcatgtaccttgtccccttcattgttttcttaatttccatgtaaataacttttattccttccaaagatgcactccttgcatattcccaaaagacttgggcattgtgcgaacgcttgaggaaatttttggatagctaatggaagtgttgtcaaatttttaaaagtagtggaggtgggtaatgttatggcactaaggtgctgtttggttcggtaaaattcagcccgcacccgattccagcgcaaacagatccggttcccgttgtttgtttgagatgctccgtaattggataccttggaacccattacgggcccagttcagaggcgataccgctcgatcaggagcgataagcgttaacgatacggagaggcaacacgagaaagaatcaagcgtcgcctccgccgctcccctcgacccacgtgtgagaaccaaacaaaatctaagtttgccgtaatctgattactatcacagtgctatctgatgtccttaccgtttacgtttgcaatctccaaccaaacagcacctaaagtttatttggtttgtttcccgtaccaaaacactttaaattaaatttaaggatcacgcatctcgtttggggtgttgtcaatggtagccaactatatatttagttgtctagagtcgctaccaataatattcatgatgtactagtcatttagggcctttgtttgggtcgttgttaatggtagcaatcacgaacatttcatcttgcctcagatttggactggtatttttattttggcccactagttaaatcactatcattggaagtgtcgtagcaatttcatgtggatccccctggtttcaatctagcatgggcaacgacccagtatttttacattttaaaactattggttttgggtggacttctaagcggtcatgtcacatggtacaaagttaaaacctattccgaaatggaaaaagtacgaattacccccccccccgaactattgcggtcgtccgaattacccccctcccgaatcacaaaaccgggcatttttcaccccccccaaccatgcaaaccgaacgaattacccccctcgacccaatccgcggtggttttagtccatgtggcgtacgcgtagcagtccagtcagtactctatttattaaaaaaatgtgggacccacctgtcatctcctcatcctctcttcctctctcttctctctctcactcttcctctctctctctcaaactggtcggcggaggcgtgggggagagacgcagcggcggcgtgcgggcggtggcagagcgccggggacggattcctccgaccactggtgttgtcgttgccgaagtttaggatctcgctggtctccggcatgaagaaaggcggtgccgcggcaccgccgttggacgcgaaatcagagaagttgagctcccggcggaaggggccctgctgagcctggctgctctgctgctgccactgaggcagcgcggccggctgcgagggcgttggggcgtgcaccgacagaccggctgggattctccgtgagcgtgctggggcgcgtcggtgagccagagcacggagggatcggcggcggcgtcggggtgggggggccaggaggaagcagctgcgctgaggttgaagagggcgcggatcctggggatgctatccccggtctggaagggacgtcggtggaaccgagctcgaggacaccggtggcgagggggaggcagaccatggtgcggaggcggaaggtgtaggcatgcctggcggggtcgcagggggcggtgcgaagccggtggcgatccaggtgggttgggcggcgaagtgggcctgtcaggccgcccgccgccgccgcgtcctcccccgcacgccgtcgccgaccggtttgagagagagaggaagagtgagagagaggaagagaggatgaggagatgacaggtgggtcccacaattttttaataattagagtgctgactggactaccacgcgaacaccacgtggaccaaaatcaccacagattagatcgaggagggtaatttgtccagtttgcatagttgggggtgaagaatacccggttttgtggttgggggtaattcggacgaccgcgatagttcaggggggtaattcgtactttttccttccgaaatataggactaatatgagatatgcttaaactggagaagatcggttatggagaagcatcttgtggcattatgcggaccatggatgaaaaatatggatgacgaagggaagcattatcaatttttctcatagtaaagatgggcaagaaaaaaacaaatgctttgaattcaccaacatgaactagcaagtaccaagagtagagaaaaagagaaatctgcatcagatcagccaacggtgtagcatccacccgtcgcctccaccttctcctgcatcacatcagctgagcgctgcatccatccgacgacaccatcgccttcatcagatttgcctccttgcaagcctctacctcagccaccacatcccagctgccgcatcgggtgcaaaaaatagccggcagaggagagtgacgggtggagcaggagggagtgggagaggggtggagcaagaagagaggtgctaggagaggtggagtaggcaggggaggagttagagcgaaatggagaggggtgtcacatgcttgctttactctgttttagaccaaatttaagctgatgtaggtgcttaagtttgcactgagggggtgtacatatggtgaaaaaagatgtaactatagctaaaaaattttcttgaccggagcactccctttggacatgtagctccgcccctaggagcaggagggagtgggagaggggtggagcaagaagagaggtgctaggagaggtggagcagggatggagatagagatcggtggagcgctgctaccctgcgtcgataatgagagagggaggaggcagagggtgaacgagatagagagatgcgagaaggatgagagactgggaggagataagattcaaccatgtgaacgtgaggaaacagagatgacttggtccttctagttcacctaaatatagctgacattcaatgcttctagtgttttgagcacaagtcatttttttttttacaaccgttccgtcccaatcagtttatcctaggacggaggaagtactagtaaactttctgtcactattaacaatggtaccaatcacgatttgtcttatttatgttggctcttacatctagaaatttagaccgccactggttgaatttgaatcgcgtatagcgatcaaatgtttttttcgttgtattgacagtttggctggcagcgacacctgtatcgtttttccattttagtccctacattagattagatcgctatattggttgcgatccaaaaaaattttcattctagtccttggtaatgaactaatggtggcagtgtggcactcgctccgctgctctattcccccctcgcgtccgccgccgacggcgatggccacctcgccgccgcgaccacttcatcgtctcccttcagatggcggcgcaagatctcgtactggtgagcaccggcaggggggcagtagcctcaagacccccccctccctcccccccaccgcgcaacgagaggcgcgcgccacaggtgttctcattgctctctctctctctccttcctaatatgagtatctctctgccctggagcctctagccctctactcgttttttgtgggggaatgacatagaagggttattggcacattgttcctcagaagaagggggaaaaaagaaagaaagaaggtttttgacatagtttctagactcgtttttagcacgcaaactaattcctgtctgtgaaattttcagtaaccaggttgctgcagttgataattttgaaagagttgatcatttaaaccgtgcaacgagcggtacactggtagtagtctgactttgtgagctcaattgtccaattgatatattagaaattctacagtaggataaaacaataaaatcaggtagtagtgaaaaaaaagagtgatattctaatatgcttctctgtcagttgattttttacgacgaatattgaaatcagggattcaattatttttaccagtgagatgctttcttgacttccataagatcatcatatatcagttaaccataagggatggcttttacaccatcttagtatttatttgggtgttgaaattaattcctatggtgcatctgtttgaattgtgcaagcacacctggaatatgaagcattattggaccacgaaaccatagaattacttcgtactataaaacgatgtattggcttgtctgtttatttctaacatgaatcaaaccagataaggggtcctatcattcccattggcaataagttcgctgactattggcaagctaagtaacactatgacagcaatatactaaatcatgacattaaaacagagtattttattgttccaacagacaagcatgttggcttgtcaatggttttaaatcatgacattaaaacagagtattttattgttccaacagacaagcatgttggcttgtcaatggttttgttcttgatttttttttcttttaaaaaaggatcacaactcagcaatttttttaccaagaaaaacttgagtagacttttcctatttctaaaccagtatcacgtagctcctggtaggaatcactcgtcagaatagataaataggagacaaggatttaacgtggaaaaccattacaggggaaaaaccacagacacacaaaatgatcactgtgttgagaatgtttacattggaactcttttgccccctttgtttggtgtttcttgccctaggcctgcagggccatatttgtgtgttacatgtagaaatagactacgagtatgaccccataaaaaccaaaattaattcagttcattttttaacaacctaactgctttgctgcaataattttggaagcaaaaaagtggagtattatctgatattctgatatgcaggatttttatttatccttgtggattccaaatgctgctacagagatgttggtggtgcattactccggtcttaatgacttaatctcttgctgactctgataagacaacaactttgcagttttcaagtttcaacttgtaaccaatgctgtgttgctagagaatgattctctgtaacaaacgtaaataagatgttgatgcgaaatacaatgtagaaacctctcgctctagcctctaggattggaattctttggtggacgttagatgccaagttaattagcccttcaatgatctccagtagattttgttctaataaagttcaatgttcagcttcattttaaacatcaaaataaggtatctaatcctccttttctatttgatgagatttgggtggggagttcctacctttcaaatttataccaaggttgacagttatgtaaagactccttggcacattgatgtgattgagcattattcgttcataatttccaaatagttggtatactttgcctaaacactaacattcatttccatatgagagtatgacttgattatgtttgagtgctatccaacaactttcagttgaccttgacatgttcttctacttgactacttatactgctatgttttccaactacaatggttcctgcatcctgaccttcacttttcttgtgtttgtgagagccaaacttgtaagcagccagtgctccttcaacggggaggttgcattatcatcttttatgtgtatattaagtgtgtattccttattttaaactttgctacgtgtttcccataaacataaaatatattcttttgtaacaatgaggatttgacactctttaaaatagcatcattaagataagaacaattgtttttcttcttaaagtttgtagctactggaccattgactgcatcacaattgattggtcaccgtttctgataacgaaatggtttggcacctagctcacaagtcacaacttgctccacttgctagaaattgtgatgctttcagctttgtcctagtttttgacgactgctgcttttgcaggaatctacggatcattcagttttgaccagaacccatattgcaatgggtgttctacacacccctctctgagattctcacgggaggtgattgattccaaatcctctgtagtagcagataagtcaccaaactttagggtggagaatgctccttttgcttatcaggaaccatggcgctgcttgaagatcggtcagccattcctatatccttaggtgcatacctcaagctgcagtgagggaacatatgacattgtagtcttgtccggatagagatcaatataccttagcttgcaactgttctcaatgagtagtcaacggatggcgggagagggaagggggaggtgacgtacgagcacacgagggaggcggtgagatcgctggatcaggagaaaggattggtgcgaaagcacaattttaccctcccaccaacagaacacaatcggtacctcctttcgcggggacgcggtaccaccaggtatcgagcaattccagccgttagattgcgccagatcgagtgccaggatatggtacagcctcccctcaaggattgtaaaaagtctcctagtattatttatcagatgtttagtatatgggttatcactctgttaattgcagtttgaccttgacaagttccaagtctcctactgatattttctttttttctaacattttcacagttctactatttaacagacccctttgcatttgaagccatccgttattactgattgagcattacaccttagtattgccataccttgcctttacctatacctcaaggcactcaatcctttcaatggctgatgctgttctcccagcttttctgcaagtgctttttcagaatgccatggagctgttgaagaagaaactggagtttgcttgtgatattgataatgaggggcaaaaactcatgtccaatatggaaatgattcaagctgttcttagaggaggcgagaagatgaagtttaatgatgagcagagactctggttttctgatctgaaagatgctggctatgatgccatggatgtattggatgaatacctctatgaagttcagcgacgtaaggtgatccatcttccccatctgcgtaaccatacattaagttctgctttgaatccttcacgtcttaaatttatgagtaatatggaaaggaagattaagtgtatagctggtaaaattgatgatttgaaaaataagcgcttaaccttccaagtagaggtccatgattaaacagatcaacaacatgaaggaagtatgtgtaacgggagtacctctcttcctccaatttcaccctgtggtagagagaatgatcaggagaggattgtaaatatgcttctccaacgtgatttgaagcccaacattgcagtattgcctatactgggtgaggcttatattgggaagacaactgttgctcagctaatcatcaatgacaagcgtgtatcaaggcactttgatgtcagaatatgggctcatgtatcacctgatttcaatataaaaaggatatctgcatctatcctagagtctatatatgacaaatctcattatgacaacctggacaccctccaaaaacacatacaaaagcggctacgagggaaaaggttcctgcttgtcctagatgactattggacagagaactggcatgactgggaggaggtcaagcgtccattgctcaaggcttctgctggaagcaaggttatagtgacaacacggagtggggcagtcgcaaaattgcttggtatggatctaacgtatcaattgaaactatcaattgaaacctctatcaagtgaggactgctggtcattgttccgccgatgcgcccttggtgtggaagtcaaagaatataattctggagatttcctcgataggtaccctcttcaatcttaatctctccgttccaaaatataagaacttttagctttttcttagagagattaaggttggatgaaaaagattatgatgcccctcattaagtgagggatattttttggagtggggaagggtggttagggataagattgggtgaaagttaactgaggagtaattggtgtggaaagtagtactctaaaagtccttatattttgggacaaactttgaaccccaaaagtccttatattttgaggcacaaggactgagggagtaactagtactagcataagtaaattttgggcacaaatgctaaaacctcggcacctgatgccccatctctggtttttttagatgattgtcgtaacagaggtttttttaatataaaagttcatacagtaacactccgtattaataaatactataatcatcagatgtcctgacatctgatctcttctttcacccgcagaaagatgcatcaagtttcttatagggttaaagttaaactaatacctacttttctattcaccttttacagagtttatctctaacgccgtatacctttttccctctatcttaatgaaatgatatggagatctcctgcatgttctaaaaaaaactaatacccacctttctatccatcagtttttccttctttttttttctataacatgttctattttagcctcaaacatttctatgtatttgactattgcaacattgttcttcaactgttgcaaaaatggctgttttgcagattgaagatggaagttctacagaagtgtaacggtgttcctttcattgcggccagcttaggccatagattacaccagaaggataaaagtaagtgggttgctattctgcaagaggaaatttgtgatgccaatcccaattatttcattcgggcccgtcaactgagctatgcacagttacactcccatctcaagccttgttttgcttactgctcaattattccacgggaattccagtttgaggagtggcttatcaagcattggatggctcagggcttcattcagtctaagcctgatgctgtagccactgggagttcttactttagaactttatttgaacagtcgtttttccagagagaactggttcaccatagtggggaacgacaccgttatagcatgtcccgaatgatgcatgagctcgctttgcacgtctcaactgatgaatgctatatcttggggagtcctggcgaagttccagagaaggtccggcatttaacagtattactcgacgagtttgccagccaaaacatgttcgagacaatttcccaatgtaagcatttacatacacttctagtcactggtggcaacgcaggttatgaactgagtatccccaaaaatttactcaatagtacattaaaaaagcttcgacttctagaattggataacattgagatcaccaagctacctaaatcaattggaaatttgatacacctccgctgtctcatgctccaaggatccaagataagaaagctgcctgaatcaatatgcagcctgtacaatcttcaaactctgtgcctaaggaactgctatgatcttgagaagttgccacgcagaataaagtatcttcacaagctaaggcatatcgatctgcatctggatgatccttcccctgatatccatggattgaaggatatgcctgtggatataggattgttgactgatcttcagacactgtcaaggtttgtcacaagcaagaggaacattcttgacaaccacagcaatattaaggagctagataaattggacaatctctgcggggaactactcatttcaaatctgcatgttgttaaggatgcgcaagaagctgcacaggcacatttggcttccaaacaatttctccaaaagatggagctctcatggaaaggcaacaacaaacaagctgaacaaattttggagcaactgaaaccaccctccggaataaaagagcttaccatttcaggttataccggcatatcgtgtcctatctggcttggttctgaaagctacacgaatctagtcactttgtcactctatcatttcaagagctgcaccgttgttccttccctttggctattacctcttttggaaaatctccacatcaagggatgggatgcattggttaaattttgtggtagcagttctgccaatttccaagctctgaagaagctacatttcgagaggatggacagtttaaag

SEQ ID NO: 9549 - DNA, 6355 bp, Oryza sativa
aggttgtagtttgtgggatcttgctggtggtaatggcagtcggcaactttgtcaacacgatggagactttgatgttaaaattgaggttcaaagcaaaaatgaaaagagcaaagagcaggcaggatctcagtcgccaacaccaaaattgacaaagtgacccataatggtgactccatgcttggaaacagcgaatgctgacacaccatctctcttgtaaatcccttaatccataaactgttttggctgcccatgattttgtgttttggtaattgtttcacattgaagttcatattctacggtcaatgcacgattaaaaacactgttaactttaccacagatgggaacgctaaatttatgtgatttgtatgtgctaacagcgcttgcctaaaattgcagagaacaataatgtattatgtcagtagtcagtagattccgtggctctaattgcagagagctagtaacatgctgaaaatgaacagtccacagctcagaccatatcaatgcttctgtggctctatttagtggcattagaatcgtgttcagagtcttgtccaaagtttgaatgtttcacaggtttttttatgtagtgccatcagaatttgtgttcctctatctttgtgtttgaagggttccatgcagaacacccagtgatatagagaaacatcaatagaaatcatttggtctgattggacatgagagttgtaactcatcagtatgatctgtgttcttacaacctctggttggtctttaatccatagaactaacatagaagaattggcagcttgtaaaccctttacctgttggttgaaaagtcaggagtgtgtgataaccattttgttccccattttttagacaatggaattttgttttggacatactgttgtacctattgggaatacattctgcatttatgagcttgcatattggcaatatcttccatgctgtggtccagcaagaaacctttgcaagtttgcagacctgccaatcatcagtgcttgagacaaagcaaaaggcaacggagctcgctactgtgtatcactctgattgcggtagcctctgttctagtacctcaaattctttcaactactgtgtctaatcatatgcaatccatccaatgacatgcaccatcatgattgaatcattgagcccatctcatctctgtatgattagtttttgtttgtcagttccacacctgaaacccaagatcatagcatccaaatgcacaagctgcactcttaatttagaaatcaatatttacattccagtatttcatcactctaatcaattgattccagttctttcctaagcagtgttcatcgtttcctacaattaattaattaccttgccaataataaaacacacagacacaaaaataactaagtaaatcatctacaaaataaaaataaactgcaatccgatatccatcatgtggaatcggaggcatcgtgcaggtcgtgatgagcaatggagatggacgtcgccgccttctccgcgatggccgcgcgcacctgcgccatcgtcggccggaggcccggctgcgccgccaggcactcgacggcgatcctcgccacgtcgccggcctccgccgcgtcgtagtcgtcgcccagccggcggtcggcgagcccgtccaccccctccgtcctgacacgcggcagcaaccgcgccgtgaggttgcccccgccggcgccgccatccgggccgggtatcccggcggccggcgagccggtgatggcctcgagcagaagcacgccgaagctgtagacgtcggacttcttggagacgatgccggtgcggaggaagaaggggtcgacgtagcccggcgagccgacggccgccctggtgggcgcgacggcggcggagaacccctcgcaggcggagcccaggtcgcagagccgcgcgcccaggccacggccgtcgaggagcacgttggacgccgacacgtcgccgtgcaccaccggaggcgcgccgtcgtggaggtgctcgagcgcgccggccacgtcgtggacgacgcgcatgcggtggcgccatggcagaggcggcgatgcgccgccgtggaggcggtcggcgagggtgccgccggagaggtactccaggaccagtgcacctccctcctctgcacgcagtaataaaatttcttttaattaattaatctctttaattaacaaaaaatctctctcttagtaacaaacgtataatattataaatcattttgacatacatataataccaaaatagttttattaaaataaaattaaatatattttgataacaagtttgttttatgttttgtatataaacttaaataagtttaacaaagaaaaatcaaaatgatttataatataaaacggaggggtagcaggttaattagatgaagtataaaatcatttgcaatttctttttcttttttggggggatttgcaatttcattcatctggggatcaaaattgaattagaattaggattaaaatgatatatacgatcgaaagcgatcgtgttgagttaagttttggacgacgaaatgggacgaaaataacacaggtcgttactcgttaacgtactagacataaataggcaacagtgaagtgacgtttgttcttaatcgatcggtaggtaggaggtaatctccatttcttcttcttattgttttccccccgtacgacgtacgcatgccattctctacacatgttttattcggtcgatttgaaatttaatttgtgaggtgaaatgtaacatcatactagtagtattcatattgaactaacttaataacaaatcttaagaggagaaagaaattaagcaaagtaaataaataagaaagtgaagaacatagcaagcagcaagctggagtagctagcatcagagttgcatgcagatgcagtgtaaagcaagtgaagaacagaaaaaagatgttcccttttaagacttttaaccacaccgagacgaggtaacgtaagcttagagtcaaagcttcaataatttgtgcaaggaaaaaaaacacacataattcaagcagttggagtagtaggagagaggagagtgacgtgtaccgtggtcgtcggagtaggcgaggagggagacgatgtgggggtggcggaggcggcggagcaggtcgagctcctgccggaacgcgcgcagccaccgctcgccgccgcaccaccggtgcaccttcaccgccacgggcggcgagacgacggcgaccctgcagctgcttgccaggtagaccgtgctggagccacctcgccccaccaccgccgcctcgtcgaagccgccggtgagcgcctccacctcccgccacgtcagcttccaaggctccccctcctccttcgtcgacgcaccaacttcgccgccggccgcaacaacggcagctcttgctgaggaggaggagaacacggcggcatcagctgtcgtgctcccgccccgccttctgcggcctcggcgtcgacgtcggcggcggcggcagcacggtggcggcgccggagcccggagaggcagtgacggaggaggaggaaggtgatggcggcggaggagaggaggaggaggcagaagaagaggacggcgagcgccatggccacgtccatggcgccgcgctaagcttagcttcttcagtttgggaaagaaatgcaaagcaaagcaagagcagagcagaaaatgggttcataataagtatgcatggccagattaatgtacaggtggcagtttagttttactacttaaccacagctttgatttgatttgatttgatttattaatccctaatcttgattccccctgtgggaatttaatattaagctagcccctcaattctggtcaacgaatgattatattaacaccatggtctcatctggtctctgtatatacatggttgctgttaaaaattgtttttaattcataatgtgaataattacactgtctcttttaatttatttatttattacagtaggagtagtaccttcccatacggtgaatatagagtcaacagcatcacatgaaaattaaagagagggatagtaggatgcattaaataattttgcagtacaacaacattttgaaaatctctgggtccttacgatgtacggatacagatatatgaaatttaaattttgggagtgagtaaagatatatacacgccgacacgtatgcacggcgtacgcgtatacgcagttggttggatcaaatccccacgagttagcgactactaatcaatttgggattaatttgccgatcgagaatgaacagtgcttccagttaatgttgttcctgtcagtaccagcagtttgtactcagtttgcgtggacggcgcattataatatataaacactcctccaaatactcagtgttgttaatttggacagcgcaagtaatctcgaatttaaattttgagttgtttttggagtattttagcgacgatcgatcagtttaacggactccacgaggacgacagcttacgaccaatgagttaatgagtggtgggttctcccatgccctgcagttaatctactgtgcaatacttgtgttaattacttcttcacctgcgactactgttcttctgccagccaacacagtgtcatgaatcattttgatttccatacacacgtgtaacatccataatttaaattttattttcataaagtacaacatactagtgtgttcatttcgtgaaagtgctaacaatcttatcttatactgatatggtttttcaagctagctagttaaacacgatttttttcagtgaaatttaaacacatgctccctctttccttttttttaactcctatgtgatacgtaagaaaacaaagggagtatcttgcacgcaagctagaggtgtactaggcatagaacgtgacaagagacagaaaacaaacaaatctaacgaactaccagataattacaattaattagtactcctaattaaacacaagagaatcacaaaccaacttattagcggcgtatagctagtgtagagtggtactgccttgattttaatttagccgtgtgagtgaggcaactgtgatatgcctagctagctaattaagcaggagtagtactaattactacatcctatcattgatgagctctatctatccagctcgaagtaactcatgtcgctcttcacctagtggtacgatctagctagctaagaaaacccaacgattgattaaggttgatctgttttagcttgtcgtaactaaagctggagccaatcatttaaggtttaatttgcatcatgtgtatactccatatatatattgttgggttagttatgcacttatgcaatgcaagcaaagaggttaggttggatttatctgtggatttgtcagcagctgtaggctggctgcttcagttttttctgtggattaaatctgtcccctgtgttcagaagctgcattatattgctgcatgcgtgtggacaagggaaaaacgcatcgcatgcttgatctttatggacttttggtgaagcgtcgctttcttggtttcatactgacaaagtcattcataagcaatacgagctaggctgcagacaaattgatgatccattttgctcacatgtacaactagccagctagctgattcaatggaccttctggtatctcaaactgcttacagatggggaaaaaaaggatagtagatttgttattatgctgcagggtgaatagactgaattctgaatataagtcactcatgtttggaacggagtaattaacgctaaatgtaattaattaagaaccagttgattgattcgttcctacttcctactactctcactgtcatagcagctgcactgtatctatccaaaaagatcaagatcaatatacacaccatcaggttcttgttctagttagtacatagctattacctcacatattcaaaaggggagaaaaagtcagtgcccaactaaaattctaggacccaagtaataatgccaacagaaagaattgcgattgtcatacttcatcatgcataaacaaaaagaaagacaagtccttgataaagcaaagagaaaacctaaccgaactaattaatcgattgaaatagtaggataagagaaaaaggagcttactcaaagacgacaataacctggcacaagttttctaccgcttaattactcgccttccctttcatgatattgtttgatttattgatgctaacatcacacaatcaaatttaagcgatattaataaggaaaaaaagggacggctaatttaaagtgacactcttccaaacctacctgctttagagcaatgcaaccaaataataaattgctatgaagaacctaatctagctcaaaatattggaagcacacaaaaccccccctaaagatcctgcatatccaaatccagcagattttgagtgcatt

SEQ ID NO: 9550 - DNA, 3689 bp, Oryza sativa
ccccaaccgggagtaaatatcttttcccgctatttcgaaattctttttaaacccggttagggttaagaaccgggactaaagattatagcactgcatatgattttcgcttacatatgtgtttataaaatagaagttaatgcattatacaaagattgatgacaattacttcgaaaaattatttttgtctgtaataaattaagtggataaatcgtaataagcaaatatatgacttataattaataaaaattccaatatatatatatatattcttagcatatatatgaatgatattattatattggtaaaaactctaattaagatattaatgtacatactgcatgatttaaaattaataaaaattgtaatcatcatatgtacttagcgtaggaattatattaaattaaatgctaaaaactctaattaacatatgtaaatgccacatgcatgatttaaaccttttaaaaattcgaatagtcatatataagtagcatatgaaagatagtaaattaaattgtgaaaaactctaatatatgaatgatagttttaaaaatatattaaatttaatacttttaaaaattctccagtcaattataattagcatatgaatgatagtaaattaaatgttaaaaactctaattaacatatgaaattgccacttgcgtgatttaaaacttttaaaaatcctctagtcaattataattagcatatgaatgctagtaaattaaatgttaaaaactctaattaacatacatatgaaattgccacctgtgtgatttaaaacttttaaaaattgtaagtatcacatataactaacatatacatgatttaaacttgttgaaacctctaataatcgtgcgtaattaacatatgccatacatcaattgatttatatggataatcaatacatccaaaatagtttacatcgtgtacacaataattacggcattacatcggcggtgacggttgaccgcacgtactttctcctcactattgttccctccttgtgatcgctgcgtgagtaaggggtgtcttcatttgataggaggatgctagggtcaatcgtcaccgtgaaagggggttgcccatccaactgatcgtaatcctcgtcagtcttgtcctcaactccgacgatttttcttttgcctgagagaaccacttgacgcttaggctcatcaggccctctgcccttctttcctttgctagacatgtccttcacgaaaaagacttgcgttacatcattggcaaggacaaaaggttcgtccgagtatccaaccttgttaaggtcaacagttgtcatcccactgtcatcaatcattacgcctccaccagtcaacctaacccattggcaccggaacagaggaaccttgagaggaccatagtcaagttcccatatgtcctcgatggcaccgtaatacgtggcagttgttccatcgtgtcccatggcatcgacacgaacagcgctgttttggttcgtgctcttcatgtcttgggctctcgtgtagaatgtgtacccattgatctcatatccctggaatgtcgcgatcgacccagacggtcccctcgccaggaaggcaagttgttggttgatcgactcgttacccatgagatgttgtcgtagccacgcggggaaagtatcaatgtgatgccgtgtaatccatgcatcggacttaccgatgttcctggcgcgaactagagccaagtgctcctcgatgtaaggagctaccaatgaagagtgttgcagaacagtgaaatgggctttacggaataaattgttgtctaccgtcattattgctttccttccgagagttccctttccccgtagtctcccttcatggcgtgattcaggtaccccgattgggcgaaggtcttcgataaattctacgcaaaattcgatgacctcctctgttccataacccttggcgatgcttgcctctggacgagcacggttacgaacatacttcttcagaacgcccatgtacctctcgaaaggaaacatgttgtgtaggtacataggcccgagaatacggatctctttcacaaggtgacaaagcagatgcgtcattatattgaaaaatgaaggtggaaatatcaactcaaaactgacgagacattgcaccacttcattctgaagggcttctaatctatccggatcgatgaccttctgcgaaattgcgttcatgaatgcacatatctttgttattgttgcccggacattgtctggaaggataccccttattacaactggtagcagttgtgtcatcaacacgtgacagtcatgagactttaggtttgtgaacttcttctccttcgtgcttattattcgcttgatattcgtggagtatccagacggtacctttatgctctccaagcattcaaacatactttccttctctgccttgctaagagtgtagctggctggactcaagtaatggcttcctttctcctttggttccgggtgaaggtcgccgcgttgttccatatgcttcagatcattacgtgcttccagtgtatctttcgactttccgtatacacctaggaagccaagaaggtttacgcaaaggttcttagtgaggtgcatcacgtcgattgcgtggcgtacgtccaagaattcccaatatggtaactcccaaaatatagagttctttttccacatcgccgcgtgaccatcttcgctctctatatgctggcttccaggcccctttccgaacactactttaagatctttaaccatagcaaacactgtttttccgctgcgatgtttaggcttcgtacggtggtcggccttatgttcgaagtgcttgcctttcttccgtaccgggtggtttgctgcaaggaatcgacgatgacccatgtatacaaccttcctacagtgcttaagatacgtactttctatttcatccatacagtgagtgcaagccttgtaccccttgttggactgtccggataggttgctaagtgcaggccaatcgttgatggttacgaacagcagcgctcgtaggttaaactcctcctgtttgtcctcgtcccacacggggacaccttccttcttccacaactgtttaagatcttcgaccagtggtcttaggtacacgtcgatgtcgttaccaggttgcttggggccttgaataataatcggcatcattatgtacttcctcttcatgcatagccagggggggaggttgtagatacacatcgtaacgggccaagtgctatggccgctgctcatctctccaaaaggattcatgccatccgtactcaaaccaaaccgtatgtttcgtgtgtcctttccaaattctttaaattttctgtcgatgtttcgccactgcgaaccatcggcggggtgtctcagcatcccgtcctgttgacgctcttcagcgtgccatcgcaacattctagcattccccttgttcctgaacaaacgccttagccgtggtattatagggaaataccacatcaccttagcaggaattctcttctttgttagctgcccgtcaacttctcctggatcgtcccgtctaatcttgtatcgtagtgctttgcaaacagggcatgcttctaggttctcatactcctcaccgcgatataggatacaatcgttcggacatgcgtgaatcttatgaacttccagtcctaacgggcagactatcttcttagcctcgtacgttgtctcgggcaatttgtttcccccc

SEQ ID NO: 9551 - DNA, 1742 bp, Oryza sativa
aaataccacatcaccttagcaggaattctcttctttgttagctgcccgtcaacttctcctggatcgtcccgtctaatcttgtatcgtagtgctttgcaaacagggcatgcttctaggttctcatactcctcaccgcgatataggatacaatcgttcggacatgcgtgaatcttatgaacttccagtcctaacgggcagactatcttcttagcctcgtacgttgtctcgggcaatttgtttccccccggaagaatgttcttgacgagtttcaataaatcgccaaatgccttgtcactaaccccattttttgccttccattgcaacaactccagagtggtatccaactttttgtgcccctgctcgcaacctgggtacaacgaagttctgtggtcctccaacatcttgtccaatttatgggcctccttttcactttcgcagtcttccctggcgtcctgcaacatctgaccaagatcatccgcaacgtcgttaccatcagcagctatttcctcctcgcccgtttgatttccttcaaatccaacatactgagcaaagtccggaatattgtcgtcttccacttcatcttcttccatttcaacaccttgctctccgtgggatgtccaacaattatagcttggcatgaaccccgactcaaataagtggaaatgaatagtcctggatgcagaatactccttctgattcttacacttattgcatggacaacaaataaaacccctttgcctgttagcttcggccactctcaaaaaatagtgcacgccgtcaataaactctttggaccgccggtcagcgtacatccattgccgatccatctacatgagtcaaaaaaaccgcacacaaataattattcttacaataatgacagtcatacaataattataagatatctttattcatacaaaaatcataaaatattacaccaaataattcttaaaaactatttgtaaagttttaaactaattttaatgtgttttacttcttttaatttttattttagtttgttttctattatttaatattaactttcactagagttttccttctcaactattttataaaaccttgtttagcaaatgaactaaatttctatatattctttcttccccacacacattttctctctcatcaacttacaactaaattttggagacaaaaaaagtgtgcaaaacataggtgcaaatgtagtatgacaaaaaaaacattggaggatgaagttgcaaaccttttaggcacctccgatttgtatgtaatcaccaaaataaattcaatagaaattttggcatgacctcccctcttttttgaagaaattttgaagcttgctcgggcagctggaggaggaagaagacatatatataggggtgggactttagtcccggttggtagcaccaaccggggctaaagatcaccgggatcattagtcccggttggtattaccaaccgggactaaagttaagatctttagtctcggttggtagcaccaaccggggctaaagatcaccgggatctttagccccggttggtgctaccaaccgagactaaagatcttaactttagtcccggttggtaataccaaccgggactaatgatcccggtgatctttagccccggttggtgctaccaaccgggactaaagtcccacccctatatatatgtcttcttcctcctccagctgcccgagcaagcttcaaaatttcttcaaaaaagaggggaggtcatgccaaaatttc

SEQ ID NO: 9552 - DNA, 9570 bp, Oryza sativa
tcactgtaatggatgaacagtccagatagccgatatataatattttgacagtggtacatgctgtcatgcagaagtgctgacaaaattcagatccattttgaggtccactcccttcgtcccacaaaaaatcaacctagtactagatgtgacatatcctactattataaatctaaacatatctctgttcagatttattctactaaaaatacgtcacatccaattctagattcattttttttagggacggagggagtaattcacattagttcagcatttcacttggcagaaagtaaatgagtgccagcaaatgactctggctgctaagcccaattcgattgaccatgtcatatctggtatggaactgggatttggtatatttttaagctagctgtctttgtagcgtcccagcataagttcagttacttgtgtcattagattaagaggtaaacatatttaattgagaagaaaataatttgcactctttagaccagcctccacaaacgaacaggatccgccgcactctctagaccacggcactactcagcgttctttctcatttttaaagaccctgtcagcttcattcattttttttatgaagatatccttagcattattagagctttatccatgctgtgtggtacacagaaaatctctgaaaattatatggttctctactaaaacgaccatattctatctttggaatttcgatcgaatttaaggagccgagcacacgcgtgtaaatataaagcttttactagtatttttctgctttgagaagaagagcaatttagttgcacgtccaactcttcctgtaggcaggcataatgtagccgttgaaattaaatccctgacgaggatagttactgattaattattggtgacagcggtagttaactactcaaaccgtggtagtggagacagcagtgtactctatttaccagcaatttaacactatgtaatattgttcttcctttcattgagcagtttgaaacagatcatttgatcagattatttatactaaattatctacacgattatatacataaattaactattataataaataaacttaacaaatagcttaaatcaataaatctaagcaatcgatagaattttttatagaaaatatataattttaaagacttaaaacaaacaatcagcaataataatgttttattttgagatggtagatgacgacagaatcacgaaaaagacgtatcaatgaatttaagcaatcaatatttttttagaaaatatataatttgaaacaaataatgggggacaataatgttttatgttgagatagcaggtgatgacagaatcacgaaaaagagaggctaccgtggcttatctctgtgggccccattggtcagtaggatattagggagacatgggcccacgcgtcatcctcacgggagcttcttgtcttctctttacaagagaatagagaaagaagacgaccacgccaccaccgctcgtctccaccgcgagcgaaacccaaaaaggcaatggcgaccgacggcgacgccctcgagtcccaggcggcggcggcggccgaggcggcgcgggagctgcgcgaggccgccgcgtccctcgtcgcccgccgctccgccgacgaggacgcgctccgccgccgcgccacggcgctcgacgccgacctccgccgcctccaggcctccctctccaccctcgcccccaccacgctcgacaaggtgactgcatctcgttcttctcttctactcatctccctcttcctcttcctctccccgcgcttgcttccaattcgatctctctctctctctcactcacgcgtcgcctcgtacgggtttcggcggcttggaattgaaacctacgagctgctagtacgttagatcgtgattcgtttcgtgattatctcgcaaagcagaacgcttacgcgcttcacgccttcgcctggaggattgagatgtaaagtttgcacgcccgcgatctggtgctcgtcaaacactggatttgttgcgccatctccctggagatgtctccaatttacatgcttcctattggttttcaaagttaggaatccgaggcgtgtgcatcgagctggatgctggccatggccaacgattattattgttgttttttgtattgaaatctcgaggcagtttaggcaaactatagattccgtcagaaatctgtccccatcctttactgctccgtttagagatccttggaatattcgctctccctcatgcttgtgcaaatttgtaatgcatccactaggttgctcagtacgtggattgagaaacattgtccactgctccgtcgttgctaagccaaaaggtttaatctcaacctagagaattattacaacctatctagatttaatctgcactgtctcccatgcatttctttagcacgcacaagtgacaaaatttgacctgtttctaaattgatataagagtctccgtccgcatgtccaagtttatcgcactcctttttagattttctacttaccttttgtacctcttttctaatatatagttttcttctgtacttctgttgtgtcatctgtgagaattgtctcattctgccatttatctatataggttgaggaggaactggagcgtgccagggtaacaatctcagatagtgacgtggctgcatttctcccaagcaagcggaatggtatgctatgatttatctcaccccccatgcccgtctcggggaaatataactgttatttatggaattcacttctccttgaaatttagggaagttcctcaagacctttgttggccctgtaaatgtgcgggtggcgagaaaagaagataagctcagagtgaaggacgagtacaacaactacagggtagattttagatgcttcttcgataatttttttttagaaagcttatgcatttactttggatatgatttcttggaccaatttaataaagctatctgtactttttattacttttattttgatgacttaagcattctaaatttccaatgattactccaattggtgtattctttaaattttgatctgtgataagaatcactattgaagagaactactaccattttctacaaaaatctaagtaaatttcagattatcaaggtcaacgagtatggtgtgtattcaatctcagacagcatgctgataaaaccttgaacctgttttgtatgtcatatggtttaattagtaaatacgggaaacatgcaattctggactaatactctagaaatcatgttgaaaggttatgtaagtgttccttttcatgtcgaattcaagcagtcctttctaaattgaacatagtggcttaactggtagagtatacttggtataattttcgctactataaatttttatgtcatgcctgacagtattgatggtttcatttatttgcaggatagggctgcctatatgtttctattgttcccatccattctcctcctacttagatggtggatatgggatggatgccttccagccttggcagttcagatgtaccaggtatttagtgccgtgcagtgattgaccctgaatatattttctctatgtatgactttgctgtccagcagaaacgatctaaagtttatttgttccacttaacaggcttggctactattcctttacacaagttttgctctgcgggagaatgtgttgattgtaaatggaagtgatattcgtccttggtatgtgtctgaatttcattgcttacagaaactgtcaactgcagcactcaacaattttatggcaaatacccatttttaatgcacggacagacaaaagtgcttgatttttttactatatgcgacttataatttgttggtatgggaaagatcttatatcaaaacatcttttaatgatattcgtaaaacccatgtttcgtttgttcacttaatctagcaaaatcaattcctttcttagaatgcattatcatcttttcaggtggatataccaccactatttagcaatgctaatggctctcgttagccttacatgggagataaaaggacagcctgattgttccagcaagcaggtaaatgatcatttttcagagaaaactagcactcactttgtcatcaaaccttcaaatttttggaacgctgaactcagacactatggctttcttttcagaggggggtacaacttttcctgcggtgggcaatcatgcaaggaattgcaatgcatctacagaataggtaccagcgtcaaagattgcgcacccggatagctctaggaaaggtaaggttctgtggttcacgtcttgcttcaagacagtactcaacaacatattcttttagtgccaagtgaaggtgtacaacatgttccaataataagattcaaatgagtatcatcttcaaatgatatgtatacaatgcagatgcttatcaaaagcaatttaatgcactaatttgcttgatgtttgttgatatttgcatatcagctaagagttcggaatatcactgaaactaatttagagaagatgctctggtcttttaatcaaactaagtcttataggcaatggttgttcatacagctcaatagactgttgaaatgatgctgtatattgtatcatctatgtacctttctcaagttttatcggtgttgttatttattctgtttcatatttaattgcatgcaggctaaaagaatggatgttgttgctggagaaacagctggtgtggaagggcagctcttgctactttacccggtccttttcacattacaggtatgtgtaaatgtgtcttgtgagctgaaagcatggcagatccaagttgttagtaattgtagccccccacccagaatatgttgtctcacgttgttggttcttgatattttagtcacttgtttcttttccttgatgaagtttgcttccgatttctggatgttagcacaaagatgattaattaaccattatatatatcttccatattctgcactaatgcgcttaatcttggatgctatgtgttgtcaggttttcgaaggatatgttggagtattacttcttaagacggctttgcacgggcttgcatcggaatggcaggcaagaattatcaactatgtaatgtttgcagttgatagttaatcagatcttcatgagacttaggctgagtttgtttcttagagttcccaattccccttattttccgcgtgcacgctcttcaaactattaaactgtgtttttttacaaaaaaaattctataggaaagttgctttaaaaaacaaattaatccatttttcacgtttttttagctaatactccctccggttctatattaattgacgttttgaacaatgttgaggtcaaacttttataactttgaccatcaataactttaaaaatatttagtttaaagaaactagaacaatatatataaatttgtctttcaaagcactataataaaagtaaacatgcatttatttattgtatatattataatagaaaaactagcatggtggcccgcgcagattgcgcggctagcatcattatattttctatcatataatagcatatatgttttctcattatattattcaaatatattaaaatgacaacataattttaaattttgcaatatgtgtaatattcatattatattttatatacatgttagttattaattatttttaatatcaaattttagttatttataaattgtatatattcctatatggactctagactcgtcttttaatatttcctttttttaattccgaattttctgtaaattgtatttctatatagactctatgctcttcttccaatattatttatttttatttctgaattttcatattatattttatatacgtgttagttattaatatcaaattttagttatttgtaaattatatatattcctatatggactctagactcgtcttttaatatttcttttttaaattccgaactttttgtaaattgtatttctatatagactatgctttttttttcaatattatttatttttatttctgaatttttattatttctaattgtatttctatgtggactctaaactcatctttcaatattcttcaatttttaatttcgaatttcagttactaataaattgtattcttatattgaccttaaactcttcttcccatatttttcttaatttcgaattttagttatttgtaaattgtattttttatacagactctagactctacttttaattttattatgtttattccaaattttagttagttttaaattcctatatggactctatactctacttctagtatttcttttttaaattccgaatttctattttttttcttaattgtatttctatatggactctatactctacttctaatattccttatttttaatttcaaatttctattatttcctaattgtatttctatatggactctatactctacttctaatatttcttgtttttaattccgaatttcagttatttcctaattgtatttctatatggactctatactctacttctaatattccttatttttaattccgaatttcagttattttctaattgtatttctatatggactctagtctcttcttctaatattccttattttttaattccgaatttcagttatttcctaattgtatttctatatggactctagtctcctcttctaatattccttattttttaattccgaatttcagctatttctaaattgtatttctatatggactctgctttttctttttctccgattaatgtgagaatttctaagccatgagagcgaatgtggaagctcctttttctattcctttaattatataatagataatttgtatataggaaacttttgcatcaaatacaccatttactagctaaaaatgagttggtccctctttaagaaacgaaacgcagctccagcattaaacaaatggagagaataaatcttagaatgactatcagaaagaacagtctaatctattatgatgtaatacggcatttttattattgaaccaaccagagagaaagatgtgaaggtgcatcagtagtgattaacactgaatagttacggggggaaaaagtccattttaaattgggcctaacatttcatcgctccacgattaattaaatagtggtgatattagggttctattgaacaattaatcatagtgctaattactattgactagacattattagtgacatgttagttgaggaaattgacaaaataatgaatgaaaaataaaaaaatgcaggcgtacatggtgggagagcacggggacagctcggtggcgatatggtcgagcatgagcgtggccgggatgccggtgctcaagtcgctgcgggagagccaccagagcttcgacgaggaggccctggagggaatccggcgagcggtggtggacagcgcgtacgaggtgatcagcctcaagggctacacctcctgggccatcggctactccgtcgccagcctcgccgcctccctcctccgcgaccagcaccgcatccaccccgtctccgtcctcgcctccggcttcccacggcatcccccaagaccacgaggtcttcctcagcctccccgcccgcctcggccgcgccggcgtcctcggcgtcgccgagatggagctcaccgaggaggaggcccgccgcctccgccgctccgccaagacgctctgggagaactgccagctgctcgacctctaataaatcttattattatcatcgtcgtcgtcgtctcgtcacggaattaattaaagtacctactccgtacttagctagctacaataataaggattcattgatcactacaagagtgatcgactcgactgtagtatgtgtgtgcaatataatgtgctgtctatcaacaactactagtattgtcatttttttcgaaccagggaactttttaatgataagaagaaaaagacaagtacttattgtcgagcactcgtggacaacactgtgattgattgccttgatcaatcttaccaatttttggtagctgtaaataatttacatagtttgttggggcggatgagcaagcaagcaagctgaatgggctgttgatccggacgaacgagccgcgcattccttgcttaattaatgggctgtcagtgggcgaacgaacttggtggggcggacgtcaatcttttggcccaaaatttcatgacaagtgcagtgcggtggaaggaaaggagttgggccaggccggtaggattatttatgatgggctgggccggaaaaggcagcgatgatatagagcgggctgggcctcccaatggctagcaactcttcataggagaagaatcgtgcaacaatacacgcccaagagaagaaaccgcggcatggaaggaacaaatcgtggtgcgctctctgcgtctgcgtgtgcgcatggcatcgtgcagtccacaggacaggagacggcggatcgcaagacatccgcgccgcatcgggattccatcctttccctcatgtatactatctccgttccaaaataagtgtagccataaatatccgtgtttagcagtttaaccatccgtcttatttaaaaaatattaaaaaaattagtcatacataaagtactatttatattttatcatctaataacaacaaaaatactaatcataaacttttttcaaataagacgaacggtgaaacgttaaacatgaataaagctaaaacagtacttattttagaacggagggatcagtactctgcgtgagtgctcgtggcgtgctggttggaaacgaccattgactgattacgtgctacacgtggcagacagacatgtgggccctccccactcccttccatgcttcagcttcacacgatcgatcgatcgatggagatgcggcgatagttgcgctcctcctcattcacagtccacactgccatcagccatggggggcagccaccacctcttccgcttcctcgccgccgacgaccaccctttcttccccaccttcccaacctcctcctcctccttcctcctcgacgacacccacccatttttcttccctccctcctcctcatgcccactcggtttcacctctcctccttcatcgtcttgcccactcggcttcacctcctcctacgacctcgacgccgccttccaccaccatctcgacctcgacctcgaccttgacctcttcctcccaaccccgaccccacctgtaaccacctcctgccccgccctccgcgatcccttccttctccaccactccctcgcccaccgcgtctccgcgcttgagctcgccgccccacgcagcaagtacacctacgaggccgaatccgccggcaggaagatcaagtggaccacccacgacaagcccgacggcgaccggaccttcaagtgggaggcccagatcgacacccccaacgacgatggcttcgaccgcaagtggaagtgggagtccaaggcctccgccgccggcaccaccaagctcaagtgggccaaggaggtcaagggcaagggcttcctccacccatggtcgcacgcctactccgtcgaggaggtcttcggggacgacgaccaccaccacaaggcagacaagacagcagaaaacaaggtcaagcagcacaacaaggatacttctgccaaggaggagaagaagaagacga

SEQ ID NO: 9553 - DNA, 24350 bp, Oryza sativa
ctgagaggggggactggacttttccagattagaaacccagaacaagggagaggctggctgatactttgtagctccttcatacacagatctcccaaaacacaggagtagggtattacgcttctcagcggcccgaacctgtatacatcgcccgtgtcttgtgtgtttcctgtctcgcgagccttccacatacagagagcttagaatctctccctgagtccctggccgaaccggcaaaggggggcctgcgcggtctctcggtgaggagccccacgctccgtcatcaggcgcgccaggtagggggctctgcgagggattttctgagctctcgcactctttcgtgtgcgccaagcttttcctgttcagcccaatggccgagccagcaaaggcgcacgacctctccccgagtatgagcggtgacgacggggagccaaacccacgccgtcgagctcgtactccaccgccccctccacgccaaagtcctaggcgggagaaggcgctcgagagggccgaaggatccgcgacttcgacacccacaggaggtggagaagggcggcgagatggggagcgtcgcctcctcgtctacggcgacggcagcacgccccagggcgcgctccaagctgcgggcgcgctcctacgtcacccgcccgtcgcccatgacccggagtctccagcccaacgttggctggacgatgtggccaaattggtcatgactgcacggcagcgcctagatgctggtgggcggtcctccgccaccaaggcctctggtgctgctaccaccggctccgcatcgtcaagacggagggcgcggcgagcggcagccgctgttcgccattcggccgccactccttcgtcaacgcctccgacccgggaagatctgcgtggggaaccggatgctcgcatcagtatcgagcgccggcgtaatggccgacgtgctccccacgcaacggagggcgcctcctcgtctggagtgtcacctcaccacggacgcggggatcagccctccgtgcccccggttggtggtgtcggctgtagagcctttgtggcgagccttcggaatgtccgttggcccccaaggttccggcccaccatcgccgaaaaatatgacgggagcgtcaaccccgccgagtttctccaggtctacacgaccgggatcgaggccgccgggggtaacgacagggtcatggcgaatttctttcccatggccctgaaaggacaagcgcggggttggctaatgaacttgccacccgcgtctgtccactcttgggaggatttgtgccaacagttcaccatgaacttccaaggcacatatccgcgcccaggtgaggaagcggacttgcacgcagtacagcgaagggatgatgagtcacttcgctcgtacattcagcggttctgtcaagtccgcaacaccataccatgcatccctgcgcacgcggtgatttacgcgttcagggggggtgtgcggcacaaccgcatgcttgaaaagatcgcctccaaggagccccagactaccgcggagctttttcagctcgcggaccgagtggctcgtaaggaggaggcatggacctggaacccctccggttccggtgtggcagcttcggccgcccccggatccgccgctcagatagggcggcgtgacaggaggaggaagaagaggtcagcccataccgatgacgagggtcatgtcctcgccgtcgagggcgcttcgcgggccacccgaaaggggaggcctgcaggaggcaaaaagaacgaggccggcgctcccaacagggagcacccaaccggcaagtggtgcaccgtccacaacacttcccttcacgacctcgcggactgccgtgcagtcaaaagtttggctgagcggacgaggaagtgggaggaggagaggaggcaggagcgccgagagggcaaatccccggcggttccttccggtaatcggcgaagtgaggccaagcagaaggcccccgccgaggacatcgatgacggcgatgatgacctaggtttccaagagcctggggccaccattgccaccgtcgatgggggagcgtgtgctcacgtttctcgccggagcttcaaggccatgaagcgagagcttctggccgcggcccctactcatgaggcgacgtgtcgggcgcggtggtcggaggttgccctcaccttcgaccagaccgaccacccaccgtgcgttgcccggggagggcagattgcgatggtggtttctcccaccgtttgcaacgtgaagttggggcgtgtcctcattgatgggggagcggccctcaacatcctttcccctgcggcctttgacgccatcaaggccccggggatggtgctccggccgtcccagccaattatcggtgtgacgccggggcacacgtggccgttagatcacatcgacctaccggtcaccttcggtggatccgccaacttccgcacggagcgggtgaacttcgatgtggcggacctcagtctgccctacaacgcggtcctggggaggcccgcgttggtgaagttcatggcggtggtccactacgcctacctacagatgaagatgccgggccccggtggccccatctctgtccatggcgacctcaaagtcgcgctcgcttgtctggagcagcgcgcggaccacctcgccgctgcatccaagcccgagggtggcgacgagaggcttggcgcttccgcccccgccaccccgaggcaacggatgatcacaggcgacgaggtcccggtcaaggaggttgccctgggcgacggcccgtccaagaccacacggatcggtggtcttctggacggcaaataggaagacgcgctcgtctccttcctgcgggcaaacgctgacgtcttcgcatggagaccggcggatatgcccggggtccccagggaggtgattgagcaccgtctcgccgtgcggccgggcgcaaggccggtccggcagaaagtgcggcggcaggccccggaacgtcaagccttcatccgcgaggaggtggcgcgacttctggaagccggattcatccgtgaggtcatccatccggagtggctggcgaacccggtggtcgttcccaaggcgaacggcaagcttcggatgtgcatcgactacaccgaccttaacaaggcatgtcctaaggatccttaccccctgcctcgcatagatcagattgtcgactccactgcggtgtgcgaccttttgtgttttctagatgcatactctggttaccattagattcgcatggctagggaggatgaggaaaaaactgcgttcattacccccataggaacctattgttatacgacaatgcccttcgggttaaagaatgcaggtcctacttttcaacgtactactcgaatttctttgggtaaccaattaggacgtaatgttgaggcttatgtcgatgacttggttgtaaagacgcgcaaccaggaaatgttactctcagatctagcggaaacttttgagagtctccgctccgcccgcataaaactaaaccccgataagtgtgtgttcggtgtacctgcgggcaagcttctagggttcttggtctctgcccgaggcattaaggccaaccctgagaagatacgggctatagagcggatgcgcccccccagcaaacttagggatgtgcaatgcgtcaccggttgcatggccgccctaagtcggttcatatcgaggctgggagagaaggcgttacccttatttaagcttctcaaacgctccggaccgtttacctggacggaggaagccgaaaatgccctcacccagttgaaggcgtatctaagctctcccccagttctggtcgccccggagccagacgagcccttgttactctacttagcggcgaccccgcaagtagttagtgcggcattggttgtggagcgcgatgagaacagttctcatttcacgcttccccaccctgtgccgacttggcccgggagagagcagggaggagaggctcccgagccgaacggtgacccaaggcccccgacgaccggagttggccctctgcccacttgtcagacggtgctaggagcccccgacccccaggaaggccctgaggccactgtgggaaggccgcacctatcgcccttcgaccccgaggctaaccctgtgctgacccgacccgggaaagagcagggagaagaggcccccgagccgaacggaggcctaaggcccctgacgaccggagttggccctttgcccgcttttccgacgacgccaggagcccccgacccccaggacggccccgaagccactgtgggaaggccgcccctgttatcctccgaccccgaggtcatcagcacagaagataagtgcgccccgcgaggctgcttggacgaagagtgccccagggatgcggcccctagcgaagaggatcggccccaccgaaaggtgcagcggcccgtctactttgttagtgaggccctccgggacgccaaaacccgataccctcaggcccagaagatgctttacgctattctgatggcctcgaggaaactgcgccattatttctaggcgcatcgggtcacagtagttacgtcttaccccctcggtcaaatcttgcataatcgagagggtacaggacgggtggtgaaatgggcaatcgaactttctgagttcgatttgcactttgaaccacgccacgctatcaagagccaggccctcgccgattttgtggcagagtggaccccggctcccgagcccgtctcgatccccgaggccagcacggacccctcgcagctgcctcacaccgcccactgggtgatgcagttcgacggctccctgtctcttcagggcgccggtgcgggggtcacgttgacctctccgagcggagacgtcctcagatacttggtccgcctcgactttcgagcgaccaataatatggcagaatacgagggactccttgccggactaagagtggcagctggactggggatccgtcgcctcctggtgttaggtgactcccagctggtcgttaaccaagtctgtaaggagtaccggtgctctgacccgcagatggacgcctacgtgcgccaagtacggcgtatggagcaccattttgacgggattgagcttcggcatgtgcccagacgggataacatgattgccgacgaactctcacggctcgcgtcctcgcgagcccagaccccaccgggcgcctttgaagaaaggcttgcccagccgtcggcgcgacccgaccccttaggggagacggatgcgcctgaccggcccccgaggcctgtcggagtccaggcctcgggacccgaggggagtgctcccaactcccttagattgattgcttggatcgccgagatccaagcatacctcacagataagactctacccgaggaccgcgaagggagtgaacgcgtccatcgcatctccaaacgctacgtgctggtagaagggaccctctatcggcgcgcggctaatggaatcctcctgaagtgcattcctcgggaacaaggcgttgtgcttcttgccgatatccatgaaggcgaatgcggagcccactccgcctcgcgcaccttggttggtaaagcttttcgccagggtttctattggccgacagctcttaatgatgcggtcgacctggtccggcgatgtagagcgtgtcaattccacgccaagcaaatccatcagccggcccaggccctgcagaccataccactttcgtggccatttgctgtctggggactcgatatcctgggaccgtttaggcgggccccgggcgggtttgagtatctgtatgtcgcgatcgacaggttcactaagtggcccgaggcttatccggtcgtcaagatcgataagcactccgcacttaaattcattaagggcatcacggcccggtttggagtgcctgaccgtattattacggataatggcacccaattcactagtgaactcttcggcgactactgcgaagacatgggcatcaagctctgcttcgcctcacctgcccaccccagaagcaatggccaagtggagcgcgccaatgcggaaatcctcaaaggccttaaaaccaagaccttcaacatactcaagaagcacggcgattcatggatcgaggagttgccagcggtgctctgggcaaaccgaactacaccaagccgagcaaccggggaaacgcctttcttcctcgtctacggcgcggaagcggttctcccatccgagctcaccctgaggtctcctcgggctaccatgtattgcgaggctgatcaaaatcagcttcgcagagatgacctcgactacttggaagagcgaaggcggcgcgcggccctccgagccgcgcgctaccagcagagcctgtggcgctaccatcagcgccatgtccgggcccgatcactctgcgtcgacgacctcgtcctacgccgcgtccaaacgcgtgctggattgagcaagctttcaccaatgtgggagggtccgtatcgagtggtcggcgtcccccggccgggctccatacggctggccacgggcgacggcactgagctgcctaacccgtggaacatcgaacaccttcgtcgcttctacccctgaggggggggtcgggtgtcaagtttcgggctcgggccaaccccgcacccccctcgggcgtgcagggttggccgggggctacaacatatgcatattcttatttctcttatatctgaatttctataaaagcagtttcaatttcctaaaggctgtatctgtgctgttttttccttttgaagaatcttgacttgaaataggtcactcgtgctcaatcctgccctcgggggctcgggtcggctaaaatcgccaaacggggcccagaaccgagccgtgcctcgaggcgtggtgaactccgggggggaatcggcaaaaacccacaatcgggtcacccataaccctcggtcaccacgttcccggcctggccagtctcgacatgtggatctccccaggcactagccccgacccgcgccttttgaggaccagaacctgggcacaagcccttattcaagctaagacacaaaaggaccacggcacagatcatcctcatctcatactcacagcaagatgaaattaacacaaaaatttcttcatttttgattacagattaagttgatctatacaaaaaagaggcccgaaggccttagaagaaagaaaagaagaaaaaactgaagaatggcgggggtctgggggctcaatccgatgcgcccggatcgccggcctcgacgtcactatcgtctgcaccaccggcattgccctcctcgtcggagttgggggcgaacgcaagccgaggggccgagccctcgaagctgtcgacgatatggtcggcggcatcccggacctgcgcgcgcgcgcggtcctcggtcccaggagggaactcatccagcgccatccatggagagaaattggggtccctggcctggtaactcgccaggacgagctccaccgctccttgggcgaggtccctcgaggatgacttaattgtcttctcgagctcctcggggagccgttggagagccccggccatcttcgagaggcgctgggcgaggcctccctggttggcggcgtactttacggtccgccctctccagaggcccacttgccgaccggcgcaatctaggcgggagacggcgtcccaaagcatgccgggccctacctcgcctgccaagcggagggcttcgacctccccggcggacgagtccagcgcgccctgcagatcggcgatggtgcgttcggcagctgcgaggcgggcggctaagtcgctttcgcccgtggccgccccgccgctgcgcgccctcgcgtccagctccttcgcccgcgcctcgagctcagcggcccgttggttcagtacggccctctcggcgcgggcaccttccagattacggcgcgcctgctcctcctgcgctgcctcgcggagggacaggttgaccgccagctgttgcgccgcggcctcggccccctcgagagctcgctcccgttcggtgagcgcgtcctcgcggaggcggagcgtgaactcttcttcggcgcaggcagcctcgtacgccaccagcgttgcttcccggatggtgacggcggcctcgcggtccgccagatccctctccacgacgtaggcgcgctcttccagcgccatggcgcgcgcctcaagggcctcttctcgccgccgggacgccgcttcggtctccgccgcccgctgttctcgggcagcggcagcgtcaagcaccccctgggcggcgtcgagcttcttccctagctccgcctcccagctcccgtattgaaggcggagggtgtcctgcgcctcgttcatcacggtggtggcaatgagggcagccccccgctcctcctccacttccttggcgatctctgccagcaccttcttacgagtttcaagctccgagacgtgccggcggtgagccttatggcccacctccaccatggcctccaccgagcgtcgcccctcttcgacacgcgcccacgcggcgtcgagctccgcccgctctgcctgcaggacctccacctgggcacttaacccatccaacaccgtggtgtttgcggcggccaaggcctgcagaaggggctctgcgttcagtagggcgatagaaggcgtggggaagagccgccttggagaggatgccacgcggctcgggccgccgatggaagtgccggactcggggatgtcccccggacccggttggtcctgagcgtcgcccgagggagtaggcccaagcgacgcgcccgcggcctcgtcgccagctgccccggaagttgtcgcctgagtgtcgcctgagggagtgggcccaagcgacgcgcccgcggcctcgtcgcgagctgcctcggaagtcgccatcgcctcgtcctggcgaaatccggcctcctcccgagcggtttcctcggcctggcgagcccgggcggcctcctgggcggcctcctcggcttcccgtaggcgatccgcggcctctcgccggtcagattcccgcctgagggcctctgcggccgccggatcctcggcctcagactggccggacttggaatggcgggagggacgcgacgggatctcgctgaaacaaaagaaaaaaccagaagacgaacaagatgggtgagtgaaaactcgcgttgagagaatgaatacagccacgatgggtgagagacgaacctgcgagggggtcggttaaacgaccactttggaggggaaatgaggtttccccgagatggttctgtctcccccatcttacggggccgcttcttcttgcgctccccctcgggctgcgatgttggcgcggccccctccgggcgcctgttactggcacgcgccgccccgccccctcggggaggagatgggggaggtgttcctccctgcttcctcttcccccgggcgtcggcagggcggctgctccccgggcccctgtcgcgggacccagaagcacgaccccctctcggggtagattgttcccccctgcggctcccgcctgcgccgtcgtggccctttggagctcgctcctctgaggccccgaccgccatcataatggtcaggatggaggcgcggtctggatcgctgcagagggggaggattccttggggaatgagggccgcctctacggagttgagattcagcacccgttggaccaatatcttgaagtcctcaggagcccagtcccatctcactccctggtgggtcctcgtgaagtcttcggacccggtgtactcccaggcgccccgagcgcgtcgctggagcggcgcaatccgacgacggaggtagtcgccgtacaccatggcccctgtgagcccctgggatcgcaggcccgccaggcggtcgaggacggcgtcatagccatcccccagatctaccggcgcccgccagctggaggcctgcgccgggggctggctcggaagtcggaggcgcgcttcgtcggcgaggggagtgtagaaccagtcgctcttctagtcgtcccacttcttgcggagggcgcaggggatgtagcggttcagcaccggcccccgtggctggaagtagcagccaccgactaccgatggcggcgacaccgactgcacggtgaagaaccaccggaacagccgaagagatgggcgcaccccaatgaacatctcgcacagatgcgcgaagatggccaatgtcatcaccgcgttgggggtgaggtgcgccatctggagatcgtagaactccagaacatccatgaagaaagaagaaaatggtggaaccagccctgccattgcaaaggggagaaagaagacggaccgccccgggtagtctggcgccgggcgtccctcgcccagcgtgactatctcccggccggtggcagattccggcatgaagcggcgcgacagcccagcctgcctctcgctcacgatacgggaaggcggcagcacgctaccatcgagcagagcggaaccccgtgccatggcgccggaggaagagaagattaagagcgagcgcgtgtggcgaaggtagggcacaggaaagaaggagttagggcgcaagcggcgaagacaaggggaataatggcgaaaggaaggaaacagatcccttcctcagtgcctttatactcttgccaacgctgtgcccggcacctcgcttctcgctcccactatttcgccccctcgtttctcgcgcccacgcttccactaatcccattcgcccgcttgcggcgcatgaggtgggtatgcggttgtggcagtcgagatagatcatatcgtgcgcgcgttaattacgctcgccgaccgaagcgacgttaccatatcttcagacgaaacgaatcgccatgtccagatttgtgtgctactcaagtaatgtggcagtcttgaagagaccgctcattgttgacagccgagttaccattgccgatgtgcgtggtttgtgaccgttgagtttctgcccaattgtggagaccggtcccacctgtcaccaggtcttaggagtggcgtcatgcccgaccgtttcccttaaagagggcgatcgccctggcataacgccgggggctactgtcggtgacatgggatcaggagtatcatgactagaggtttgaggcagacacaatcgcacacgtggcctggtacccccgagggacgtcgggcccgagggtgatgcgttcgccctcctcttagtccccccgagggggtcgggccgcacccccctcggccccgagggccgaggcgccccgacccctcgtgggtttttgctccgcgtgtatgggttaggtgagcacagtggggctcacctaaccacatttattgcggtttggctgagcgtgtcacgccgcatgtaacgcagtgcagtgcactcgtttatccggtctgtgaccagtcacagaccggtcagatcgcgggttaggtggcgacaggcgatctgacgcacgcctcgccccatcccgtcaggacgagggcttctaggcgctcgtccccagctggagctagcgtgttacctcccagagatggcacgttagtcctggtcagatatatgccaggcttcatcctaaccattacaggcaagatgttgtgtgaagaagggcgagcatgtagattgctaagctgacacgtggtggacaagaatgaccgacgtgactggtctgataccggtcatgtcgtcagcaaacagccacgattccacgtcgcacctgctcccggcgaaagtggaggtagttgtgggccgtctcatcagaaggtgactcggacggcaactatacaaatctccgtccatttatgaaaagggggggggggggtaagtccccacaaaaaagagagaaatggtgcatgtggtatccccttaagatataaaaggaggaccttgcccacagagaggggggactggacttttccagattagaaacccagaacaagggagaggctggctgatactttgtagctccttcatacacagatctcccaaaacacaggagtagggtattacgcttctcagcggcctgaacctgtatacatcgcccgtgtcttgtgtgtttcctgtctcgcgagccttccacatacagagagcttagaatctctccctgagtccccggccgaaccggcaaaggggggcctgcgcggtctcccggtgaggagccccacgctccgtcaatctccaaaactacttcgtgaataaattccaaatatcaaaaccaataatcacatataccaattgttcatcatagaataagaatcaaaacacacattgatcttacagctaagtccaagctatccttggcctccagtttctttaatggataacaatgtcatcttttggcatcgcatccttcacggaggcatcgtttttttgagtcttctctatgtggtgttgttgtagtaggctcgacgatgattggctggtttagtgcttgtgtgtgtatggttggcgtgtggttttgagatgtgcactctgatgcacatcctttctttgcactggtggagaaaccatctttggtcggtcgaccaaattccacaatagtcccgattgcaataaaaaccaagactaaagattatctttagtcccggttgaaaaggttagagctactttttgatctttagtcccggttggttgactaaagatcatttttagtgccggttcaaaaaaggataggtgatatcagacccctctaatatctttagtcccggttggtaacaccaaccgggaaaaaagatcggcatgcacggagagatcgaggcgtacgcgtgactcggatcgagataaatatctcctcctctcctcacactctatctattcttctcctctcctccgatccccttctcctcgccatcttacgcgccgaggatcctctccttctctcctctcccccactcatcctctcctcctcccctcccctcccctccggcgggtggcgacggaagcagcagcgagatgaaggccgaccggtggcggcccggcgtgaggtggcgggatgagaggctggccggcaccggccgggcgcggggcggtggaatggagtccggccggtggcggcgggatgggaggccggccgggcaaggggcagtaggatggaggccggcctcgcactcccctcccgggcccagatctgtggatgattttttcttttcttttttgatgatttgtggatgttgatttctgaatgttgatttgtgaatgtgtttgcgaatgtttatgtgaatggttttgtgaatgtatatgttgtgaatgaatctgtgtgaatgtatttgtgatgttgtgaatgaatatgtttactgtgaatgaatcgatatgaatgaaggaaaaaactgaaaaaaaaataaaagagaaagaaccgaaggaggaaaaaaagtctttagtcccggttggtaagatcaaccgggactaaagatgcctgcgtcagtcacgtggctcaaccatctttagtcccggttggtaacaccaactaggactaaagatagatttttagtcccagttatttcacccgggactaaagatgggtatttttagtcccgtattcgtagtcccggttgtataaccgagactatatgggggttcccaaccgggagtaaagcccctttctccaccagtgttgacatcggacttttgatgaaaaacttttttataaacattttatcttatatcttaacaacattcggattacctctctcagtcatcgtggaaaaaaaaactgtccaagaagagcaatgcatatacagacttacagtacgtgtatgtagctggctagcgagtgcatactagctagtgatatcatctcagcgtattctgtttctctgtcctatgatcgatggattaattagctcattatatattgtgcaaactgcaagtaataactggtgggaaaatgttgattcagctgcaagtcatgcaggtatataacacatggatgaattaattaatgaatattaatgtaacgctattatagttgctagatggatatatatcactgtactagatataaatacatggatagaacacgatggggcatgtactgctgcttgcgttcaatctagctagatagatctgtgtttgtttctttagtagtactatatattttctggcctgcgcagcctcgacgatatatcatgcatctatatatgcatgggtaattaatgcctctagaaattaatcaaagcacattgtcgtgcatataagtatatatatatatatcgcatgcattctgtgtgcgtgtagtacgtaagtatactgtagttggtaaccactgccttaattttgctagcttgtctcgacaatttaattaaatgcctgatgaccaatgcaggtcgatcagtcatctctatatatagagtattatatacatgcatgtacgcagcaagtacacctgatgatgcaaattgagccgaccaaatttgcatgcatgcatatatatacatgtatggacttgatgcataattgattcaatataagtattagctacgacaattagcaagtcagtttttatgcatatatatgagtatagttttctcgaacagctagcgtatagtgtgcaaataccatgtatgatgtatgtaatgtgtacaaatgcaccgtatgcagataaatgtgtacgtacacatttatatcaataatgtatatacgtgttgtatatgtatctggaaaaaaagagagggggaaatggatggaaaggaaaagaaaaggaaggagtggggggcagatggagaggacgacggcatgcacaagtgacaaaaattgctacagtgaggaggatcgatactattgtgggtggggcccagtgggcttgaaggtgagtttggcccaccccaggcccaccgacagccctgacccgttactgtcaatcccccacccgggcccactgtacgtcaccccatccctcctctgcactgcattgctagcctaattcactgttcattgtcattttgtttgctcattcctatacccccgatctcgatccattttcgatcgatgtcgatggtcatatacaaatttcgcctcgactccatttcaattattaataattactccatacgttttcaaaacaaaatggcgtagctagttcgtttcaaaacagtaattcgttcacatatgcctgtgccctcctatgtactatcacacaaaccatgcaagttaacttgcgttcaatacaatcatacgttgccccgccggcaacctggcctttttcctttggagctacgctgtcggatggattattagtttatcctaaagccgcattagtatagctatatattgaattgaagtctacccatgttgaccttgcttatttttcaattatcatttcatataacagagttaattatacaaaaaagtgttatatatggagataggttgatcctgtccttcgagactaatctacgcgacactatgggctatacagccgtctacgtataactgtatatggagcccgtctcaaattatcacactagtacattttagccatgtgatggtttcttaggcagtactcccatccccccgtctcgaaacatatattagtagaatgtgttctatttatctctattcagatttcgttcttatattataagatgatgaagggaatacgttgtttgctttaccatagtaacttgctttctgcactttcatggacgcgtctcgtgtccacatatagtttacctaatttaactttaagcgttatatttgtgaccatcaattttattattgcacttttgtaaaatatataccagcttagacaattaaaaattgatacatgatgcatacgtaacacacgtacacgacttaattataaaatggttttcactggtcttcggttgctgacggcgccgcaaattgccagctaacttaaacccatttttacctctaatgaataccgattttgtagtagtgatgtgtgtcaggatcgatacacatatatacatggatgaaagtagtagatatattaatatacccgtgatccgatatttcaggatcgatcgagcgaggaagggatcggaagaagctatggggaggaggacgctcacgcatggacctgctggaccgtccggagtccggacaataataaaatcaagtgtaggagtacatgctgctccaccccgaccattgtcctcctgcattggacagtagcaatacattgccacattgcactgctgtcccctcctcccctctatctctatgctcttgctagctgtcccagctacttctcccgttttaaaatatagatatatttaaagttttagccaactgatatggaaaaataaacactcgagataacaaagtagatgaaaagttaagagatgattgttatcgaatgtaataagaaattaaacgaagagagatttattattgtatgaatactaagaatgtttttattttaaaataggagtatgtcgcgtgcaataggcaatgttggctagctacctattgcagcttagggttactttgaatcgtacgaataggaaaaggaaggaatataaaaacacatgatttttaatagtaatgtaagtggaaaatataggaaaaacataggaatttgattggaccgcgggaaaaattgtaggaatcggatgagatagatagatcgactcaaaggaaagattctcaaaaggttgaaactattgctaaatttttttcaaaatctttatagtattgtccattccatataaaatttatataaaatttttctatatgattaaaattctctaaaatttttatgtgtttcctttaaatcaaagtacgccaaatgtctccaaacaaaaaccatagctggcccctacgcacgcatggacgcacgtacattggcagatttggatcactagctagctagtgtttttcttttctttttcgtttacactagttttgattaattccctgctacatactcgtatatgtacgccgttaattaattaattaattgccattcgtcccgacatgtacaggttaataaatccatttgcacagtattttatctactgttttttaaatcttcatcgcatagtgtatagtactagctactctacatgtgttcgaaaagtttcagtgcacacagtacctatcgaaattacgttactgtggtagttacgtcacctatcgaatatatgtacttcgtgccatttactacctctaccttcattttctaatatataattttgttaaccttttgacatatatttaacattttattttttttccacggacatgaacaaatatataagtattcattagtaaagtcgtatcaaaataagtaacaattacatatttttaataaggttaatgatcaaaaataccttaaaaatcaacatcatatttttttaataatgagaagaatttcgttagaaatgaaattacacctaacttctacatcgaccagagaaactcacaacctaggacaaaagaaaccaaagccaaacataaacatattatgttatcttataccggtagaatcctaagcatctagtaaaaaaacaacacctctaagaaggtcctaacatttgtgtgccattgccatcggaacaagacgatattttcatccaaagcccgagatgacaccttcaataaaaaaataacaaacaagcattgacattgaatatagataaactagataagagttttcatcccggagtcattgtcactactttgtgccaccgtctggatgaaatgagcatgatctacgatgtgcagccaatatggacaaagtgcaagcctcctctacccaccaccaccgagctaatggaagaagtcaagtcatcgtcaagccgaaatcttggaaaaaggaaaaactacggacgaatatatcacagtgtcttgcctgatatattatgagaatggaactcgttggctcaactagatgggagggtgccacaacgcacttcaaatctcccttgtttgatctcgcttggattgcaaaccatacctggtgtcgatctggcacgtcgtggtgttgggcagagaagaaaatcccatcacaactaccgccggcggttgcagtggcgaagacggtgcataggtccaatggtgtcgtagaagcagaagctcactgtcgaggccatccccgacacaccccatcgtcacaaccgcgtcgaagttgccccgtgcccatgcagccatggtagctagcccggcaacgacgagataccacccggacgccatggccccctggatggatggggtggcggcgctggtgaaggttgatgtttgtcgccctcaggtatcatgtggagcggattactagtttatttgtgatatagtataaaccgtataacaaagttttaaatggtgcaagatgttttaaagaaaaatgatgctgccccatgcgtccatcgaggttagttagtacaattaggcattctttaaaaaaagtacaattaggcgaatgatgtctgctattatgtgtgtacgctattactccctttgtccctaaatatttgacgccattgacttttttaaacatattagaccgttcgtcttattcaaaaaatttaagtaattattaattcttttcctatcatttgatttattgttaaatatacttttatatatacatatagttttacatatttcacaaaagtttttgaataagacgaatggtcaaacatatttaaaaaaagttaacggcgtgaaatatttagggacggagggagtattatatcagtgagcagcgaaggcatcatacaagacactgcttgagcgtttcatgtacacacaaaatgcattgttaattttatttgtctgtacgtactttgtttgtagctacaaagtatcttgcataatgttcggattaatgtggtctgaatttaattgtgaattttgaacaggggaaggaagtgccgtcccgtgtgttaaattactagatgaatccgaccacgaccatttcatagatttaatttgatttgagctatatagcactgctgcaacggtttgcacggatgtgtcccactgacgcaattaaacacacaccttgctgttagcagtagatcgattcgaccatgcatagctccaaaaccaattttgtgttgaataatataaggtcagatgaaattaatatagttagctggaaactgatcaatccaatatttcgtgtcatcccggccgtcggcggcgagtccgtgtgaaggccaccgccaccagctagcagcctctgctctgccgccgacgaccaccaacgttgtttatttcagtacgacggaattaaccaacattcatgcatgcatggtttatttaaaccgattttctggaggagattaccgcccggacgtccgatgtaactcaaaatatcgaactctacccactggtggagaaaccctttgtagtcccggttcgtaacccccctttagtcccggtttccaaaccgggagtaccaatccgggactaaagatcgctatctttagtcccggatgaaataaccgggagtaaagatcaatctttagtcccggttggtgttaccaaccgggactaaagatagagctgaccttttttttttttgcatgcccctgttgctgcatggtttatatatatatatatataccatgcatatatatgcatacatatatatatgtatttatacatatatatgttatgcaaatgcatatgtatatagatatatatatgaacaaaatatatttacattatagaaaatgtgtacacatgcatatagaaacatatgtagtcatgtattaattacaatccattatatgtcctagctagctacgatttcgacgtagtagtactcgctgctagctcagaagctaaggaccggtgaattgtgtttccgtcgtagtagaattcacccttgggatcaaggatttcttcgttgatgaatcccatgagttgttcttgaaccgccgcgataaattccttgtgtgtggtcaggttatccctcatgcgaataaactatatgaatgtatgaaattgattagtaattaaacaagaaatcgctacgtaatgaaattttgaatttatttgtacgtacatcgagctctcttgtggtgatgatttggtctgcaaggcagtggcaatactcgcacacgtaatagccgcacaagttagttccctgcttttgctttgcgcactacaaataaatgacaaacaacgagagatctaattaatatacacttgtatgtatttgaatcggagaaatataaatgtagagcatgtgtactcacaggaaatttgaacttccgcctaagtctttctctccatttgccgcggaccaaatgacggaaccgataccaagccctacatggagtttaaagctatgattcgtagtagcaattaacataacaagattttcttaattaacaaaggaacttatgacggtacctgtctataagttcgaaaaccttgtcaaacgtagactcttttttatccattgagtcatatacgttgacggtgcaggcctccaggtcgatgagtaaaagcacccagtggaatatgcaatgtgcgtgggatgcattacatatgaaacacttagcaagttcgtacgggaatgaaatttggtatgtaggaagacagtaaaattaaactaactctgtgttgtatggcaacagtatgaacgtcttgtaatgctgcgccttcaggagatggacgagattgtcctctgtttcttgtggatattggtcgagcattgcgacgtttactttccgagggtcgatgaatcaagtatcgaaaaccctccgccgtcgggccctttgaatctccattctacaacgataaaagggagtatattattttctatggtctacttatatacaaggacctaattaattaaaggagacgtatagtaagaaatctaactgaacgatatacttacaaaatccagcaactcataatagagacgtcgagggcgtccagctggtatagttcgtagattccccttaaattgatccagagaatgtcatctccttgcaagaagtccgtgtccctgatcctcgctccgatcatctctctaccggtggcgctcatctccatgtacagctgatggaacttgtacatttgtgtgggtagggactgcagcagctcaggcttgacaagcggtttaccgagttcgtacatgtatttcacttccgccttttcgattggtgtgactcctagcaattgatccgtagttagaccggtgtcagtaataaattgttctatcgtcatttctttaccggtcaccaacggctcgatctcctggtttggttgctctccaagctgagggactggtttggactttccagaagatgctttcttcagcgttcgctcatagtccgatagcttgatggcctccttgacagatgcagacatacccctgaagaagttcctgacactggggatggccatgcccgacgccaccttcatgttgtgagagattatttattagtaatcaacatatataagcagcaactagcggaatggctaaatcttacctttattgataagttcttcaaaggaatatgcagctcacatggtgtccgctgagtgatgtcatcaacgggacaggtcgattcgtcctgtgtttgcatggcgtccatgctctgtgatcctacctgccccgttgaggcgcagctgctacggtttcctgacgggctcaccattgcaggaggaatggtcggctggggatcatgggaccgatgtgcggccatgcgttcatcaaccttccttgccacctcctcttgcatgttgagttcgtagctcgatacccggaactctaggtctgcaatcttcgcctcggtatctctcttgctcctcatccgactcctgtacgtgtggatgtcctccttgaaaccaatcttccaaggaatcacccctttccctcgagttcgtcctggatgctctggagtctgcagggcgagtgtcagctcgtccctatctctgtctggtcggaacgtgccctgagaggaggcttccactgcatctgttagtcgtcgcgcagcctcttgtatctgatagccgaagaccagtgagccatcagctgggttgagcgttccaccgtgagcatagtaccagaacttcgatcgttccggccaattggctgttgccggttcgatacccctctcaatcaagctagcctccatctgctcccacttcggcatcgcgacgctatagcctcctgaccccaagtggtgatggtacttcttcttggcggcattttctttgtttctttccatcatcgccttcccttgttcacctgtcttatatgcaacgaactcgtcccagtgatcccttagctttgggaatgtgtcgaagttcggtgtctgccccttcagtatatacttctggtacagatctcccttgaagctctgaaactgttctgccattttcttcagagtccaccttttcactttgtcctctgtacccgcaggaagggtgaatgtctcgagcattgtggtccacagcatctctttctccgaatctgggacaaaactctcatgatctccgcgtgcccttgttcttcgccagtacaccgtactgataggcacgttatcccgcacaacccaaccgctgtgacgtacatagttcttggcggcttcggccggggcactaggacgtccatcttcttccacttccgttatgatgtgccgaccctcaagcttcttcgctgcacctcgttgcccgcgtgccctcttctgtccaacggagggttgactaccactagcctcctcctcctggttcccctccacatccctttccacgtgcccctgctggttcccctccgcatccctctccacgttcccttcctcgttcaagtactggtttggatcctcgttcccctcttcttcattccagtactggctgcttccctccgcgattgtatcgtacaatatctgttcctcatcgcggtcagccatctgttgatacaagaaacatctgctaagtcacgagacatttatgttttaacaatctaagtcatgtatgctaagtgtaaatgtcgtacattagaaccctacacaaccttacgtgctaagtctaattacaaatcgtgatataagctaagtctaggtgacgtatattatataaccctagctagtaaataattatatactaagtctaattacaaataaaataatcttatattaaaactcaaataatattacatgctaatactaaaatagtcatgtatatgctaagtgtttcgtgcgtatatgctaagtctaattaagactacaatagtcaattgctacttgtcgcaccaattccgtagtcaataattacataccaagtctaattacaaataaagtaatattatattaaaactcaaataatattacatgctaagactaaaatagtaatgtatgctaagtgtttcgtgcgtatatgctaagtctaattaagactacaatagtcaattcctagcagtcgcaccagttccgtagtcaataatgtcatactaagtctaatttgcaataaaataatcttatattaaaactcaaataatattagaacactacacaatcttatatgataagtctaattacaggtctaataatcttaattaattgcattacaaatataacaatcatttatattattacgtcacttgcctgctccaattccttctagggctagctcttccactcaggcttgacggacgactccgacaacacgtcttttctgcaagataaaaaaaatgtattaggataaatgcgaagtaacatatatatatatatatatatatatatatatatatatatatatatatacatgtatatatatatatacatgtatatatatatatatatacatgtatatatatatatacatgtgtatatatatatatatatatattgcattttacgttaacgttcgtcctcgttcgttcgctcgttcacgttccctagctcgttcacgttcgttcgatcgttctcgttctcgttcacgttgtcgtggcaacgtacgttgacgtgttcgttctcgctctcgttcgttcgatcgttctcgttctcgttcgttaacggcggtgtggcggcatcggggcggcggttggcgcggcggcgtggcgacggcggcggcggcgtggcgttgtggggccgtggcggcggcggcgtggcgtggcggcggtggcgtggcgtggcgtggcggcggcggcgtggcgtggcagcggtggcattgcgcgcgcggcggcgaaggcggcggcggcgtggcgacggcggcggcggcgtggcgttggcatgcggcggcggcattgcgcggcgtcgaaggcggcggcgtcaaaggcgacggagagagatcgagatcggagagatcgagatgcatgaagggagatgcggcggctctcaccccagagatgcggcggcagcggaggaggcggaggcggcggcgaggacgacgagctcgagacgacggcgagatacggcggcgtcggcgcggggatttgccctaggcagtggcggcgaaggagagaggccgagagagatcgatcggccgaaaacgtttaagtgttggtgaagaagacgagggcgcaccgggaatatatatacccctggatctttactcccggtt

SEQ ID NO: 9554 - DNA, 31161 bp, Oryza sativa
tttcgggcgagatgtgagcatttcggtgggggcgaaatttcgaaccgaaatttcaaaccctgtttgtgcttcacgttctttacaatcaagttaataatattgtaataagtaacagctaaagtagaggatgggattttcattgcattatcaaaaaaatgtatatatatattcgacgaatatttccaccggtttcacctcacaacataagctatagctatctatcttcatcagcagcagaggcagaggtgagctgagcacaacacatctccccttgagtagttgagtactgcacttgagtgatataaagcttagctagtatactgactgcactaagcttaaacctcactcgactactaccacaaaagtgaaatattcttggctagtctagtctactcgagaacgccaccatcaccatggcgatgtcgccgcacgaccagcacgagcacgagccggaccacgcccaccgctcgccgtccaacggcacggcagcgaccagcaccatcgccaccaacagatggggtccctactccggcgccggcgacttcgccagcaacatggccgtcatcctcgccgccctgctcgccgcgctcgccctcgccctcgcgctcaacgccgccgtcaggtacctgctccgccgccaccgccgggccaggcaacaaccagccgccgccgccgccgccgccgaggacccggagaagccgcctgtgcaggaggccgacccgccgccgccgcccccggctctggtgtactccgcggcgggcaccaagctggccggcgccgcggagtgcgccatctgcctcgccgagttcgtcgacggggacaccgtgcgcgtcatgccggtgtgcggccacggcttccacgcgcgctgcatcgagcgatggctcgccggaggccggcgctcgtcgtgcccgacctgccgcgcgccggccgcgacgccgcccggcgccaccgctaccgagcccgcggcggtggcgccttgatgcatgcatgcggccaactgatttggcccttgttcttggcaagctctcctctctcgctctctctctctctctctctctctctctctttcttcgcttctttctttcttgcttgctttcatgtgtaaatattcgtcaagatcgagatgatggatttgatccaactggatggatcatttggtgtctctctctgttttgtttggctgttcaaggagatgtatgaactgagagttttagattaggctgaaaaagtgaaaatgattcattactctcctgttcgattatcacaacatctgttcagttattggcttcttttttcccatgtgaactagtgttggtgccaagaaattcctctggaatctgggctcagatttgcacagataaaggtttatcagacagggcctttcaatgtagaggctgcaaatttgcttccaactccgggaatttgcacaacctgcagatttgtttacaggggagtggtgaaacatcttcattttttatatggagactggagagacatcctagcttgttttgtgaagggaaagaaaaacacaaacagttaggtgatcattcaatctcgagtattcaatatggtgtttatatcgttggtttgtggtcactcaatgtgtggtgtgcctcttgaatgactgaaatcgggaattcagtatgcatgtctgcttgcttaattctgacggaaaggcaagtgccactagtactctagtactgcctccgtttcgaaaatgtttgacgctgttaactttttagcatatgtttgaccgttcgtcttattaaaaaaaattaagtaattattaattattttcctatcatttgattcattgttaaatatatttttatgtagacatataattttacatattttacaaaagtttttgaataagacgaacactcaaacatgtgctaaaaaatcaacggtgccaaacatttcgaaacgagtagtatataaagttgcatgattctggcaaactttggtaatatctagattggcaaatgcatgataatcagtgctactttactattactacgctggatatttatacagaagcttaggttgtgcttagcctacgcctaatttggcaaagtggataatgcacatcaatctatcctgttgttactatccgacagtgagttgtcctgtatttctactcacatcgattgattcagagtgtggctgcctttgatgccttcagtcattcagatagacgatagttactgactctgtgttcaacgtggttagttctccacccaaacgacaatgcttccggttccagaccatttcatcgcgtgaaaaggttagcactaattagtggtggtgttgtgcatgaagatgcctgaccaaaattatggatagtcaaacagtagtcaaattgatgcgtcctcccgggtgttggataggagtacattgctcttttttccttttttgtgtgtgtatgtgtgaatggaggagtataatcaagtgtttaccgcaaacccgctctggcctatacagaaaggcagcccgcaaaatatgggcttcccacgcggcctattgcttcttcccgcttcctccaataggcctacagtgggctgacgatcaatatgggcctaaatcttagggatcgtagctggcccggccttttgtctgatgggcctgaattaaatcaggcccagtagtaacacatccatagtacgaattttttttatttttaattttttttattaaaagttttaaaaaataattttccattttgaaaattgacggaagtagtcgcctaccgccctctgggaaggcgatttttaaaaatcgccctcccagagggcggcgaaaatgacgtggcagacggccgttcgctctcgggcgacggccgtcaacgaaatttgcaggcggcccccttgccgccctccgcgagggcgattttgtactgtgcggggggccgcctgcaaatgggcggcgagggggggcatggaaatttgcaggcggcccccttgccggcctccgcgagggcgattttgtactgtgcggggggccgcctgcaaatgggcggcgagggggcatggaattttgcaggcggcccccttgccgccctgggggagggcgattttgtactgtgctctatatttttgtataaatatcaatagttatcaaatctttttatattgaaaactatacaagattaaaatctccaagactggtaaaatacaattttattattttttagggcatatttggattgttaccgtacaaatattttgttaccgtacaaatattttattaatttttagggcatatttggattgttagtgccaaatttttcttcacgaccaaatatttggtaaggtaaaattgcatttgatcatatttggtttgctgccaaaatgtaaaattgtagtgaagaatgttctacataatctcaaatctagattacgtattaccaatgaataggcttccattttcgtgtgttgtgtgctagtgggaaagaagatatgaagaggttgccttcagattgtcaattatatagcgtcgttttcactgcaatatatgtgaactcaatgagatacattatgcattagatgtgacaagacgatcacgcgtgggcgtgattcactttatgtaaacaggcagcgccgaaagttgatagtgataactcgagctgccgcttttcatgtgtgctgttgtggactatgcgcgctactggatctgacactaccgtgcagcgccgaaagtgtgttgtcgtgagcataagttgttctagcaccatatgaatgaaaagaactatgtagacgagacaaacacaagtagtactgcagtagtaatagcaaaagtagtactgctttacaagtttgtaagccaaaagaaacggtcacataaggactgaagaggtagaacactactgacgaggcctcttacccctgtccctcctaccctgcgccctaatgtgcccgtgggagtacgtgagtcggtccgggggtacggcacggccaacccgtcctgcctgtacaggtgtgacctctggctgctcctgagtgtgcgcctctggagctcctccaagctgagaggagcctagtacgtcgtggtggtctgcaccgtgcaagtcgtcgtcgtagaactggctagtaggaccagtcctaccggcgtgagatgaagaggccccagtaccgaagatcccggctgcaaatcctgctggacaaggaccatcagtttcgtacaggtatttaacagtattaataaaaagtaaagtaccgtgtgggcgagggatcgacgctccgtgagaggaagagctggcgaacgcgcccgaagaggtggcgaacgcccctgcggagctcgtggaagcgccggtcgtgcctgcgaacgcgctcgaaggcagacgaggtcctgcgatgaggaaacgtgcagttaaaacatggtgacataatcgtgcaaaagctgaaacaaaaatgaactaatatctgggctgaactgtaccgtgcgaaaccggtgttgtaggtcgcactgctctgaagctaggggcgctcgaaggcaaacgaggtcctgcgaggatggaacatcaagttaccgcggggtgatgttttcgtacaaaaacagaaacaaaacttaagaaacctctgggctgagcagtaccgtgcgaaataggtgccgtaggtcgaggtcctgctccgacggtaggcgcgcgaggccgtggttgtaccggaccagctggaggtacgacgtccacggcgctgcgacaggagaagacgcgcatgaccgaacgcatcttctcctgcatccggtcgaaggtcaccctctgctcaacgtcagtcaagtgcaaacctctgttcaacctcacttggactgcggtgatatcggcactgatatcccgtgcggcatcagcctatgcaagatggaaataacaaattcagtagttgtcctatattatgcaagataaatgaaataattgtaagaagtaatacaaatgggacgtaccgccacgaagtagtctcggtcacggtgcgtgggatacgcgtccgtgacagcggcaacgtgcggctctggggcgtctggagtgaaggtcacacgcgcacgagtgcgaggaaggtaccagcgaaggtagtcacggtagttctcctccgtgtgtgggaagagctcgttgatcacctcctctgtagctaacacccagtcgtcaacgtactgctgtacacgtggagcccaaagtgcgcctgctagctgtccccgtcgagtcaacctgtgaagagaggtaaattatatggctcgatgaagtaattatcataaaaatttagaaatgaacaatccgaactcacgagtggtcggcagggaggacggtcggctgcacgttgcccggaaacacctgcctaagtccgaactgtctcatcacacgctgcgggcagtgaggctcaacgaaaatgtcgaacaccatcggcaggatggtgagccagtaagcctggtcgcgtgtgcacaaggacgaaagtcctagcggtgctctcgcagcgacggcctcttctgtgtacggctcccagatgacgtcgctcggctggagacggtcaaactcgaacacgaagtccgggtaaccacgtctcacctggacgtgagcgtaacgacgctgcaataaacatgatcggaattagacatgttatgtgaagaaaaaaaaagacgactgataaacttataacgcagcgaagttgcactaaccccacgtcgacaccagtaagtccccatcgtgggaccgtcctctggccactgcgcgctgcgaccaaccccgtagggtgcgctgtccaccactgtcgacctatggcaaacctctcggctgcccaaagctgaagcaacatagggcagccagcgatgatcgctcccgcgtcagttgtcacaccccgaagttttcctccctagtcaaaattgtaatttataattgaccctaagaaaatgctggtgaaatcaggagaaaaccctaagaaagtaatgcaaataataatcggatttgacatgtggaatttttcttgaattctacatgtcgaaattcattaacaggatttttagtggaattttcagagctctagaaataattttaaccaattaaaaatcactaaagtgcaattgttaattccagggaaaatcctttttccttttctttttctttttcctctcttttccctcctttttgtcaagtgggccgtcggcccacttctcccttccttcccctcccttactgggccggccgcaggccgaggcccagcccgacagccggccgcccgcctccctcctctcggggtcgccgacaggtggggcccacctgtcggacccgtctccctcctcccgccgatcccgctcgcgccgccaccgccgcaaccgacgccgcgcccacgcctccgtctctcccgggccacgtcgaccacgcccgcgcgtgcgccgccttccccgcgcccgttcccctccctctcccgctcgcgccgcgcccgagatggccgggattcgaaaaccgaatcccgcctctctctcctccccactcccccacgtcggccgtcgaatcccgccgctcccggccacgtccggtttccccatcccctatttaagcatcaccggcaccccctctcgctttttccccattgcgccgacctctcccgagctccccaacgcctccgcgccgtgcaaccacccgccgccgccgcttttgctactccggccgccgctagccgccgctaggctcgccgccgtctcacgccgtcgccgccgttagcttcgcgtggccgaggtccacctcgtccgcccctcctccgtcgaggttcgtcgccggagccctcatctccacgcgcacgggtgagcgccacctctaccgccgccttcggccatggatcccgatcgccatggtccatctctctctctctaattcctctcttctccttccttagggcacgccggagctcgtccgctagccgacgccgtcctcccgtggcttgccgtcgccgtccgccatcgccttcctccgcgccggccaccctcggtgaggcatcccctccctccttttccccttcctctcctcctagagccgctagccgccactctccgccgccggacgatcgccgtcggtcgtcgctttgcgccgctgccgcatgcgcgccgccgccgtgtgagcgccgcgccgccggcgccatggtcgccgccgtctcgcgccgcgcccgcgcgccccggccgcgaggtcccgcgccgccgtccgatctacccttgggtagatcggggccgtcggttcggccgccacgtggcgccgccgcccctccttttccccgggtcgctgaccggtgggcccgcgcgccgccaccccccttcctctctctcccatgccgctgaccggtgggtcccgcatgtcggcgccgcaccccccccctcgctgacgtcagccctggttaatattgcgcaataaattatttaaggatttcttttatagtattaaacacagtgaatcttctaaaattcataactaattcatccgagctccgtttaagcccattcaagtctcagtaaatcaagaaaaatgtgtagaatccattaaaaatggttttgttctctgtttcagtagtcttatagcctgtttgcaatgattgctttgtatgtcgctagattccggttccttcgacgctccggtgtacttcaagatagtcgccgaggttcccccagcagcagagcaaggcaagtcatgcttgtcacttgaacatgttgatcctatattgcaaatgctctattgttttctttcaaatattgcattgttttataatatcactatgggatggatacctattgttacagccatgcttttggatatcatgctcctttgttagcttgggttataacatgattagactttggactaggaattgcttagccatgcttagttcaactagcacacattggggatctcatttaaaacctagactataggtttatatgataatgttgctggtgttggttaaataaagtgaaccacatggtgggctgtgggtgcatggttttgctagtcgcacccatggcagttaaggaccggttcgcgggatgccctggaagaatttatcgtacttaccacaagccagcgtgggcaacggctgggcttgtagtgtagctttcctctagccgacgcatccaggcaagggtgggcgtgatggagtttggatgggccctgcgacggtctatgcggcttccggattcacctaggcacgagaggggactgcccgctgccttgcgaggagtgggggtgaaacctgaggtgtggtgtgcttggttagagggggttatgcgaagggtcctgtcacggcctctttccggtatgtcgtggtgacatgtcggcgcacggaaacgtgtcgtggggctgtgtcttgtgggtacagttgtacacctctgatcagagtaaaactattcgaatagccgtgcccgcggttatgggcggtcaaccagattcaccgtgattagtctcaccctagtgtaatctgttgaacttggatagtttaggtggatggttgggcctgtcgcaacgtgggttagcgttggacagcggatgtttaatactgtttaattttttttacaactgtttttgcattaaattcctgtttataaatgccagtatttatgcaaatgaacctgcttagctatcccttgttaaatccatgcatcatacccctattccggtatgacttgctgagtacagtgggtagtactcagtcttgctctacttttccccccaacctcagagctcgagtatgtgtccgatggcgggttctccgaggagtaggcttcgtccgtgccgtcgaggatgcctgtggagtggtgttcccgctgccgttcaagtcaaggcttagctccagtttcttttgttttccgctgcatctctgtaagacttttataatgtttgtaagacgtggatctgtatgtcaacattgtcgtttgtgtaccccggctggtcctggacgggggttttaatacacattctgcttggaattctattcgggaatttctgggcgtgacaagttggtatcagagccgaccttgaccgtaggacaagccaaatggaaagacctaagagccctctgaatccttttcattgcatatgttctttgcaattggattttgttccgggaaaacggggatctgttcttgtggttcaagggaaaaatcttggtcgctcgtttaaagtgagttttccaaaacgagtcagtctagggttttagtaaaattattgggatttactcgtcagtcagttgggatttgatgggtgaaatgcattcggtcctagctcggtatcatgggttgcaaggtgtttatgcttcgtttgttactactattatgtatctaatttcccattattttatcgttatgtgagtctgtcttatttattcgcgctcatgtaaaatgatctatgcataaaattttgctcttatttgattcctttatttgagtctttattgctttatttaaatttggatttgagcatacattgatcctactcctttgtcttctctagatggccggtcacccacccaaccaccgcggagaaggcatgatcgacttcgtggcagagctggcacgcatgacactggtagtgggctaccccgacgcgccggagtacacgaccattccgccgctcagtggcgagcttcctcaccgtgtccgcttggaggtccatggctacgtggggacttgcctcgctaacatggcggtcgaggcatctggaggcacagcagatcacgcctgtcaggaggcagcctacttgatgatggccagactacgggagcgccacgactacatcttccacgacacggcgtaccgctaccacccccgtcgagcccatggtgatggcgtcagctccttccgtccgacagctggcgagaacgacaccaccttcggtcacatgtgtgctgtgatgaggggattggaccggatgcactcggacctgcacaaggcgaccaaggccttgaatgatgggaagctcatgaggatcgtcgctctgaaggacgaggtagcgcgcctgaagaaggagaatgctcagttgaagggtcttccagcgccaggaggagtccggatccgcactacgccccgtaagaggacgactacacctgtgcgcatccagctggcgcccaggaacccacctccaccagcggcccccgcagcagctccagctccgcccgcagttcctgcagctccagctccagctcccgcgttcactctctccttcgctccagcatcagccgccggaggttcagccagtggtaccggaggatggctgtctgctactcccagtggcagcggcgagactgatccgtcaggctccaggagtcgctcagagggaccgggtgacgagcaggaggacgctttcgactccaccgaccgcaggagccgttccgagcattaggctcgtttttccactagttcatcgactgtctagtttttgtttgttagtttgtgtgtttaggttgcttgtttggggtcagttgacggtcgatatcatgtgtctatgatatggctgtcttaataaggatttttgcttgcctttttaagtgttttaattcagatcagaacaattgcagttttaattcctatataataaagcttagttcttgagcatctgtttttcttcttttccccgtctgttcttccctccagatggtctacaccaggactggtagccgcgcaacaggcgagggcagcaacggtgaagaacgcgctgatggtgtgcaccccaacggtgattctggcaatggtccgccaccacttcccgagaatccgacgcttgcccaagttatggcacatcagactcagatgatggccgcgatgatgcagcagatgcagcagcagcaccagcagatgcatcagaggatgatgcagcacgccgaacagcagcaccagcagtttggtccccctccccctcagtccaagttgcctgagtttctacgtgtcaggccacccaccttctccagcaccaccaaccctatggaggcaaatgactggctccatgcgatagagaagaagctgaatctcctgcagtgcaatgatcaggagaaggtcgctttcgccacacaccagcttcagggtcctgcgtcagcttggtgggacaaccacatggccacccgcccaccgggtacggaagttacgtgggcagagttctgccgtagctttaggaaggcacaggtgccagacggggttgtagcgcaaaagaagagggaattccgggcgctccatcagggcaacaggacagtgacagagtacctccacgagttcaatcgcctcgcgcgatatgcaccagaggatgtccgcactgacgccgagaaacaggaaaagtttatggcaggcctggatgacgagctgaccaaccaactgatatccggggactacgctgactttgaaaggctggtcgacaaggcaatccgtcaggaggatcagcgcaacaaaatggacaggaaaagaaaggcggcgcagttccgatccaaccaaggtagtcagcaccgaccgcgcttcactcccggacagcagggtggacctaccaccatgatcgtccgacagcaccgcccgttccactctagcaacttccaccagggcgctagcggcagtcagaaccaccagggaggccagcccaaccgcggtgcagctccacgcccaccaatggcaccggcacagtcagcccagcccgcgcaagccaagaaggagacgggagcaaaaccagggtcttgcttcaactgtggcgagcttggccacttcgctgacaaatgcccgaagcccaggcgtgccgggctaaggtttatccaggctcgtgtcaaccacgcgtctgcggaggaggcacaagcagcaccagaggtcgtactgggtacgttccctgttaactcaatccctgcaacagtactttttgattctggtgcaacgcattctttcatttcaaagaaatttgtggggatgtatgggttaaggaaagaagagcttagcacaccaatgagggttcataccccgggaaatagttcaacctcagtcagttttagcccttcagtgctaatagaaatccaaagatcaccatttctagccaacctcattcttctcgaatccaaagacctagatgtcattcttgggatggattggctgaccaagtttaagggagtcatcgattgtgcgaatcgcacagtcaccctgaccaatgagaaaggagaaaccgtggtgtacaaatctctagtctcgccaaagaaaggagcctcgttgaatcagattgagacggaaatcccagtggacaccgaagagaagaacttgagaaaattggaggacatacccatagtctgcgagtatccagaggtgttccccgaagacctcaccaccatgccacccaagagggagattgaattccggattgatttggcaccaggaaccgctccaatctataagagaccgtacagaatggcggccaacgaattagcggaggtcaagaagcaagttgatgaacagctgcagaaagggtacatacgaccaagcacttcaccttggggcgctccggtcatttttgtggagaaaaaggataagacgaagaggatgtgcgtcgattatcgcgcacttaacgaggtcacaatcaagaataaatatcctttaccgcggatcgacgatttgtttgatcaactgaaaggagctaaagtgttttctaagatagacctgcgatcaggttaccaccagttgagaatccgggaagaggatattccgaagacggccttcaccactcggtacgggctatacgagtgcacggttatgtctttcggacttactaacgcacccgcattcttcatgaatctgatgaacaaagtgttcatggaatttctggacaagtttgttgtggtattcatcgacgacattcttatctattcaaagtccgaagaggaacatgaacaacatctccgtctggtactcgagaagttgaaggagcaccagctatacgccaagttcagcaagtgtgacttctggttgacggaagtcaaatttctgggtcatgtcattacagctcagggtgtagcagttgatccatcgaacgtggagtcagttacaaaatggaccccaccaaagaccgtgtcgcagattcggagttttctaggactggcaggttattaccgccgattcatcgaaaacttctccagaatcgcccgacccatgactcagttgcttaagaaagacgagaagtttaaatggacagctgagtgcgacaagagctttgaggagctcaaaaggaaattagtatccgcaccggttttgatcctgcccgaccagacgaaagacttccaagtctattgcgatgcatcccgtcacggacttggatgtgtcctaatgcaagagggcagagtggttgcatatgcctcgcggcagttgcgtccacacgaaggaaattatccaactcatgacttggaattggcagcagtggtccacgctttgaagatctggaggcactatctgatcggcaaccgctgcgaagtatatacggaccataaaagtctgaaatacatcttcacccaaccagatctaaaccttcgacaacgaagatggttggaactaatcaaagactatgacatgagtattcactaccacccgggtaaagccaatgtggtggcagacgctttaagccggaaaagttactgcactgctctatgcatcgagggcatgtgtgaggaattgcggcaggagtttgaacatctcaacgttggaattgttgaacacgggttcgtagccgctctggaggcacggcctacgctcgtggatcaagttagagccgctcaagtaaatgatccggaaatagcagaactgaaaaagaacatgagagtcggaaaagctcgggatttccacgaggatgagcatggcacaatctggatgggagaaagattgtgtgtaccggacgacaaggaattgaaggatctgatactcaccgaagctcatcagacccagtactccattcacccaggcagcaccaaaatgtaccaagaccttaaagaaaaattttggtgggtcagcatgaggagagaaatagctgaattcgtcgcactctgcgatgtttgccaacgagtgaaagcagagcaccaaagaccagcaggtttactccaacctcttcaaatcccggaatggaaatgggaggagattggaatggactttataacaggactgccccggacatcatcgggacatgattcaatctgggtagtcgtggatcgacttaccaaggtggctcactttataccagtacataccacctatacgggaaagagattggcagaattgtacctcgcaaggatcatgtgtttgcatggggtacccaagaagatagtatccgaccgaggtagtcagttcacctcaaagttctggcagaagctgcaggaagaaatggggacccgtttaaatttcagcacggcctatcacccgcaaactgatggtcagacagagtgagtcaatcaaatcttggaagatatgttgagagcttgcgctcttgattttggtggagcttgggacaaaagcttaccatatgcggaattctcgtataacaacagctaccaggccagtctacagatggcaccgtttgaagctctatacggccggaagtgccgcacacctctcttctgggatcagacaggcgaacgtcagctgttcggaacagaagtattagcggaagcagaagagaaagtcagaatcatcagggagagattgaggattgctcagtctcgacagaagagctacgcggataaccgtcgaagggagctaacttttgaggccggagattacgtgtaccttcgtgtcaccccgctccggggagtacaccgctttcagacaaaaggcaagttggcaccacgcttcgtgggaccgtacaaaattttggaacgaaggggagaagttgcctatcagctagaacttccatccactatgatcggcatccatgacgtgttccatgtgtcccaattaaagaagtgtttaagggtacctgaagaacaggctaattcggaacacattgatatccaagaggacctaacatatgtggagaagccggttcgcatacttgacactagcgaaaggagaaccagaaacaaggtcaccaggttttgccgtgttcagtggagtcatcattcagaagaggaagcaacctgggaaagggaagatgagttgaaggccgcccatccgtacctcttcaccagctccaccgaatctcggggccgagattccgtttaaggggggtaggtttgtcacaccccgaagttttcctccctagtcaaaattgtaatttataattgaccctaagaaaatgctggtgaaatcaggagaaaaccctaagaaagtaatgcaaataataatcggatttgacatgtggaatttttcttgaattctacatgtcgaaattcattaacaggatttttagtggaattttcagagctctagaaataattttaaccaattaaaaatcactaaagtacaattgttaattccagggaaaatcctttttccttttctttttctttttcctctcttttccctcctttttgtcaagtgggccgtcggcccacttctcccttccttcccctcccttactgggccggccgcaggccgaggcccagcccgacagccggccgcccgcctccctcctctcggggtcgccgacaggtggggcccacctgtcggacccgtctccctcctcccgccgatcccgctcgcgccgccaccgccgcaaccgacgccgcgcccacgcctccgtctctcccgggccacgtcgaccacgcccgcgcgtgcgccgccttctccgcgcccgttcccctccctctcccgctcgcgccgcgcccgagatggccgggattcgaaaaccgaatcccgcctctctctcctccccactcccccacgtcggccgtcgaatcccgccgctcccggccacgtccggtttccccatcccctatttaagcatcaccggcaccccctctcgctttttccccattgcgccgacctctcccgagctccccaacgcctccgcgccgtgcaaccacccgccgccgccgcttttgctactccggccgccgctagccgccgctaggctcgccgccgtctcacgccgtcgccgccgttagcttcgcgtggccgaggtccacctcgtccgcccctcctccgtcgaggttcgtcgccggagccctcatctccacgcgcacgggtgagcgccacctctaccgccgccttcggccatggatcccgatcgccatggtccatctctctctctctaattcctctcttctccttccttagggcacgccggagctcgtccgctagccgacgccgtcctcccgtggcttgccgtcgccgtccgccatcgccttcctccgcgccggccaccctcggtgaggcatcccctccctccttttccccttcctctcctcctagagccgctagccgccgctctccgccgccggacgatcgccgtcggtcgtcgctttgcgccgctgccgcatgcgcgccgccgccgtgtgagcgccgcgccgccggcgccatggtcgccgccgtctcgcgccgcgcccgcgcgccccggccgcgaggtcccgcgccgccgtccgatctacccttgggtagatcggggccgtcggttcggccgccacgtggcgccgccgcccctccttttccccgggtcgctgaccggtgggcccgcgcgccgccaccccccttcctctctctcccatgccgctgaccggtgggtcccgcatgtcggcgccgcaccccccccctcgctgacgtcagccctggttaatattgcgcaataaattatttaaggatttcttttatagtattaaacacagtgaatcttctaaaattcataactaattcatccgagctccgtttaagcccattcaagtctcagtaaatcaagaaaaatgtgtagaatccattaaaaatggttttgttctctgtttcagtagtcttatagcctgtttgcaatgattgctttgtatgtcgctagattccggttccttcgacgctccggtgtacttcaagatagtcgccgaggttcccccagcagcagagcaaggcaagtcatgcttgtcacttgaacatgttgatcctatattgcaaatgctctattgttttctttcaaatattgcattgttttataatatcactatgggatggatacctattgttacagccatgcttttggatatcatgctcctttgttagcttgggttataacatgattagactttggactaggaattgcttagccatgcttagttcaactagcacacattggggatctcatttaaaacctagactataggtttatatgataatgttgctggtgttggttaaataaagtgaaccacatggtgggctgtgggtgcatggttttgctagtcgcacccatggcagttaaggaccggttcgcgggatgccctggaagaatttatcgtacttaccacaagccagcgtgggcaacggctgggcttgtagtgtagctttcctctagccgacgcatccaggcaagggtgggcgtgatggagtttggatgggccctgcgacggtctatgcggcttccggattcacctaggcacgagaggggactgcccgctgccttgcgaggagtgggggtgaaacctgaggtgtggtgtgcttggttagagggggttatgcgaagggtcctgtcacggcctctttccggtatgtcgtggtgacatgtcggcgcacggaaacgtgtcgtggggctgtgtcttgtgggtacagttgtacacctctgatcagagtaaaactattcgaatagccgtgcccgcggttatgggcggtcaaccagattcaccgtgattagtctcaccctagtgtaatctgttgaacttggatagtttaggtggatggttgggcctgtcgcaacgtgggttagcgttggacagcggatgtttaatactgtttaattttttttacaactgtttttgcattaaattcctgtttataaatgccagtatttatgcaaatgaacctgcttagctatcccttgttaaatccatgcatcatacccctattccggtatgacttgctgagtacagtgggtagtactcagtcttgctctacttttccccccaacctcagagctcgagtatgtgtccgatggcgggttctccgaggagtaggcttcgtccgtgccgtcgaggatgcctgtggagtggtgttcccgctgccgttcaagtcaaggcttagctccagtttcttttgttttccgctgcatctctgtaagacttttataatgtttgtaagacgtggatctgtatgtcaacattgtcgtttgtgtaccccggctggtcctggacgggggttttaatacacattctgcttggaattctattcgggaatttctgggcgtgacaagttggtatcagagccgaccttgaccgtaggacaagccaaatggaaagacctaagagccctctgaatccttttcattgcatatgttctttgcaattggattttgttccgggaaaacggggatctgttcttgtggttcaagggaaaaatcttggtcgctcgtttaaagtgagttttccaaaacgagtcagtctagggttttagtaaaattattgggatttactcgtcagtcagttgggatttgatgggtgaaatgcattcggtcctagctcggtatcatgggttgcaaggtgtttatgcttcgtttgttactactattatgtatctaatttcccattattttatcgttatgtgagtctgtcttatttattcgcgctcatgtaaaatgatctatgcataaaattttgctcttatttgattcctttatttgagtctttattgctttatttaaatttggatttgagcatacattgatcctactcctttgtcttctctagatggccggtcacccacccaaccaccgcggagaaggcatgatcgacttcgtggcagagctggcacgcatgacactggtagtgggctaccccgacgcgccggagtacacgaccattccgccgctcagtggcgagcttcctcaccgtgtccgcttggaggtccatggctacgtggggacttgcctcgctaacatggcggtcgaggcatctggaggcacagcagatcacgcctgtcaggaggcagcctacttgatgatggccagactacgggagcgccacgactacatcttccacgacacggcgtaccgctaccacccccgtcgagcccatggtgatggcgtcagctccttccgtccgacagctggcgagaacgacaccaccttcggtcacatgtgtgctgtgatgaggggattggaccggatgcactcggacctgcacaaggcgaccaaggccttgaatgatgggaagctcatgaggatcgtcgctctgaaggacgaggtagcgcgcctgaagaaggagaatgctcagttgaagggtcttccagcgccaggaggagtccggatccgcactacgccccgtaagaggacgactacacctgtgcgcatccagctggcgcccaggaacccacctccaccagcggcccccgcagcagctccagctccgcccgcagttcctgcagctccagctccagctcccgcgttcactctctccttcgctccagcatcagccgccggaggttcagccagtggtaccggaggatggctgtctgctactcccagtggcagcggcgagactgatccgtcaggctccaggagtcgctcagagggaccgggtgacgagcaggaggacgctttcgactccaccgaccgcaggagccgttccgagcattaggctcgtttttccactagttcatcgactgtctagtttttgtttgttagtttgtgtgtttaggttgcttgtttggggtcagttgacggtcgatatcatgtgtctatgatatggctgtcttaataaggatttttgcttgcctttttaagtgttttaattcagatcagaacaattgcagttttaattcctatataataaagcttagttcttgagcatctgtttttcttcttttccccgtctgttcttccctccagatggtctacaccaggactggtagccgcgcaacaggcgagggcagcaacggtgaagaacgcgctgatggtgtgcaccccaacggtgattctggcaatggtccgccaccacttcccgagaatccgacgcttgcccaagttatggcacatcagactcagatgatggccgcgatgatgcagcagatgcagcagcagcaccagcagatgcatcagaggatgatgcagcacgccgaacagcagcaccagcagtttggtccccctccccctcagtccaagttgcctgagtttctacgtgtcaggccacccaccttctccagcaccaccaaccctatggaggcaaatgactggctccatgcgatagagaagaagctgaatctcctgcagtgcaatgatcaggagaaggtcgctttcgccacacaccagcttcagggtcctgcgtcagcttggtgggacaaccacatggccacccgcccaccgggtacggaagttacgtgggcagagttctgccgtagctttaggaaggcacaggtgccagacggggttgtagcgcaaaagaagagggaattccgggcgctccatcagggcaacaggacagtgacagagtacctccacgagttcaatcgcctcgcgcgatatgcaccagaggatgtccgcactgacgccgagaaacaggaaaagtttatggcaggcctggatgacgagctgaccaaccaactgatatccggggactacgctgactttgaaaggctggtcgacaaggcaatccgtcaggaggatcagcgcaacaaaatggacaggaaaagaaaggcggcgcagttccgatccaaccaaggtagtcagcaccgaccgcgcttcactcccggacagcagggtggacctaccaccatgatcgtccgacagcaccgcccgttccactctagcaacttccaccagggcgctagcggcagtcagaaccaccagggaggccagcccaaccgcggtgcagctccacgcccaccaatggcaccggcacagtcagcccagcccgcgcaagccaagaaggagacgggagcaaaaccagggtcttgcttcaactgtggcgagcttggccacttcgctgacaaatgcccgaagcccaggcgtgccgggctaaggtttatccaggctcgtgtcaaccacgcgtctgcggaggaggcacaagcagcaccagaggtcgtactgggtacgttccctgttaactcaatccctgcaacagtactttttgattctggtgcaacgcattctttcatttcaaagaaatttgtggggatgtatgggttaaggaaagaagagcttagcacaccaatgagggttcataccccgggaaatagttcaacctcagtcagttttagcccttcagtgctaatagaaatccaaagatcaccatttctagccaacctcattcttctcgaatccaaagacctagatgtcattcttgggatggattggctgaccaagtttaagggagtcatcgattgtgcgaatcgcacagtcaccctgaccaatgagaaaggagaaaccgtggtgtacaaatctctagtctcgccaaagaaaggagcctcgttgaatcagattgagacggaaatcccagtggacaccgaagagaagaacttgagaaaattggaggacatacccatagtctgcgagtatccagaggtgttccccgaagacctcaccaccatgccacccaagagggagattgaattccggattgatttggcaccaggaaccgctccaatctataagagaccgtacagaatggcggccaacgaattagcggaggtcaagaagcaagttgatgaacagctgcagaaagggtacatacgaccaagcacttcaccttggggcgctccggtcatttttgtggagaaaaaggataagacgaagaggatgtgcgtcgattatcgcgcacttaacgaggtcacaatcaagaataaatatcctttaccgcggatcgacgatttgtttgatcaactgaaaggagctaaagtgttttctaagatagacctgcgatcaggttaccaccagttgagaatccgggaagaggatattccgaagacggccttcaccactcggtacgggctatacgagtgcacggttatgtctttcggacttactaacgcacccgcattcttcatgaatctgatgaacaaagtgttcatggaatttctggacaagtttgttgtggtattcatcgacgacattcttatctattcaaagtccgaagaggaacatgaacaacatctccgtctggtactcgagaagttgaaggagcaccagctatacgccaagttcagcaagtgtgacttctggttgacggaagtcaaatttctgggtcatgtcattacagctcagggtgtagcagttgatccatcgaacgtggagtcagttacaaaatggaccccaccaaagaccgtgtcgcagattcggagttttctaggactggcaggttattaccgccgattcatcgaaaacttctccagaatcgcccgacccatgactcagttgcttaagaaagacgagaagtttaaatggacagctgagtgcgacaagagctttgaggagctcaaaaggaaattagtatccgcaccggttttgatcctgcccgaccagacgaaagacttccaagtctattgcgatgcatcccgtcacggacttggatgtgtcctaatgcaagagggcagagtggttgcatatgcctcgcggcagttgcgtccacacgaaggaaattatccaactcatgacttggaattggcagcagtggtccacgctttgaagatctggaggcactatctgatcggcaaccgctgcgaagtatatacggaccataaaagtctgaaatacatcttcacccaaccagatctaaaccttcgacaacgaagatggttggaactaatcaaagactatgacatgagtattcactaccacccgggtaaagccaatgtggtggcagacgctttaagccggaaaagttactgcactgctctatgcatcgagggcatgtgtgaggaattgcggcaggagtttgaacatctcaacgttggaattgttgaacacgggttcgtagccgctctggaggcacggcctacgctcgtggatcaagttagagccgctcaagtaaatgatccggaaatagcagaactgaaaaagaacatgagagtcggaaaagctcgggatttccacgaggatgagcatggcacaatctggatgggagaaagattgtgtgtaccggacgacaaggaattgaaggatctgatactcaccgaagctcatcagacccagtactccattcacccaggcagcaccaaaatgtaccaagaccttaaagaaaaattttggtgggtcagcatgaggagagaaatagctgaattcgtcgcactctgcgatgtttgccaacgagtgaaagcagagcaccaaagaccagcaggtttactccaacctcttcaaatcccggaatggaaatgggaggagattggaatggactttataacaggactgccccggacatcatcgggacatgattcaatctgggtagtcgtggatcgacttaccaaggtggctcactttataccagtacataccacctatacgggaaagagattggcagaattgtacctcgcaaggatcatgtgtttgcatggggtacccaagaagatagtatccgaccgaggtagtcagttcacctcaaagttctggcagaagctgcaggaagaaatggggacccgtttaaatttcagcacggcctatcacccgcaaactgatggtcagacagagtgagtcaatcaaatcttggaagatatgttgagagcttgcgctcttgattttggtggagcttgggacaaaagcttaccatatgcggaattctcgtataacaacagctaccaggccagtctacagatggcaccgtttgaagctctatacggccggaagtgccgcacacctctcttctgggatcagacaggcgaacgtcagctgttcggaacagaagtattagcggaagcagaagagaaagtcagaatcatcagggagagattgaggattgctcagtctcgacagaagagctacgcggataaccgtcgaagggagctaacttttgaggccggagattacgtgtaccttcgtgtcaccccgctccggggagtacaccgctttcagacaaaaggcaagttggcaccacgcttcgtgggaccgtacaaaattttggaacgaaggggagaagttgcctatcagctagaacttccatccactatgatcggcatccatgacgtgttccatgtgtcccaattaaagaagtgtttaagggtacctgaagaacaggctaattcggaacacattgatatccaagaggacctaacatatgtggagaagccggttcgcatacttgacactagcgaaaggagaaccagaaacaaggtcaccaggttttgccgtgttcagtggagtcatcattcagaagaggaagcaacctgggaaagggaagatgagttgaaggccgcccatccgtacctcttcaccagctccaccgaatctcggggccgagattccgtttaaggggggtaggtttgtcacaccccgaagttttcctccctagtcaaaattgtaatttataattgaccctaagaaaatgctggtgaaatcaggagaaaaccctaagaaagtaatgcaaataataatcggatttgacatgtggaatttttcttgaattctacatgtcgaaattcattaacaggatttttagtggaattttcagagctctagaaataattttaaccaattaaaaatcactaaagtacaattgttaattccagggaaaatcctttttccttttctttttctttttcctctcttttccctcctttttgtcaagtgggccgtcggcccacttctcccttccttcccctcccttactgggccggccgcaggccgaggcccagcccgacagccggccgcccgcctccctcctctcggggtcgccgacaggtggggcccacctgtcggacccgtctccctcctcccgccgatcccgctcgcgccgccaccgccgcaaccgacgccgcgcccacgcctccgtctctcccgggccacgtcgaccacgcccgcgcgtgcgccgccttctccgcgcccgttcccctccctctcccgctcgcgccgcgcccgagatggccgggattcgaaaaccgaatcccgcctctctctcctccccactcccccacgtcggccgtcgaatcccgccgctcccggccacgtccggtttccccatcccctatttaagcatcaccggcaccccctctcgctttttccccattgcgccgacctctcccgagctccccaacgcctccgcgccgtgcaaccacccgccgccgccgcttttgctactccggccgccgctagccgccgctaggctcgccgccgtctcacgccgtcgccgccgttagcttcgcgtggccgaggtccacctcgtccgcccctcctccgtcgaggttcgtcgccggagccctcatctccacgcgcacgggtgagcgccacctctaccgccgccttcggccatggatcccgatcgccatggtccatctctctctctctaattcctctcttctccttccttagggcacgccggagctcgtccgctagccgacgccgtcctcccgtggcttgccgtcgccgtccgccatcgccttcctccgcgccggccaccctcggtgaggcatcccctccctccttttccccttcctctcctcctagagccgctagccgccgctctccgccgccggacgatcgccgtcggtcgtcgctttgcgccgctgccgcatgcgcgccgccgccgtgtgagcgccgcgccgccggcgccatggtcgccgccgtctcgcgccgcgcccgcgcgccccggccgcgaggtcccgcgccgccgtccgatctacccttgggtagatcggggccgtcggttcggccgccacgtggcgccgccgcccctccttttccccgggtcgctgaccggtgggcccgcgcgccgccaccccccttcctctctctcccatgccgctgaccggtgggtcccgcatgtcggcgccgcaccccccccctcgctgacgtcagccctggttaatattgcgcaataaattatttaaggatttcttttatagtattaaacacagtgaatcttctaaaattcataactaattcatccgagctccgtttaagcccattcaagtctcagtaaatcaagaaaaatgtgtagaatccattaaaaatggttttgttctctgtttcagtagtcttatagcctgtttgcaatgattgctttgtatgtcgctagattccggttccttcgacgctccggtgtacttcaagatagtcgccgaggttcccccagcagcagagcaaggcaagtcatgcttgtcacttgaacatgttgatcctatattgcaaatgctctattgttttctttcaaatattgcattgttttataatatcactatgggatggatacctattgttacagccatgcttttggatatcatgctcctttgttagcttgggttataacatgattagactttggactaggaattgcttagccatgcttagttcaactagcacacattggggatctcatttaaaacctagactataggtttatatgataatgttgctggtgttggttaaataaagtgaaccacatggtgggctgtgggtgcatggttttgctagtcgcacccatggcagttaaggaccggttcgcgggatgccctggaagaatttatcgtacttaccacaagccagcgtgggcaacggctgggcttgtagtgtagctttcctctagccgacgcatccaggcaagggtgggcgtgatggagtttggatgggccctgcgacggtctatgcggcttccggattcacctaggcacgagaggggactgcccgctgccttgcgaggagtgggggtgaaacctgaggtgtggtgtgcttggttagagggggttatgcgaagggtcctgtcacggcctctttccggtatgtcgtggtgacatgtcggcgcacggaaacgtgtcgtggggctgtgtcttgtgggtacagttgtacacctctgatcagagtaaaactattcgaatagccgtgcccgcggttatgggcggtcaaccagattcaccgtgattagtctcaccctagtgtaatctgttgaacttggatagtttaggtggatggttgggcctgtcgcaacgtgggttagcgttggacagcggatgtttaatactgtttaattttttttacaactgtttttgcattaaattcctgtttataaatgccagtatttatgcaaatgaacctgcttagctatcccttgttaaatccatgcatcatacccctattccggtatgacttgctgagtacagtgggtagtactcagtcttgctctacttttccccccaacctcagagctcgagtatgtgtccgatggcgggttctccgaggagtaggcttcgtccgtgccgtcgaggatgcctgtggagtggtgttcccgctgccgttcaagtcaaggcttagctccagtttcttttgttttccgctgcatctctgtaagacttttataatgtttgtaagacgtggatctgtatgtcaacattgtcgtttgtgtaccccggctggtcctggacgggggttttaatacacattctgcttggaattctattcgggaatttctgggcgtgacatcagtcttcgtgcacgcctcacagagggcacggtacgtggctgctagcacggcagaaccccagctccactgcggcacgtcctgtggctgagcatccgtgatggaccgtgcgtagtggaccagccggaagtccacagcgtgcccgtgggtgttagtgaacatcacccacccgaacaaccacaacaggtacgcctcaagggagcgtcggaccgagtaatcatcagcgtcagggtgcagaaggtccgcctacaattaagaatgaaatgttagtacaaaacactcattcggtcgcaaataagcacgtatgataataacaacttatttacttacagtgaactggagcaaccaagccttgctaggcccgactgtagagtacggaggaatggtggtggtcggtcctaggtgtggaaggcgcatcacctgctcgaagcgcgcagtgatatcctccttccacccaaaaacaccgtccacgggaccaactgctgctcccgccagcggtagcccgagcaggtacgacacgtcctgcagtgtcggagccatctccccacagggaaggtggaacgtgtgcgtctcaggtctccagcggtctacaagagcggcaaggagtgaccggtctgcatcccaccgcttcgctgggtcacggtcgtccgccgccgcctcaacaagcctacaaagtggtagaaggcctgccgcacgcaacctgtatagagcaaacttcaaacataagtacaacacaaagcaaagttgagttgaaatgtgaacatacgcgtaccaaggaacgtgacgggggtcgacacgcaaccactcgcgcgacgtgcgtggacggaaggtgccgagctgtgcaccctcgactgctgacaggaacgagcggtggttcctgtcaatcccacggttcaacagcgccggtgtgtcgtacgccatacctgcatcaaataggttgatcagaaacatataaataattagttcaacataagtaataaatgttcataagcgaattactaacacatattaaacaagagtacaaacaaacaaaagtgtttagtccgaacactcatcacgataacattatgatacaacaccgaatagttcgcaatactactagtacaacaatagtcggaggtactcattacaacaacattgaattgaaattacacgatagaagtatttagtctgaacactcattacatcacaacagcattttatttcctaaatcgaaagcattgttacaccatggaatcgcctgctgcgcgacgacgccttggccttgcgcgcctgcttgttgttccttcaccaggtggtcgcctaccatcacttgcctgtccagatggactagcatctgcgccgcttggaacttctgcattcttcgggcatttcttgtaagtatggccgcgcagatcacacttgctgcagcgtaaagtcctcccacctgcttctgactcatccatatcatttctgatgcgtctagtttggcgtcgaccctttttcacccttaacttagatggatctggaatataaaaaacttgggcactcagcgttgtgtaagatcctgagatcccgaacccatatatctcctcactccatgtatgaaagattgcttctttcctgaaataatttgagacgtacacattgggagatatgccacaatcaccggcagcagcaagaacgtgtgagcaaggaaggtgatgaagcttcggcttcatacaactgcaggtacatccaccatccgccttcaagacacattcctgcacggcttgcttgcgatagataccacgcctgctcctatcaacacacattatttcataccgatgcacttgtgtgccttgagcaacaactcgatgtctccgtgcctttttgattttatcttccatgtactttgtcactacattgccaaacactatgttgttatcggccatggacggaccaattttcttgtatcgatccctaaagtacgcttgcgtgccgtgaaggatgaattcaacaatagcaaccaatggaagtacccgaactcctcgcattacccagttgtacacctctgccaaattggttgtcattatgccataccgagatccatcggtgtcgaacaatagagaccacttctccttaggctcattctcaatccactgagtgaaatttctgatggacgaccctgacctccttctcattgttggtgggtcatcatgtaatgcaccaagaggtatgggaggctcgtcaccttcaactagtggtctgcgagattgctcatctgtttgcttcgttgtcaactcatctaacttgtcccacaactcattaaatttcttctcttggttctgtgcacagagcctcttaaagagctccataagatgcttgttcttgaattgcttgtagaaatttgcacccatgtgacgcatgcaccaccgactccgaacatcaggccacttagctggaagtcccttctcatcccaaccgttctgcaagtagtcaatagcccgcaacatacccgcatgacgatcatgtataaggcaaacgttgagcctcatacgcaccactgcaatgtgcactctctctaggaaccagtaccagctttcagtgttctcactctctacaaatgcaaaagccataggtagaacctggttgttcccatcacacccaattgctgtcaatatctgatctcggtatttacctgtcataaaagttccatctatgcatagaacaggtcgacaatgcacaaaagcattgatgcaagcacccaatgagaaaaaggctctttgcagcacactctttgttcgatcatcaaccgatgtaaatgtatgtaggtcatagtacgtattattattcctctgggcaatggtggctaacaaacgaggcaaattatcataagaagcttcaaatgtgccatacctcatctcaatgatcttttgtttggctctccaggcctttgcatagcttatggtgtacttgaatttgttctcgatgtgcctaataattgattttggttcaaagccaatgttaccaacaacactgctgtacatctcacttgccacagaagctgaagtgatgtttcggtgatacttctccaccccttgtaagtagcacttgtgctcggtcacaatgctaactttccaataatcattccatttacccttatatgcatggacacgccacggacaatcttccttcatgcacctcacttcatacacataatttgttgacttgaccaccctaaactctctctgcaaggaaactgcccaatgcttcaccgcctccttcatctcatccttatgagcataccttgcaccctcaattacctcgttctccttatactcccagggtacatgatcaccctctgatataacaagtccagagaagtcctcatttgcccaatcagtggccattacatccccttcctcatcggatgatgcgtcgtcgtccgcttcctcattatccgaatcttccctctccatttcatcaacaattataccgactctctccccct

SEQ ID NO: 9555 - DNA, 96071 bp, Oryza sativa
  unsure (1)..(96071): unsure at all n locations
cagtgacccgagtactatattagcaagctgatcacataactgctacatgcatgatgatactacatacatgcactgattaacacatactagtaacctttgagataatttatttttatttatttgattgtcattttgattatatggttgtattcgttataattaaatctttacaacaagatctcagaaggttatattttgattgaaaaattatatatgttttaatcgttaagatttaatgtttcacgtgttagaaataaatgttccatctagaatttgattatgttgcacattttaagttttttatctgatagatgttgttttactgttgcacacgggatcaataaatatattatgatgtttcattacttatttgtggatgttgcacatcgtattatttgaatgtttcatcaagtatattgtgtgcaacagttacaaaaaattagtgaaacataagaaaatatctattaaaacatctaaataatactgtgatcgacattttgttgcaacggtaaacttaaaatttgtaatacaaagtgaaattccatttgaaacgtttatttctcacacatgaaaatctaattgcacatgctgaaaaacacacacacacacacattatttttttcatcggatcatgtgagatcttattacggtgatcttcctataacatagaaaaacaccacatgcaatattacaaataagtatctgaaacatcaaccaatatttattgaaacattccaataacaccgtgtgcaacactaaaaaggtcatcagaatacaatgatgtgggatattgttccgaagatttgattataatgaatccaactacataatttattcatagtttggataaataggtggaggaaagaaacatttgaattctccaccattatgaacagttttactaaatctgagtgcatgcacggatgcacctacaccaattgatgtgtacgttcgatttcttccttccacctggatggctgatgtgaagcatttttccgattttgttaacacagtaagtaggagtactccattggaacatgacgcataatactactctacttaatccgtaatatgcggaccatatatatacatatgcctatactatactccctccgttaaaaaaaagccaacctctctcgtaggttagcttttgtttttttacggaggaagtgcatatgtagagtgggtatgcaacagggtttatgttaccgtcggtaaccgcgcggttaccgcttttaccatgggggtatggtaatagaaaataccgcggtaatctcctttaattcaaataaatttaaaaaataatttaaatttttaataaattttacacggttatcacgtgctgcgcggtaaccctagcccggcggtttggaaaacctggtatgaacaagccgtgacgacgtgagtgaagcgtggcgtggattggataagggaggagaaacaataactccctcctcctcctcctcctgctcctagtactagtagagcagcggcggcaatggcggcgcctcctctgctgagcctgagccagcggctactcttcctctccctctccctccccaagccacagctcgcccccaacccctcctctttctcccccacgcgcgccgcctccaccgccccgccacctccggaaggggcgggccccgccgcgccatcccgcggggaccgcttcctcggcacccagctcgcggccgaggccgccgcccgcgtcctcgctccggaggacgccgagaggcgccgccgccgccgggagaagcgcaaggccctcgcgcggaagccctccgccgccgcctgctacggctgcggcgcgccgctgcagacggccgacgaggccgcgcccggctacgtccaccccgccacctacgacctggtagtactattaattcttccttctccacccacccatgacatgattactactcctacgtagtaagtaataatatgcatatgaatgcatgcgatgcgagcagaagaagagacaccatcagctgagaaccgtgctatgtgggagatgcaagctcttgtctcatggccacatgatcactgctgttggtggccatggcggctatcctggagggaagcagttcgtttccgcggaccaactcagggacaagctctcctaccttcgtcatgagaaagctttgattatcaagctggtaaatcacaacatgccctgccctgccctctaatgtaatcaaacgcaatggctgatgcaaatccttcacatcttctatgcgtctgcctcttgccgctcattctcgctgtttacatgcaggttgacatagttgacttcaatgggagcttcctggcgcgtgtgcgcgattttgctggtgctaatcctattatactagtcatcacaaaggtgattcttctacatactgcatgcatattcgtgtttcaggattaaaagctcattcttttgtaattgtaggttgatctccttcctagagatacagatttgaattgcattggcgactgggttgttgaggcagttgtcaagaagaagctcaagtaaaacttcttcgcccctctttctgttccagtaactattgcatcaggttttccatttcattaattggaaattaagcgtgcttcttggcatctgtagcgtacttagtgtccatttgacaagctcaaagtcactcgttggcgtcactggggttatatcagagattcagcaggaaaagaaggtcagcatgcaatctgtatttgttttcccagttatattgtgctaacctgtccccctgtaagccttttccaacacttgccttgcacaattgaatggtagtttttattgtgtcatatgtacacttatttcttcacttccttggctgttatacatttcataatactgatcataatgttgttcttcctttcttgttagggccgagatgtatatatactggtaagcaataagcactctccatctccttttttcaattatttatgaactcttgtgctacagattttacaggcataccattgtatttttgtatggcaaaacactaagcttgctgccatttgtacaaacctaacaagctgcattcatatatcaacaaatgttgatagcttgatgcttataatgttctattgatacctgatcattatgttagtaatattatggaaagattcagaattggatgttacccactaactaacatacatagacccatcttcaggttctctccttcatttttcattatttacacagaatgattgaaccttgcaattcataatgcttcaaataacatgagtaatttatttatgcctaatgaatctagtacaccattacagggttcagcaaatgttgggaaatctgcatttataagtgctatgctaagtatgttcttaccattcttgactactattgctgtctccctttttcaacctattacttgttttgttcgctcattctgttctttgttacactaatagttagagaccataatttgtagggacgatggcatataaggatccagtggcagctgcagctcaaaaatacaagccgatacaatctgctgttcctggaacgacccttggtcctattcaaattgaagcatttttaggaggcggggtacggttccatcttttactctgtacactttagttttaagatatataatatgccaaattttcttgttgacctgctgtaccaactttatctatgtagctagagaatgaacttaaatgttgtcttatatattgctaacatgcccaaccaattattatacttctctgacacatgaaggactataataatcttgaatacatgcagaaattatatgatacacctggagtccatcttcaccaccggcaagcagcagttatccatgctgatgatctgccttctcttgcaccacaaagtcgtctaagggcacggtgttttcctgtatgtatttgtattcagtggcacacatgtttctttctcaaaacatgcacactaatcttttcttcagaatataatgttgtgttcaggctaatgatacagatgttggattgagtgggaattcattattctggggtggactagtccgtattgatgttgtcaaggtgcctagttgagcccaatttcaattccaaaaattttctaccacttctatttttttccattctgtagtacttaccactgattattaatcaatcaatcaatcaatctaggctcttccacgcacacgactgacgttctatggacccaagaagctaaagattaatatggtcccaaccacagaagcagatgaattttatgaggtacacctgtgtttgctaatcagacaacagtatgcagctaatcatttgttgctaggttgagctacttagaaagcatcaagctactggcatactgttttgttctcaaagttctatcaaatttagattagtatttgcaacccacatacatacctcttcctttaaatatatatgctcatataacttccatgccttccacaccgatgctcacttgaaatctctatggatggtataataactgcatctatttgccatagttcatgctttctatatttctgttcatctaagaaaactgaagaccataacatgtaaaatagccgctaattaaaccagcttctgttctatgtgctatgtgaatcaggtaaataataatagtatgtgttctgctgatcagggtggggttcgaaatggcttttttatttaacgagttgtctatttcacctttccagagagaagttggagttacattgactcccccagctggcaaagagaaggctgaaggatgggttggtctgcagggtgttcgtgagttgcagataaaatacgaagagtctgataggtaactccttgcaagatgcaagatggcttcaattattcatctagcatgcagtaccagggggctttaggatcagacaattagtggttgagtaattcagatctcatgtttcatgaagaatatggtgtgtgttctctccaagcatctgctttcatatgttactgacatttgaggatatgtttgttgtgcagacctgcttgtgacattgcaatttctggtctcgggtgggttgcggttgagccacttggtgtgccatcaagcaacccagatgagagtgctgaggaagaagacaatgagagtggtgaactgcatttgagagtacatgttcccaagcctgttgagatctttgtccgacctccattgcctgttggtaaagcagcatcgcaatggtacagataccaggagttgaccgaggaagaagaggagttgagacctaaatggcattactgatgcttatagctattttagttacgatgacagcatcgtgtagtccaaatagagcacgtaattatatatgttctcagatgatgtgatagggatgacagttttagcatcagctgattaaaattactccaataatgattcaggaaggaattttggataaagacatcgacaagtgaagctcttgcgggtactctctgtttctaagatcttcgtcctagcacatataccatcacatcatttttcctttgcaacactatgtgtgacgcactgacgcttaaagcgaatgccgtaatgaatacttgaatatagttaagaggcaacaattttttttttcagatctgaatctaaaaccaaccaaacacttttcaacgggtctccaactccaacgagagctatcttccaccagagttaaagtttggagccctaccaaacgggccttcatattcggccaatgccttctatatatgttctagcttagcattcgcaacgtgtatactcaactgtcaactttgtggagctatatatagaatttatttagcaaaagaaaagaaaaaggaagaaaaaagccctacccagaaaacgtgtatccaaaatacgttttcaaagttagaaagcgcattaaaagcactacgcaaaagttcttggtagattttggttcggcccattggatcttccgactcacacgcaccaccatgaccgacgggccctcgaccaccggcgattcgccgccgccgccgccgccggagagcggcggctccatctcctccatggttgcctcctctgccgcctccgctgcggccgcggccgcggatttcactcgccgtggcgaggccttcggcgccgatatggcctccgcagctagggctgccatggacaccgccatcgcccactctcagtcaaccgccatcgccgccgcagaagctgcctcctcggccaaggccgacgccctcgccgccttccccagcctcacgctcaacgcaaaggtgccaccttcttgccccccattccccactcgctccgatctcagcaaatttgctaaagctcgatttcttttggccttttcccccctctaatctctaatgttaggaggagttcgaatggttaaagaaggagtacacggttcacgagcaggtggtgttcggcaagatcaaaggtgcattttcctgttacttccgtaactcaaaatccagaaatttacagattgatttgtattgttggcctgttttattatgtataacaattgaatttcgattgcttatagatcgtgttgtctaacatggttctgttcttttgatgttcgatcaattattgactttcagttaccgtgtttgcagagggtgccatcatggccatcgagcatccgggaattgctgcaggctccacagcaattgctggaattgtgctcttcaaaagtaaataccatctcctgaaagtcatttctttggtggcttacttcttgtttgttacattcacaaaagaatacctgcttctgtaatgctttacacatgatacactttagatgatatgaagagggtacctgtcagtaccatatgttaaaaatacattgaatccttttatgtaacacaagttagaatgttggagcaaagtgttccttaatattttttgtaacaacaaagatacgctattggaagtgatttcttatcatgctacttatagttgactgaaatgtactgagaccttcttgagctaattaattagatccaacttagaaatcacaagcagattcagttcaacctgtcttattataatcatcacattattctgattaattggatttcattaattctataagagtgttgtgaaattcactttcaaattatcagcctgtacatgcagagctagttgcctagcatctgatgagacaaggatgttgatgcaagtttggtctgtgattgtttcaagaatctaaaatgttcggccttttcttatatatcactaactttagtgtgactaaattcgttgcagggccaaggagctacctgatccaacgggtgcgacgcatatttgtaagcaaggaggtacgcactgactgcctgtctagctataacatttctatgaattcttgacattgctacttgctacctgcctacctccatgtctcgaaagttgcatacaccatcttgtttacagattgtcacctccttactacttgctgactagcttcacagttcgaacctatcagatgtaatgctttagtgctcattattactgtcatggacatgttgtgatacaattctttgttctgaaacagagcgaaacacaaattcgtctaaaactagcatacatttttttaatgaaattcatgcatgctacctacattcatgaaaaaaaaatacagggttgattttctttagaatgaatacaacctatgttgattgtatttcataagtttccaaattgcagaccctactttctggcatccaagctggcgtgaatcacatgagacaaactgtcaatcttgtgtccaatgaaagccaaaagttgctggtatatttctttattttgttgaaaactgaaccatctgttgtcaaattggccatttaagttcaaacattcttcatgtctgattttgtgtatgcattccaggatagagcagcaactgctgaaaaaagatttcagaaaggatggaacacactcaggcaagcctattttttaaagccttttaccatttatttttgtcttcccttctctaatacagcattggatttgctgtctacttgtttcagggaagaagggcgtgccattcaaagtgagctgaaccaaataagtgatattgagaagcaagcagtaggtgtgtaataatttcttgcgctattgccttttcctatgtcaatttgaattttagagcggaaattgcctcatcttgaatttgacatataatgagttgtgtcctataggtctcaagagcattctcaatcagcttcccagagcacatgcatctgagtttcaatcagaggtcagtatattttctggtatctgaacactatgatgtttactgaaacgattaggtgatgttgaagctgtcactgcaatttgtttttttcccatgttgtgcaaatctgttggctaatttctttgccaaaaggagagggtatagaagttttattcagtcaatgtcggcatcgattttataagtagtgtgcagaaattatttttcatggtttcatatctcataattgcagcattacattattttatcacaaaccagttttacactaaagataagatagtattttgaagatgggagttctgtaatgttaatttatagcaagcttatttttttaattgcagatatctggcctagcctctcaggtgaagaaggagaagagagtacttaacaacaccctcacgaagattgcgaactatggtgtccctatctgactgtcgaaacgcagcttcatttgctgtagtttttatcaatgaagagattctgaagacatgggtgaatcttttactttatactacttgtccgcggaggggaaaggaaataatacgttttatcagtcttggcgagatgtaaatttgccgctggtgctgcagcagcaacataacatttttgtagtgttttgcatcatatgggcattctctgttgcattgtccatgaagtgaaatggacatactgcgtcgaccttccctgcaattaatcaaattatgttttttttttaagtgtgatgggtgcgagactttatgtgcttcagagcgttaaagtggattcaagaaaactttttttctttatcaaatctgatgaagtggttacaattcttcagtactgtataacggatatgcttatgatactattatggctggaaatagaggattgatagggaagatcgccctcaagtcgccggcttctccggaagacggaggctctgatctgattgacttagtgggcaaggcccttaatatctttattgcttagtccttaatacaatagcaggccccctttatatactaggtgccaatctaatatttaggaaatctaagacaaactaggaataggaaacataatcctaaaccaactagaattagatatatctactgattattcctattcctattcctatacctatggtatttgattccataacgccggtctataacatttccctcctcctcatgaaacagctcgtcctcgagctggaaactgggataagcttcgcgaaaatggtccagcgtttcccagctagcctcctctggagatgaacctacccattgtatgataacttcttgaattccttgattccacctagctttgatagcagcagctggtgcagggataacctggccatgaacaatgtcaggaacctgaacaatatctgttggggccacaccttcaattttttttagtaaagccacatgaaaaacattgtgaataagagctcgaggaggaagcttgaggcgataagcagcatgaccaattctctcctcaattaaacaagggccataaaatcttggggcaagtttagagtgtgcttggtctgtaataccagctgccatgcgatggtgtaaccgtagccatgcctattcaccaacctcaaattcaatgtcgcgatgagatttatcataccaactcttcatatagtcctgagcttgaagaagtctctctcgaatttcaaccaaaaatccatttcgactcctcatctatttgtccacagccacaacacaggaagaccctggctggtaagcagaaatagtaggaggatctcgaccatacacaaccttgaaaggtgtctcacgaagggaagtttgataggaagagttatagcaaaactcagcccatggaagccactgtaaccaattctttggatgatctcccgaaaggcaacgaagatacatagtgatgatgcgattaaccacctcagattgaccatcagtttgcggatggaaggctgtgctcatatttaactttgtattagtgaagcgaaatagttccttccaaaatgtgctagtaaaaactagatctctatcactcacaatagaacaagaaataccgtgcaagcggacgatatcatcataaaatgcctttgcgactgagagagccgtgtatggatgtcctaaagcaataaagtgggcatacttagaaaaacaatcaaccaccgtcaaaatgactgacttccctcgaacacgaggaagaccctcaatgaaatccattgaaatatcctcccaaacagcagaaggaactactaaaggttgcagtaagcctgcaggatgtcgatgttcagtcttgttttgttgacataccgagtagctcttaacataatccttcactaatgaactggcatgaggattgtaaaatgatgcacgtaggcgatggagagtcttctgaattccctcatgtcccatcccgtgcgcatcagccaagagcaagggccaacatgcagaagctgtaggaacataaatcttgccctcaaaggtgaccaaaccatccactaaagaccaacctgtcgtaagtaaaccagcctgaatctgatcccttttggtaatgagttctagcagtgtgttggtctcttgtcgcaataaatcaaatatttcaaaagatgggccagaaatagcgtgtaattctgctgattcttcacgacgagataaagcatcagcagctccattgtgttttcctggccggaactcaacttcaaagtcatacccgaataacttactgacccaagtatgctgtggaatagtagacagccgctgatcaagaagaaatttcaagctataatgatctgtacgaatcgtaaaggatcgtccccaaacataaggtcgccaatgacgaacagcttttacaagtccaatcaattctctctcataagctgcaagcttcgcatgatgaggagccactgcacgactaaagaaagcaattggtcctgctccctggtgtaaaacagcaccaaaacccacaccagaggcatcacaatcaataataaatcgtttagtaaaatccagaagttgtagcaaggaagcagatactaaggccttctttagcgctagaaaagcaccatgggcctcagaggaccatgtgaacccttccttcttcagaagcttggtaagaggagatgctatggcaccatagccatcaatgaactttcggtagtaaccagtgaggcctaagaatccacgaagagcgcgcacagtgcgaggttgaggccactccgcaacagcctctaccttgctaggatccatggccaccccacttgcagaaacaatgtgtccgagataagtcaccttttcttcaccaaagagacacttggatcatttaagcaccatttggtgttcttgtaacaccaacaaaactgctctaacatgttgaagatgttctgcccaagaagaactatatatcaaaatgtcatcaaaaaatacaaggacaaaccgtcgtaggaagggagccaatatgtcattcattaaggcctgaaacgttgctggagcgttagttaatccaaaggccatcaccaagaattcataatggccatggtgggttcggaaagccgtttttttgacgtcatcaggatgcatgcgaacttgatgataaccactacgcaaatccagtttggtgaagaagcgagcccctttgagctcatcaagaagatcatccaccaccggaattggatatttgttctttatcgttttgctattaagggctcggtaatccacacaaaaacgccaagttttatcttgcttcttgacaagtaatactggagaagaaaattcggaatcacttttctggatgataccttgggtcaacattgcagcacattgtcattcaatctcatccttcaggagttgtggataacggtaaggacgaacagccaccgctgctgtgtcagaaatcaaaggaatacgatgatcatgacttctttctggtggtagtccacttggctcattaaaaagatcatcaaattcttgcagcaactcaggcaataagtcacgtccagtcaaagcatgagcctgcggcggaaaagaatcaccaccatgaccatgccaagctacttgatgatcgtccctccaaaaagacatggtgagcttatcaaaatcccacaagatgggtcccaatgtacggagccactgaacacccaataccacattatagcctactagtggaataacataacaatcggtgatgaaatcctccgagtcaatttttataggaatacctgagcagatgcttgagctagtgacttgatcaccatttgctaccataacgttcagtccagattttgtggtaggcgagaggccaagacggtgtgctgcctcagtagccacaaaagtgtgggtagatccggaatcgaccaaagcagacatggttacacctccaataataacagccaagcgcatggtcttgctagtacggatgccggtcaatgcatgaagagagatggtaacggtgtcatcattgatactatcatcgtcctccccctcgtccatctccaagaggtagatacctttcatagagcactgacggtgatgatctttagagaatttctcgggacaattgaagcaaagccccttttcacgacgctcagccatctcagctgctaacaagcgacgaaaccttgtgcctgtagtacctggccttgtaggtgatttggaagcaacaatcgcagcagaagaagacgtgctactacccacacgggaaggtgctggagcagaacgaaaagaaagtgcagaacgctgtttattctccacgatacgtggagcagcgactgcatcatcttccaaccgctgctcataagagcgtgccaagctcatggcggcctgaagattagctgtattttgaagctcaacatcaatacttaaaggcttgccaaggccggcagtgaaaagattgacttgatgcatcggattgagagatggggtaacacgacaaagaagagccaaaaattgtttttggtattctgccacagtcccggttcgtcgaagtgcggacaattcaccaagaatattgttacggatgggaggaccaaagcgcatattaacaaagtgctcaaaaactgaccagttcacgagtccattatctttggaaaattgaatataccattgttgcgcctcacccgtcatgtgataggaagcaagccagaccttctcatcctcaggcgtccgttggccttgaaagaattgctcacaccgattaagccaggtcaagtgatcttcttctccatcaaatattggaaaggttagcttgtgataacggggaacaccacgtttgtcatcatccagattagcaccactgctccctttttcccatgaatcttgccgagcctcaaggttatcaagtttcttcatcaagagaacaagtgtcttggccaaatcagccatggttgtgctgtcttccgacatggtggagagctaggtataggtggtggctggggttggttgacggtggaacacaacagatgtagcggcggaagtgacgcaagcagcgcgaatgtgaggcgtgctgcgtcgagcggaacccagcgacaaagcaagcgctggatgagggctctgataccaaatattatggctggaaatagaggattgatagggaagatcgccctcaagtcgccggcttctccggaagaccgagtctctgatctgattgacttagtgggcagggcccttaatatctttattgcttagtccttaatacaataccaggccccctttatatactaggtgccaatctaatatttaggaaatctaagacaaactaggaataggaaacagaatcctaaaccaactagaattagatatatctactgattattcctattcctattcctatggtatttgattccataacgccagtctataacagatacagtatgcaatcagattttgtatttgcatgaacacctggagtcaaagaatccacaggttagatggagagaattttgtaatttgaattgagtaaatttcatcattagcacaaagatgagtcagtttcaaacagtaaaaccataaaattttaagggtgctaataaaaaccacaggaaacacgataaaaatgtttccgaaaattaacaatcgactatttttaatcatcaattgatatattatagtactatatatagttagcagatccaacaaatgacagctgtgtttagtttcacactaaaattgaaagtttgaaaaaattaaaacgatgtgatagaaaagttgaaattttatgtgttgaggaaagttccgatgtgacgaaaaagttaaaagttcgaagaaaaaaaaattttaaaaaaattgtcctgctcttctcctctccccctcccttgtttggagaaatttaatatggcaacgccgccgtcgcccgtccacgcgcagtgtcgacttcctctcggccgcgctagggacccacgccgccgccgccgccacgtccgccttttccccgctccgctgctcgcctccccagcctccgtccgtgctcccctaaaagcaggaggcggccgccgagaaggagaaggcgccgcgaagagtgagagcggggggctagacctagtgcaatcgagccttcatcggcgccaccgcgggccatcgcgtggttagccgccggagtcgggggtgggggggatgccgcgggagccggccgccatgcgcgtctacacggtctgcgacgagtccaagtgcgtgtcgcatcacaaaccctacctctcctctcctcttccaatgcattgaatccctcttgatgattcaggtacctcatcgtgcggaacgtcccgtctctcggctgcggcgatgacctcgccaatctcttcgccacctacggcccagtagacgagtctgtctcttcctcctcccacctataccataccaccacctgcctgtgtgaatgatttgcttgcttattcaggtgcacgcccatggatgccgaggactgtgacccctacaccgacgttttcttcatcaagttctcgcaggtcagcaatgccaggtgagtaaccaaaatagtaccttttctttcagtcctttttcctgttcaggaagaaccgacgttcacagaatgagtgaaaaatgttactagccaccattaattccaacaattaaatttgtgtttggtagtcttttctaagacaaatttgtctccttctcatccctgttttgagctctgtgcttaggattacagctttagtttagtttgttagcaattgggaacaaatctggacctactatttgccaaatcgcaagtttattttctcaatgaaagcaagaaacggcattaattgcaggtttgcaaagaggaaattggatgagtctgtatttcttggcaaccggctgcaggtgtcatacgcccctcagtttgagagtcttctggacactaaggagaaactggaagtcaggagaaaggaagttcttggccgaatgaaatgtgtgcttccatgttcttcttttccccctaactctatgctgtttagccttcgttgtttcaatatgtaaccgttttctttctacgactacacattgctagtttatcttgcttggatagttatatataaatgtttgctttcatttctccagcatcttctggaagacctgaagggttatctcatcattctccaggtcagggatcatctgctgcaaactcacaccgtcagatgagctctaataaaaggttaacatattgcgtactactatcagtttttttttgtgtgtgtgtgtgtgcaaacattgctaaggagaacattggtcatcagttactcattgatcggcccagtcttcaactaaattctatccctgttaaccatgccatttggaattggaagttaccctcatatccacatctttattgatatatgacatctggtctgaatatttgaagatggatacccagtctttatgaatagcttagcagctaagctacagtgggtttaccgaacaaaactgagatctttggcacagtaaagttgaaagaaaaaccagcaatccttattccttaatcaaaagactgagacacttcttctagctttgtgtttggtttgctctttagattttatgcatcagtttgtatatttcatactcagcactaccatgtaggagtatcaaccaggatttggtttgttcattttaaggaatgaacttcaattatgatacaattacatacactcgccttttatggaatattttcaaactttataagtaatattgaatgatgtggaactaagatggtaacccaaaagcccatctggatcttctctgattagaagtgtaaacactgtatatgacttatctagtgaagttccattttgccatcttcagggaatacacaaaaacacttcatgcttctcaatttgaagatcctcgtttcactcatgtatcctctaataaggtatgcagtacaacagtatgtatcctctaataaggtatgcggtactgcaaagtaatataatgtttggaatttggactctaggtgagaaaccaagaggttattcattgagaaaaaatatggcattaaattagcagggcatataatggtgtaagccaactttcttttcagaaaaagaaaaacagaaacaggggaattaatgcattgagtcatacatagtacctggaaaggcaaattctgcaataatttggaattttgtatatcctgccatattattgaacttagtattcttaccaatttgtggagaaaatacttctctgtaggattattttccatctgagtcgatgaatgcaacagtaaacctagtcagggagaagcttgataaggtaagagtatctttgttaagtgtattatcatattcactgcaatatgtgcatttgtggataagttaaaggttccattttcaaaatttcagatacaatccagcagcgacaattccagtgctatagttgcacccaagaaaccaaggaccgataaccgtagacgaatttgatatcatgggatggagtagaacatgcatttttttttcttcatctactttcttgtagtttgttttataattggcagaaaatagtgtactataatgctaaatgctgtctatattctccctcagttgtaaaagtatccccttttaggttttctgcggaagtaacgttagtatcatgttttgacgtggattaatgtcatgtttgatgagcacatttctcttcgtgaaaagtccacctttcttttgaacaatttatatttgaaacatcatgttctgttggtatactgatttatctctacagttatgttctatttggatctcaaatggttcctatgaggttgtgacatctgtgttatggcatgaagaatttcatgatgtctgatataggagaaaaagatgacctctgctgatcagatgtactccctccgtaccacaaaaaaaccgaatctaggactggatgtggcacatcttagtatgtatgtccagattcattgtacaaagatatgtcacatccagtactaggttttttatgggacggagggagtaatagatagcttacatatactctattcggtcataaattgttgacgtctcggacaaaatttagccggagttttgaaattccctaaccacccgtatccttttcttttcctaacttcaagttcgagtcggatcccgatgcctatgtactatgctaagagcaagtacgatagggatgactcaatactccctccatcttataaaagaaaaatctaggactgaatgtgacacatagtataacgaatctagatagatctgtccagattcgttgtactagcattaagaacaaaagatagtgcagtcggctgtagaattataaccaggctatagcacgtaaaaagagaagatacaataacttgtccgcttctattagctatggagcatagatagtgatgggcctaataaatttgtatcaaataactattgtgcatgctagctactaaaaaaactaacttagactatagttagctgttggctttattattgtacctgctctatgtgtggaccttgaacatcaaacaatcagatctcgataggctattatacttaaatatagatataatattgagccgtacatttcgatgcctatgtatatgctactatcttcgtcccaaaatataacaatttctaactatatagatagaagttactatagtttataacatagagagtatgtaagcgtcgtttctcaaggtctaaaaacaactgggaagatcaaaatgggaaaatgagggagaaatatatagagatggaagagacgaaatggaaaggggaaatgaataatgcataataaaggaaaaaaaatgacaactgaattttttttagtcggacgacctcattgcccaacttcttgtaaaaagaaattaattaaatccggaaagcacaaagtaatagaaaaccatctctctcgcgatgtacaaagttgctgacaaccataaacgtggcaactttctggtctggaattcttgcgtgggaaagccgttaccacaatattaacaggaatagaagaaaggtggttactattaagtcttcgtgatagacgtaccatgacaatatttatattaggtgaattttcaaatagtggaatataaaatgccagcataaatatatctttacctctactattataaaaattaaagatgtttttgccggtgctttggtaagtcatccgtatatgagttggtttttaagttcgttttattttgaaaatacatatccgtatttgagtcagtttttaggtccattcgctttcgaaaatatagaatgagttgtataagaaatctcttaaaaaaactcgcatactaacttgaggcgatcggaatcctaaattcataattgaagctcatgattttctaaaaaagggcttgtttggtacagctccaactcctaaatataactccaggagttgagtctggagtggagttgtggagctgccaaaacccagctcctcaactctagtacattttgtgagagagctccacccaactccactcccaattttggtggaactgaaactgattggctgagctccagctccaggaggggtgaagctggagctagagctgtgccaaacagacccaaagtatatatccaaacaaatttctacagtgaattttatcttaactaaactgtataacaataataagattaaagtaactttcacccgtttgcaacgcacgggcatttttagtggaaataaaagagaaactcaaggagtaaaagaaaaagaaagcgaggaaaagagaaaacagggggagggagaggagagagagacatcaagcaagctaggaacaagggaagggaggggaaaaaactgtaggatctcccccgacaacaaaagaagaagaagagaaaaggatggcgatggcgatgcgacgtcgggtgtcgtcgtgagcgcagccctccctcgcgatccacctaccccgccgccggtaagcctccacctccgccattcctccccccacccaaaccctagatccacaccctcctctccgcccccgagatctcctcgatcccgtccgcgattccacgccgacatggctgaccccttcgtcgccgacgaccagaccgacgccgacttcttcgacaagctcgtcgacgacgacgacgacctctcccccgcccctgcccctgcccctgttcccgcccaacagtcggcggaggcggccttgcttccagctctttccgacctcagcctcgccgacgatgacacagacccttccccggctcctcctcccgtcgaggccccgccggagggtgcctcaccggagtcggggaagggcgccgtccacacaacggtcaagcaggtccagtgggcctcatttggaggcgccgccgacgatggggctgatccgttcagtgatctgtctggaggcgccgctgatgacggatttctcgggaccatggccgggaaccagagcttccagacctccgtcattgggagcgtgggggcatcagctcacgggatctttggcgggagccagagcttgactgccgaggtgacagatcaggattttttcggtggtacctccgatcagaacaccgatacccagcagcagcagctggagcagagcggaagcagtgctttcgactccacagatcccaagtatttggagagcatttatcctgggtggaaatacgacgaggcgacacagcagtggtaccaagttgacaattctgatacgcacggtaacgccacccaggtggacaccagcactgagaatatccagcagcagcagcttgccgcttcttacatgcataatccgacacagtcatcgctagagacaattgcggaggagggtacgacgacagggagtgtatcgacatggggacagggtggcacctcggagtacccaccaaacatggtattttacgccgagtacccaggctggtactttgataccaacacacagcagtggcaatcgcttgagtcgtaccagcaggcagtgacagctagtgctgttcaggatggagcaaacaatggtgtcgttgcctcttctgctgagacaaattatagcgtcaaacaaaccgaagatcttcctgcccacaatcaggtggcccaacataactctttctctaataactatagttatcagagccagtggcagacaaattcatttagtaactctatgcaacctgaaagtgcaacagctagtctgccagatagtttccagagccttggtcagcatgctatttctgaatctttcaattcctctacaaatagtcaagttagttttaacaccgctgaaaccgctacaagccattatggcaacgtgaacttagattcgtcaagtactcagggtggctacaccgcaagtggtggtcaacaaactggttacaagggcttcgaacctttcacaggtcatcaggctggttacaaggggtttgaaccttctacaggccaccagacaagtcataagttatttgatccatcagcaggtaaccaaaacagttacaagccatttgaaccttccactggtcaccaccagcacaaggggtttgagccttccacaaatcaccagggtgattacaaggcatttgagccatccacacataaccagggtggttacaagggattcagtccttccacagttcagcagcctggttacaagggatttgaagcttctacaggccttcaaactaatttcaagggatttgaaccttactcaggtcaacaggctggttacacgggatccctaccttctacaggccaccagtctagttacatggggtttgagacttcttcaaaccagggttatggtgatgccaacaatgttgcaaatagtcaaggctttgttccgatggagagcatgtacggaagccataatcaagctcatacaaacccccaagtgcctttgtcaaacagttatctcagtgttgataactccaagaatttctctcagcaacaatttcttggtccaaatgcttcacacttgcaatttgggcagtccccacatgaagagaggtcatcagctggacgtccaccacatgctttggttgcttttgggtttggaggcaagcttatacttatgaaagaaaccaactcaatggccacaaactatgactctgggaatcaggtatgctaagagttcctgtgtgatatatttttagtcatcaaacaaaattatggcatatgttaaagtaactaaaatattctattttaattttgcaattcaaggggaattctagtggcacagtatcagttcttaatttatcagaggtggtcacggacaaagctgatgctttaagcgccagtaacggtagcgcacttagttatttccatgctttatgtcgtcaacctgttcccggccctcttgttgggggaagcgctgcatcaaaggatgtgaacaaatggcttgatgacatgattgcactgtatgaatcatcgactagtgaattccagaggggtgatcctcgcaagttgcttatttctttgctgaagatactatgccaccactatgggaaactgcgttcaccttttgcttctgacccatcacatgaggtactttctgcctttcatgctcttttttgttgcatctatagtgtattttaccaaaacagaggctgatataatgaatgctccagttaatcaactcttagtgttgtaataacggcgcagagggcaagcttttaatactttttaatgtgatgaacatgtctgaattagcagtttaccttttagctcatcgtgtgtgataatttgggtacttgtttcattgtttgtcctttcacctttgtatctctgactcatttgaattctcaataataggacacagacggtccagaaatggcagtaactaagctcttttcatcttgtaagagaagtagctttcaaatgggcgatttcggatcccatgtccgttgcatgaagaatattccctctgaaaatcagatgcaggtgattgccatttatattatatggatgtgaaatttagctaaatcctaaatgtccccagttgaggcagctactttgcttgtaggctgttgcacaagaggtccaaaatcttctagtttctgggagaagaaaagaggcccttcagtgtgcccaagaaggtcaactgtgggggcctgcaattatacttgctttgcaacttggtgataaggtttgttcgacttaatagccttctcttgtttgcatttgaatagtttgcttgattttcaatgaggttttcttttccttaattttttttatttatcttttctttccccaccggtggtgcagttttacgtcgatactgtgaagaaaatggcccactgccattttctatctgggtcacctttgcgaacattgtgccttctcattgctggacaacctgcagatgtttttaatgcagacaacaacatcagtagcaattatggttctcaacagcctatggaggtaatacataattatttttcactttctagatgcgcgatactttggtcgtaggattattctgtagttagatgtaatagtaataattgttcttaacttttcatagcacttgcctgtcccatattgttgtacaataatggcttttcatttctttgttactgcagtgtcatggtgctttggttttttttttcttgaagaaaatgttttgcttcattgataatgcattctactgttctaccacctcgttgttggctttctgtttaaatagtggctcactttataattcattgttttgtcacacagcctagtcctaatggcatgttggatgactgggaggagaatttggctatcataactgcaaataggacaaaaggtgacgacctagttattacccatcttggagattgcctttggaaagagaaaaatgaggtctgtatgatatgtatttgcagaattaaaccctttcttttttgtggtcaagtaccttatatgccttttgatacaggttgcagctgctcattcgtgctatttagttgctgagttaaatattgacccttactctgaaagtgcaaggttatgtctccttggtgcagaccaccttaagtgccctcgaacttttgccagccctgaagccattcaggtatattactgctagccattaacccattacctgtaaatatattgaatcttagtgcaattttccctcgaagctctatcttttgctttttaatgattagttaatgcaagcatactgtctcagtgttttataagcaattattgcatagatacatagactggaaatgcaagattgtgtgtaaccgctaacctgttgcttcatctttttttactctgctgtccactgttctgaactaatattttgaaatgcgataacagaggacagagatttatgaatatgcgaaggtgcttggtaattctcaatatatcctgctaccctttcagccatataagctgatatatgcatacatgcttgcggaagtgggaagggttgctgattctttgaggtatgttgttgatttgtgcatggccagcaaatgatttcaatgctatacctaaactcctgctttcacattatgacccatttgaatctccttaaaggtactgtcaagcatctatgaaggtgctgaaagcctctggccgtgccccagaattggaagcatggaagcaattattttccaccctggaggacaggatacgcactcaccagcaggtaaatccttacagcttgttttgcaatgtagctgagttcctccctctccctattaatgcacttgtgttgattgctattgtttagggtggatatggcacaaaccttgcccctgcaaaattagttggaaagattttcacctcactcgataaatctatatcgcgcatgatgggtacaccttctgctccacttccgccattgccacagggtgctgttagtgatagggagagttacactgcacctggggctacaaagtttgcaaatagccaatcagtaatgaccatgtcatcgttaatgccatctgcatcagtgcagtctatgagtgagatgtcagatagtggcaggaagattgcacacaacagaagtgtttctgaaccggacttcggcagaaccccgaaacaggtaattatgccctcggctgaggtagacacttataaagacagcaggttctgattagtgaatgccgagtgataaaattctaattcttccgtttgtttgaaaaataacagggtgctggatcggacagcacacagagtactgctccaggatctggtagttcacgctttggttggttaggctccacactacagaagacaatgggatttgtttcaaaatcccaccggcaggtactttaactgagctattgaattggagccactccacttttgttcagtttctcttccatatagtaaagctaatactgagatccttcctatgtcttgaaggctaaattagggcaacaaaacaagttttactatgacgaaaagctaaagcgatgggtggaggaaggtgctgagattcctgccgaggagcctcctctccctccacctccatcaaaaccctcattccagaatggtgtggtagactataaattaaatggccccatgagtgcaagtcatactcccaatggattcatggaagggaaatcttcaacttcttcagagcatggttcgggaatgccaccaattccgccaagccagaaccagttttctgcccgtggacggatgggtgtccggtccaggtaatctaataattctgccacttgctcatgtctttctctatattctataaaatattgaccagaggaaagttatgtttatttttagatatgtggacacattcaacaagggtggaggaggaggagcagtcccatcctataacaagccagctgttgcatctgtgacaccacccagtggtgccaaattctttgtgcccactgcggctgttgttgctgcagagcagatgcctaaccaaacagcggaaacacatggtgaaaccttccgtccagatgagcgttcatccccagctgaaacgtcattttcttcacccccaccagcaacacaattttcagcaccactgatggtgcctaccattcagcggtatccgagcatggataacatcactaccccgaacaatggatccggattatcatcgggaagtaacagcagctcattctcaagatcacgagcagcatcgtggagtggaacttactctgaacaaattaatgctgtggcaggtgctagatctcctgaccagcagaccatgccatcgcccctcatgcctgggaagcagtcacatagtcgttccaacagcaactcatctgttcagttcaacagtttgacagaggatcttcatgaggttgagctctgatatgctgcgactgctcagtatgacccatgattttatagaaacaacctgggtaaaataccttgatcctctcagcaaaccccctagaggagggagggagggagggagggaaaaagagaggaaatgttttacagtaaatgaagggaatgccacaagtgaaatggatatctcctgtcttgcacaaagttgtgggatggggaagtaaagcaaggtgtgcccgccctgtactcgtacaaacagttgtttttttgggagattttgtaggtattgttggttattatgggtttagagaaggggataaagagtcggatgtccttttttacatgtgagaagcagagagcatgtggacaccattgtacagataatccaccccagcccagccccagccctgcccccatattataattcattgaagacgcagagaattgggaattcatccgccccacatccttttttgtcattgtattattatcattttttttcttcataattttggagaaggatagaagagagggagaggtcaagatgtgtctggatattctagtgtaagaaagaagaaagcttttgactgcgtagagtgttgttatacttactgtaatgttcctataccatgatgatgataatattattctttggagtcgaccgatggatcaatcaatactggagtaagtagcatcctttttgttttgtttcccagcatgcgtgatgaaagaggtcaatatcatgtggtggtttggtttgatgtgattcatctggtagtttaatttgtgctgtgtgttggtaaccaaaggctctctctaaaaccggagaggaagaatagatcactatttccttcattccaaagaaaatctataacagaaattgagggcaaagaatctggataattgttttaagtttttttaattggttattctaagatacttcctccgtcccaatatattgcaacctaggatagaatatgatgcccaggttcatataggttcatagtattaggatgggtcaatcccatcttagttgcaatatattctaggttgagtttttaggatgtagggagtaggctactagagtagagagattggtaggaatcaccaaaagttgagggcatttttttatttattttcactaaaatatttaaaaaataatcttttgtttcaaaaatttatagatctggatgcctcatgccatttgggagtgtaaacgggctttaaaaaaacatcaaacattctgttagagaatgatgtggcatataactgttggttactcctttcccgccctcccagagggtttttttttataggaggaggacgcttgtaaatctgcttgataagatagaaaaatctaggccacccttataccagtattttgggggttttttttataggaggaggacacttgtaaatctgcttgataagatagaaaaatctagaccacccttataccagtattttgcgggtagcctttcctcagtaaaaataataatatattttcaaagggcaaaagggctccgtctgacatgaacaccctcttttttaggctgctattagacggagccaacagtcatctgccagataaaaaaaaaagtcctctcaaagtgcatgaggcgtctagatctgtaaatttacaaaacgaatttttaaaatattaaatgaaagaaattaaaaattagaaaaaaaatggtgaggtgaggaggtaggcaagtcaagtcgaaaaacatgatgatgacgactgctaattcggcccaacaagtagtcccctcccctccctcgacgagagaagacaagacaagtcgcgacctgacgacccgaccttcctcttctctcccgctgccctccgccgccgacccgcaggggatcgtggggacgatcgatcgaggaggagagacccaaaccctagccacccaggcgccactcccattgcccccttcgccagccagccatgtctgcggcgcacctcctccgccactcccgcaaggttccttcctctccctctcccctctcctccatctcttgtttaattctccgcagcattctctcatcccaacaccgaacgcatcttgttccgatctgtcgtgcttatgccattccaggtcgatcggaacatcaccagattcccttcagattcccaatctaatattcctactgcagatggctcacattccaatctacggctctcacttttgtactgcagctgcggactctacgtgatgctctagattatgatcggtctgctcttgtacgctacttctccgctgcttctgcatcctttcccacaaagggaggtgctgctgctggtatgtgctgtactagtagcctttttctctttttctcaattgatttactggagtatatgcatgcaatctgtttgtttgtttgtttgtttgttcaaccaatctggagatgccctttcacattactaattttctgtgctcattatttatttctcttgtttaattgtatcttctgtttgtaatctatgtaattctgctgcggctgtggtcactgcttataagtcctgcattgtcatcatcgttcaaactgatgtggtgctttgcactctcacttcaatttaatcagaatacaacttttgtatcttgtatcagttatcctggatcctccagaggtgcttcttcttttgcacctacatattatcagtttcacaagaatatggggcattcatcaattatgtattctggactgtaatctaattaatataggcaaattatcaattgtttacactaaaatctgtacaaacaaactattttaacacaagcacaatgctttctcatcttttttacctctccactccgttattttccgtaccttcgaccaaacatgttttggcttcctgagccaatatcatcatttttatttattaaggtgtcatttgccgttgacttagtttaactacgctcatatcctccagtgcagacagcagctatttttgtcacgtggcagcttatttttacagagagaagtttctgttgttcattgtcacccgtgcttttggtttctgcaggtgttgagaaaagaattggtggcgccagattccctcagtgcaagcagcctgggaaagagcttgagaccttcaaggttatgttcatgaaaaataatccgcattctgagatccctattgtcatatcctgattgtctagtttgtcattttatcttttcaggtgtcactaggaggactaaatggaagatatgcttgtagaagagcacctaacaattgtatcccaaccactattaccggtctcaacggttcattgtcatggtatgttttgttttctgctatgctattgttagcttatatggctgtgtaggaatatattgaattagagaaccacccttgaaacaagagaatatgaactagtaatacttgaacattgagctaagacaaaccataaaaaaattattgacatcttctgtaaggcccctgagatatgcctctctgctctttagtgctcttttaccagaagaaatgaccccatgacagttctaatttccattgcatcttggtaatattcctcttttcctgtttcttttcccagtggacaggtgtcttcagcaagatctttctcaagcagtgcaggtacttatcccagcagttagttagtcttaagtgggtttattggttgggcctcacttatgtgtgatgctttttgggaagtgttcttggtgggaggggttccttgaccctttctttataaatatttctctcttcttaatgaaatgaagcgcagttctcctgcgttttttgggggaaaaaaacaggatatcgcatagcagctcctcagttttttattgatcttttttgcacttatctacaatgttgtttttttgccatccttctttttgttctattatttgcttcactttatcccgtcttcccatgtaccaattgtttcatgcatgtgatcctctattctgctacttttttttggatatttttctccacatctgtatctccgttgaattttcaaaactttttttttgtatgtgttatataagcatttaggttatttgctacaaaataagtatatcccaatctcacaccacatctccccattgttttggttactatgttaaaattttctatgtaactccaatcaatggttccttacagagcatgtaaagtaaggtcctctgttagctctcttaattcttgacgcaatttgcttattccagacctgccaccacatcaggaaattgggatgccatcactctctcctacaatgactgaggtatctgttacgcaaaaaaaaaaaaaaaaaaaaaaaaaaaaaaccgttgctccttatctgtatttcttgaattgcatccatcggtgttacacctttaacaccagaagtattacaccttacacttgtattgtctgtaggggaacattgcaaggtggctgaagaaggaaggagataaggtctcacctggtgaagttctctgtgaggtggagacggtaagttttctaatatgtaaggctacatgccatatattgtttagatttatttttagttatgcagttagccagttacttctattaagctgcagtagaagctaaatatcctttgaatgcattcctgctgactaggataaagccactgtagagatggagtgcatggaagagggctatctcgctaagatcattcatggagatggtgccaaagagatcaaagttggtgaggtaaaaatttactgatcaaagaacaaccaatttatgactctcattttactaatatgattattacagttgcctctgcctataaatttttctgacgtaatcttggttgatttatggccccactgttccttttagatcattgctgtaactgtggaagaagagggtgaccttgagaagtttaaggattataaaccttcaacttcagctgcacctgcagccccttctgaaccgaaggctcagcctgagcctgcagagccaaaggtgaaggagacagagccttccaggactcctgagccgaaagccccaaagactgaagaagcttctcaaccagggggtcgaatattctccagccctcttgcaagaaaattggcagaagataacaatgtagtttttttttcgtgttacctatctaggctattaattggtagattttattgaatcatacttaataaacacaaaacaggttccactgtcaagcgtaatgggaactggtcctgatgggcgaattttgaaggcggacattgaagattacttgggtatgccctttctcttgtcccctccaccccccttctctctctctttctcctcccttaatgatgaaatctgcgtggaaaaatgcaattaactagttttatatatttaccaatgactatagattaatttattttcaactatatcacttcctagtttttttagagaaaccgctggggaagccctcattttgtagctagtcatgtgtgctcctggacatctcatgctaattctgaatggtggactcataatgtcgaattttattggggtgtcctccccttgccagctgtcttcttgttcaatctttaaggctcaatcacaagaaaacaagctgtatcactcaatatctttgtggttggctatcatatccattctaagataaccatattcagatactatttgatcacttaattcaatatccactggaccagtatatcaagttttcagaagaaaaaagaggctatttatctgactcagttttgcacttatgcttatttgtgtacactgtgttagtagcagcactagtttgattcaaagtaatattaatgtaatttgcttgagcttgccaaggttcaagttaaatgtgtggctgtcactagcctgttatgtatgtcagatttgctgtgcttttattctgtatgagaattcaatcagcatctaactatcattttttattaacaaagcttctgtagcaaagggtggcaaaagggaagctcttgcggctccagggttaagttacactgatgttcctaatactcagataagaaaggtaaatttcaatgatacagaatcttgttaggttgattttagccgatgctattggtctgatagtgtattatcttctattcttcacaggttactgcaaaccgcctgctaagctctaaacaaactattcctcattattacttgacagttgacgcccgtgttgataatcttatcaagtatgttgaagcctagctttgtaatttaaagcaatcctatattacataggaaacctatgtaatgattcaattccatactgctggttttgtagctttttaaaatagttctttatttcaatctaatccaggttgcgaggggaactgaatccgttgcaagagtcatctggcggtaagaagatatctattaacgatcttgttataaaggtaattgccgttttcttgtttcttatgtctaccaaccattgagttgtcgcagattgggtgtatgatgtatatcagttcacagactgttaattttctcctgacctccagatctgaattgatcttaatttgatgtgcaggctgcagctctggctcttcgaaaggtccctcagtgtaatagctcgtggatgagtgattttatccgccagtaagttgtcatggagcatgtatcctgggattagaattatgttgacaagaaggtgattatggtaaatttatttctcgtgcagataccacaacgtgaacatcaatgttgctgtacagactgagcatgggttgtttgttccagtaattagggttagtaatctgaacttgtctatttatatgaaaaaaaaaaaacattggtttctagcttgtacctgtgtttcaggatgcagacaagaagggacttggtacaattgctgaggaggtgaagcaggtggctcaaagagcaagggataacagcttaaaacctgaagattatgaggtatatggatcgcatggtagctaatataagcatgagacaacatcatttttccttgaaaattctggtgcttttcagggaggcacattcaccatatcaaacctaggaggtcctttcggaatcaaacaattctgtgccatcataaatcctcctcagtcagcaatcttggccattggtactggtaagtcatgctaatatgtttgtgtaataataacggtagcatcctgtattatctgcatttctttctagtatcttttgagaagcatattatctttgttgccccatcctattatttttaagtcgggcttctactcagaaatttggcatgatgttacagagtgccaactgcttagtagcatttagccttttataaacagggcttaagcatagaattcaaggtgtagtagagtagtatcctttcgcttctgtattctacgtttctacattctagataaacttctgctaagaaggtccattcacgttgcagtgttcttgtgatgattacatagggtgtcattatttacttaatggccttttttttgtttggacagctgagaagagggtgatacctggcagcgtagacggccagtatgagtttggttccttcatgtcggcaacaatgagctgtgatcacagggttattgatggtatactcttaagccttatctgaatacatgatagttctacggaccataggctagaaaataactttgttcatgtgtgctttctctaggtgctatcggcgcagaatttctgaaagcattcaagggctatatcgagaatccaaactcaatgttactgtgaagttaaagatcagcaaaactattcttctcatgtgctcgaataacgcagagtggtgctatctcattttgtataataccggcacggtgttctgtcaaggaggacccgaaaaccaagagcacataaccatagacagaatgacctggtttttggattaaaagctttttctgtttatcttttttttttttgtttgtttgtttcgttccagttatagtgggaattaggaggatcaacttacaagcatttttagcacctttttgtgggtttaccctcggcaagtgtgataactggagagagtaaattcccgggaaacaatgcagtatagcctgtatacgatttgtcccttttctttttccccttcatagtgcaaaaccaagaggcgcagaaggatctttcggaataaattggcaatcttggggagtatggcttatactgtttcttaagcttttgtgtagagaagtagattattggtcataataaatcatgcatttgcttatttcacatacatgtttgatgtgctggtttaattttgggcctttaatggagtacaataaaacaaaaggaagcttgttaagaaagaatatgcctgtgtgttcttctcctccaagtcactgattttcttttttggctgcccatgggaagtttgatcgtgtattgtctgcttggtcggtgcattgttattttcttccacgtgagttggcacaagtgcgtctcatatttcttgacctactcctatgtgcgttgattggttgtcattctttgaagctgcaggaccgagaaggtaagacgaatcttgtccctcgcagtatgcatttcagcgttcttatggaagaagcttctaatcaaaaggaaatgaatcgctctagtaatcccaaatccaacacgcaattctgaacgtcaaatggaacggaatgctagaaagcgaagggagactagaaggtcaaaaacttggaaaaaggaggagatgaaaaatggaaccgatttcataaggagctgagcttttcatagctccgcttttgataatttcgatagcatagcataattatcctccaagaaacgccggaagcaagagcaaaaccagcaaacggccaccggttccaggacagggttgcttccgggaaagatgcatgatgcacagttttccatcaacatccgtaccaaattaagtgtttctttgacagcgtgccagatttggatcggtcattcgttgcggaaagtagtaccaatgacttactgctactattaatctactactgtttcgcttaagtataggtaaaggaaatgtaaccctatttcgagaaaatatattagtggtagataggatagctaggagatccaaagagcagaatggtatactgcattagatatatccaatgtgccacgatgagtggtttttctttatctgtttgtactaatttgcgcacttttgaccgataagcgggccggcatctttttaaatagagaaacacgcgatatgatgataggcagtgagatttcttcacaaatactgtacagaacagtagagcagtagtagtagggcacaaattgatggaatcaacttagcaacctttgtagaccgtcgtcaattttacaagggagagatatagtagaatgcgggtacaacagttcatgctgtgttgagttatatattgtttttgggtttgtgattaaacagtgtaacaacacggaaaggttcaagacgagcaaacacgtcagcatgtacaaacgcagtgtatgagttaattaattatatggttagcgtgtatcgacattctcgataccagtttaaaatatgtgatgatattattagaccttgcacccctataaattagggccggtgaacaaaaccatcaacgccttagtttttgattttgaagaagaaattgttgtcagcatcattagatcttgtgtgagtatatttgagagtcaaatcagcatgagcggtttggaaaaccgccgtctgtagtgtagcggttttgtctccagagcgacctcttctctataaagaggaggagaacttccatggaatgagccacaaaaccaccatcgatcatttccatttccattttcaggagagatccacatcgccgttggcctttcatccagtgagtgagggagggagatctcgatctcggtctcgcgacatgaagaaggcttcgtctctgtcggagctggggttcgacgcggagggcgcgtcgtcggggttcttccgtccggtggcggacggcgggtcgacgccgacgtcgcaccggcgtcggctgacgaagatatcggtgatcggcgcgggcaacgtggggatggcgatcgcgcagaccatcctgacccgggacatggcggacgagatcgcgctggtggacgcggtgccggacaagctgcgcggggagatgctggacctgcagcacgcggcggcgttcctcccccgcgtccgcctcgtctccgacaccgacctggccgtcacgcgcggctccgacctggccatcgtcacggccggcgcgcgccagatccccggggagagccgcctgaacctgctgcagcggaacgtggcgctgttccggaagatcgtgccggcgctggcggagcactcgccggaggcgctgctgctgatcgtctccaaccccgtcgacgtgctgacgtacgtggcgtggaagctgtcggggttcccggcgagccgcgtcatcggctccggcaccaacctcgactcctccaggttccgcttcctcctcgccgagcacctccaggtcaacgcccaggatgtccaggtcaacaccttacccctctctctctctcctccactgccattgccattgcccattgtccattggccattgttgctgtctctctctctctctctgcgacaaagtgacatgtggtgtggggcctagctaaagcatatggttggctgagtggtggtgtcactgcccacccacatgtgatgacatggcagcctttagcctttatcctatttccatggatgactagcttcctgcacacatgtgacaagagcgaacacatgcttctgacaacttgataaaagcccaaagatgcttagttagtgctgatatgatattattaagattcaactgaatagaatcgaatgccttgggttgatgctcctagctactactatatgtggaataatacaacttaggatccgcatacgggagaacgttttggctaaaatttccaacaagacaaagttattatcatttgactaatcgaatattagtaactacaaattttaaaattagttttttatatataaaatcaaattgcgcgcctagcatcattatattttctatcatataatagcatatatgttttctcactatattattcaaatatattaaaatgacaacataattttaaattttgcaatatgtgtaatattcatattatattttatatacatgttagttattaattatttttaatatcaaattttagttatttataaattgtatatattcctatatggactctagactcgtcttttaatatttcctttttttaattccgaattttctgtaaattgtatttctatatagactctatgctcttcttccaatattatttatttttatttctgaattttcatattatattttatatacttgttagttattaatatcaaattttagttatttgtaaattatatatattcctatatggactctagactcgtcttttaatatttcttttttaaattccgaactttttgtaaattgtatttctatatagactatgctttttttttcaatattatttatttttatttctgaatttttattatttctaattgtatttctatgtggactctaaactcatctttcaatattcttcaatttttaatttcgaatttcagttactaataaattgtattcttatattgaccttaaactcttcttcccatatttttcttaatttcgaattttagttatttgtaaattgtattttttatacagactctagactctacttttaattttattatgtttattccaaattttagttagttttaaattcctatatggactctatactctacttctagtatttcttttttaaattccgaatttctattttttttcttaattgtatttctatatggactctatcctctacttctaatattccttatttttaatttcaaatttctattatttcataattgtatttctatatggactctatactctacttctaatatttcttgtttttaattccgaatttcagttatttcctaattgtatttctatatggactctatactctacttctaatattccttatttttaattccgaatttcagttattttctaattgtatttctatatggactctagtctcttcttctaatattccttattttttaattccgaatttcagttatttcctaattgtatttctatatggactctagtctcctcttctaatattccttattttttaattccgaatttcagctatttctaaattgtatttctatatggactctgctttttctttttctccgattaatgtgagaatttctaagccatgagagcgaatgtggaagctcctttttctattcctttaattatataatagataatttgtatataggaaacttttgcatcaaatacaccatttactagctaaaaatgagttggtccctctttaagaaacgaaacgcagctccagcattaaacaaatggagagaataaatcttagaatgactatcagaaagaacagtctaatctattatgatgtaatacggcatttttattattgaaccaaccagagagaaagatgtgaaggtgcatcagtagtgattaacactgaatagttacggggggaaaaagtccattttaaattgggcctaacatttcatcgctccacgattaattaaatagtggtgatattagggttctattgaacaattaatcatagtgctaattactattgactagacattattagtgacatgttagttgaggaaattgacaaaataatgaatgaaaaataaaaaaatgcaggcgtacatggtgggagagcacggggacagctcggtggcgatatggtcgagcatgagcgtggccgggatgccggtgctcaagtcgctgcgggagagccaccagagcttcgacgaggaggccctggagggaatccggcgagcggtggtggacagcgcgtacgaggtgatcagcctcaagggctacacctcctgggccatcggctactccgtcgccagcctcgccgcctccctcctccgcgaccagcaccgcatccaccccgtctccgtcctcgcctccggcttccacggcatcccccaagaccacgaggtcttcctcagcctccccgcccgcctcggccgcgccggcgtcctcggcgtcgccgagatggagctcaccgaggaggaggcccgccgcctccgccgctccgccaagacgctctgggagaactgccagctgctcgacctctaataaatcttattattatcatcgtcgtcgtcgtctcgtcacggaattaattaaagtacctactccgtacttagctagctacaataataaggattcattgatcactacaagagtgatcgactcgactgtagtatgtgtgtgcaatataatgtgctgtctatcaacaactactagtattgtcatttttttcgaaccagggaactttttaatgataagaagaaaaagacaagtacttattgtcgagcactcgtggacaacactgtgattgattgccttgatcaatcttaccaatttttggtagctgtaaataatttacatagtttgttggggcggatgagcaagcaagcaagctgaatgggctgttgatccggacgaacgagccgcgcattccttgcttaattaatgggctgtcagtgggcgaacgaacttggtggggcggacgtcaatcttttggcccaaaatttcatgacaagtgcagtgcggtggaaggaaaggagttgggccaggccggtaggattatttatgatgggctgggccggaaaaggcagcgatgatatagagcgggctgggcctcccaatggctagcaactcttcataggagaagaatcgtgcaacaatacacgcccaagagaagaaaccgcggcatggaaggaacaaatcgtggtgcgctctctgcgtctgcgtgtgcgcatggcatcgtgcagtccacaggacaggagacggcggatcgcaagacatccgcgccgcatcgggattccatcctttccctcatgtatactatctccgttccaaaataagtgtagccataaatatccgtgtttagcagtttaaccatccgtcttatttaaaaaatattaaaaaaattagtcatacataaagtactatttatattttatcatctaataacaacaaaaatactaatcataaacttttttcaaataagacgaacggtgaaacgttaaacatgaataaagctaaaacagtacttattttagaacggagggatcagtactctgcgtgagtgctcgtggcgtgctggttggaaacgaccattgactgattacgtgctacacgtggcagacagacatgtgggccctccccactcccttccatgcttcagcttcacacgatcgatcgatcgatggagatgcggcgatagttgcgctcctcctcattcacagtccacactgccatcagccatggggggcagccaccacctcttccgcttcctcgccgccgacgaccaccctttcttccccaccttcccaacctcctcctcctccttcctcctcgacgacacccacccatttttcttccctccctcctcctcatgcccactcggtttcacctctcctccttcatcgtcttgcccactcggcttcacctcctcctacgacctcgacgccgccttccaccaccatctcgacctcgacctcgaccttgacctcttcctcccaaccccgaccccacctgtaaccacctcctgccccgccctccgcgatcccttccttctccaccactccctcgcccaccgcgtctccgcgcttgagctcgccgccccacgcagcaagtacacctacgaggccgaatccgccggcaggaagatcaagtggaccacccacgacaagcccgacggcgaccggaccttcaagtgggaggcccagatcgacacccccaacgacgatggcttcgaccgcaagtggaagtgggagtccaaggcctccgccgccggcaccaccaagctcaagtgggccaaggaggtcaagggcaagggcttcctccacccatggtcgcacgcctactccgtcgaggaggtcttcggggacgacgaccaccaccacaaggcagacaagacagcagaaaacaaggtcaagcagcacaacaaggatacttctgccaaggaggagaagaagaagacgaacaagtctaatgttcagatcgttgagatcgacgacaacactgccggatgcgtcgccatcaacaaggtcacatcttctcctctacatttatttcattatttatttattcaattggacttggtcctagatttttcctattcagagtttcagatctaggagtagcagcttgttatctcaagcttgcgacgtgaggtttgcgcaccgatttgcacaaatccgtcatgtttctgatatgcaaagatctaatatacggagtacttaactactactccctccgtcgttttgactttaagattatggacaaacataataatatttacagtactaagttagttccatcaaaccaataattaaatatattttcataataattttgttttgggttaaaaatgttactacctttttctataaacttgatcaaatttaaatagtttgacttttaccaaagtcaaaacaacttataaactgaaacggaggtgtatttccgatggcattttgtaagggaagccatacccataaatgtgattagcaattgctagtaacagatagtagatcgtcaattttcgtgtgcgctgtactgacaacacaacactggttttctcaaggcgtttgcaagcagctacgccaagggcaagagaaagcagctgtccccgcaggatgctgcattgttgatccagatgaactaccgggctcacctagcccaccgctcgcaagtgctgcgctgcctccgtcatctggcggtggccaaggccaagctcaaggacattaggtccttgttctacaacatctcttaccgccgccgcatttcgcatgactctgaagagcgtcagaggtttgccgacaaaatcattgccctgctcgccactgttgatgcccttgaggtattaagctcatcaccctttctgatcatgccgtttttcattaacaagtggcccccatcaaaattttgcattccagacaatttcttcttgttatatagttatttttatttattactatgggtgacgattggtaaccatgccaatgcatgtgttgttatttacgcgtttatcagcaatgttgtttactaccaaacgttatttgattgatgaaatcatcagtgtagacatgacagtaaaccacacccaattttcttccgatagtctagtttagggtcctgactgaatttatggatatcaatacctgcaacaacatggctctcatacagtacttccatgtaagataatctaggtgtaagtgaagaaggatgaaaacaccagaaaaatattttctagctttcttcttcccccaattcttcatcagaataaactctaaacaataacacatttgttgatagctacgtgagggtagtttcttaaaaagaaaagaaaaagcatctaacagccataaaaaaacaaagaatactgtacatatatattgttttatcatgggctctataaattggaagattaagtgccatgaaatgctttgatcttttgccatgtgtgaatgttttgtgcttacagggaccagactatatggttcgcaatgcaaagaggtctatgctggaggagctggaggggatgctagagatcgtaggtcctcagtcactagggaagccaaggactctgagccgcagaaagtttgagaaccatatctaatgatatgaggactggtgtcaagggcaagtgaaaggcaccatcggttctatttcgtagtgcggcgtatgaagatgcttgatgggggacctacctttctgaatgtgtttacggtttagacagaatgttgtgtctgtaactctagttgtatgatctatcttctgcttgaactagtacttatgtgttgctagactagttagagcttctttataacctcttgttgtttgaggaagcttcttgtagaaactgtttcataatttgtcatgaaatgatgtgcggcatgtgccccctaataaataagaccattaccatatggtatgcatattggcatggtgcttttcaaccgatgcatctaaccgtgcggcgtgttgccaagcctccgcgttaccggccacatccaatacggataactgcaaaaaaaaaaaaatgctaaccgattgggagaggcaatgatggaattttttggtattccgggtcgttgttgtgttcaatatgtgaagcatcccgttcctctcaggcaaagaaagttccaattcaactggcaagcactgcaggtgactgctgaaacccccatatgttggtgtgtgccgtgctcatggttatcttgtgccgctttaagtttctgtagaaggtttgcgtgatgtcattgcatgcactgggggctgtacttatactgatctaattgtaagtttgtatattataccatattcatcaggctatgttcaagtttgtaccacttagggtgtgtttgaggattggggagattggggagattggggagattgggaagatacgcaaaacgaggtgagccattagcacatgattaattgagtattaactattttaaacttcaaaaatggattaatatgattttttaaagcaactttcctatagaatttttttgcaaaaaacgcaccgtttagtagtttgggaagcgtgcgcgcggaaaacgaggtgttttctctctcaatctccctcaatgtcctccaaacgaacgctgccttaggttgtatttctcattgatcagtatattgacatcgaagtatgattctttgtattttggtaaccctgtgcacatgttaacgagcgcggcgtgcttatacttcttgtaatataaatgcttgactccgcccgccccaatcgatcccgagctcgagcaccttggtcacccatcccgttgtttccccactctgttccaagctggtccttccggagcttcgagtctctgccttggcttgggccaccactccataatttttttttagataatggaatgaaacattcctacctttgctcattagagctaaagccaaccacttcctccctacattccattttccacatttatttaactggccgattgcaccatccccatccacccccacgtctcttctacatctccctcccggacccaaccaccttccttcctattccttccacccccaagacccatggcctcctccccgccgtgacgtttaactatttattactcctagtctatgatatgtggatggatgatcttatggttaacatatactatcatctatttaaatgcatattacaactaagataagttaagacatcttccgccttcccgcagcagaggagcatcatccaaaggcaagggaatgacagcgcgtgcaaggctccacaagagtcagggttgttataggtgaaactttatcctcgatgtaccttcgtacagcaatggcagctcttgcggattccttgagcacagcgttgctaacaggccagcaaatcttcccattactttccccacaacacctatcatcaccacctctaagtgtgtccaacacaagacgctcaagtgagactgcggccttgacgatgccacatgttagctcaaccaagctctttgcggagttgaaccctaagatcttcacgctcttgaggcagtcatggctgagctcgggcagctgcctcaaatgtggggaagaactttcaataatcgattcatgtgccatatcgtcctgacaaacctggaggtgataaaaaggaagattatatatgaatgaatcaatggtccatccgacagatatctttctttgcaggatggaataatggatgaacagcacagccttacatccaagtataaagtctccaaggaaggagatgcatcgacgaaagaaaccagaaagaaataatcataggatggggaaaaggtccctcccgcaatctgaattgttaggtgcttgaggtagaggaatttggtaggcaacattggtatattaaccgcctgcacaacaaatgcattgtcacatgcagaatatttctactgtcatatgcatatgtatagctactatatatgcagggtcttagaacatacctcagagtccgaacctaattccatagtctcaaggagggcgataggcaactagttttgtaaatttttcaaatagaaaattatttcttgttaacaaccaaatttggtaacatctgtgtcaggaaagaagattggatcaaagcgaagtcggaggcgaagatcgagttcggaaacagagtaggaatcggctggagtccagatcggctatgattaggatcggctgggtctgagtcgggctaggtaagccgatacagccgattccgacaatacgacttgtgtacgacatcgggttcaagttaatgtgcttcaagatgattgccacgcatggatagagtcctgggaaggcaattgtatctattaattaagatattttatgtagattccttatagataaatgtgggcaaaagtctgccgcaaagacttatggtatcttagagtttgtaagagataatagtcatgtccggtatgggcatatcttgtaattctcgggtataaatagaccctgagccctatgtaattgataacacacacgttcaatacaatttcggcgcatcgccaccctttttgctttagttttgtttcgacgagttcttgcttttgggttgagctgcatcggtttcgatcttcaacaagaggtaaaacttgttatgatgacttgtattctcgggattagtgcttccatctttatgatactctaatcttatttatataattcgtcgagttatcatatatcttacataatctctagcaatatcgccatctaacctactatcggttaacatctgttagcagagggcaaccgattaggttagattttgacgttgatctagattatataagatatctaccactctatgaaacttctagcggcttgattgtctagatatcgttcttcatttcatacttaatgttgtatcagttaagtttgatctgttaagtcgtgcttagaatatcgatctctagcctgccttctagttgccgattagaatagcatcggagtttcagccgatcttatccgatttaactatatttgttatatatgctttattgacatgttaaatctgctctttatatcaagatattgttgtatctaagtatgttaggcctttgtttgatatattatacatgctttaatatcctgatatagagtagtatcagagtattagccgatacatgttagatctatttgatcggctacgctataaacatatatagtcctgttattgatatatatttcaatctaagtgatttatactgtctcggcatggtgactgatctatcccaatcatttgatttaagtatatatcgatataaggagtatatatcgttaatatctacagccgatcgagtagatttagttcttctttacttattcatgtctgccgatcgatacacagatgacatcggctcaaaggtaaatgatatgtcatcggcatctagccgatcggctatcatttatagatttaaccacggtttctttgcttctatttcttgttgattacaggatcaaatcaactggcacgctaacacacctgaaggtgagctttggacctgcactggagttaagcagatctcccgggccacgtgttttctgtcaacacttttgtaaatatttcaataaataaaattaaaaattaaaaaaaaaatcacaactagtgcaccaactgcatgtggacaggagggagtatgtagtatacatgtagattgtgaatggcggttggaccgcccggctcaccggtcggacaagtggaccgctgaaacgagagttcgtccgggtcatccatcggtccggctttttttactaaggtttaaagggcgaaaatccgattcgttgtaaaattaagggatctcagatgaacttataccatttcttgaaatccggggcgggctggcgtggattctacccggcctgctcccttacttcggccccatatactaccagcccacgaggcccatgcatccactcttccagaaacttccggacttccagagtcttcgacacggatagcgcctcctcccagtcccatcgcacaacgaccgttggattgttgagccacggatcgcgcgttgatccgagcaatctgaactgttgctgcgccacggattcgttcgctgtctcaaattcattttcagatttcccgctccccggttcaaaatattcagcccaatttctagtataaatacccggcacaagtagggaatcaatcgcccccaattcgatcgagagagagagaaatggctctccagctgagcggtctcgccgaagtcgtgcgcgaggtcggcgtcgccccgggcccccgccgcgtcgtcatcatctccgacatccaggcaggcgacgctgctgtcatcgacgagttaatggcgatccagctcggtgtcgatgcgtcctgggaattcgtcaacagggagcggctcaggaggatggggcgcacctacaacctgctcaagatggtggaagcggttctcccaggcctcatcgacgacccctaccacgcctccgacttcctccgcgacatggagcataaaatcaggacccgcgctactttctccggtgtctccttccgcgtcctcgccgtcgagttctgcaacctcctgcgcgactacaacgaccgcatcatcgctgatcctcccgtctctacccgcgaggagctccaggaccacatcaacgagctcatcgcccaactcgatgaccttctgcaccagacctgcacgctgcgccaagatgacccggttccatgaaggcaagcggaaagttcatgtgaggaggtcccgatcgtacctagttgttcatctgatctgatggtagttacagtagcagtagtagtcaagtagtcgaatcagcatgttaatcctgtttgaaggagcaagtagcagcgagtaatgtcactagtagtacagcacagcacagcaacacaagtatatgaggatgtacccgcacaaccacagtatagacaagtgtgaaatatatggaaccaccataagttggtttgaatttgttctcaatcgtgttgcctgcttggtttcagttcgttggtggcaagtcatctctcttctgaatcttcttgtgaagttgttttctgaatcttgctgtgaaattgttttttctgaatcctggtggtggcaaatcgtccgtcttctgaatcttcttttcccctagcttctgttctgtccggtttgtgtacacagatctggttcgcgtcttttcacccaaatttttagatgtttctgtctgtgtatagaatcgtccggtcgattgtgtttcagtttcttgcaggattagtctgctggccaccgtgctctctgctagcttgtggtagtaaatcctttctcctaccttgatggttttttttctcgcacacatcgattctgatttcctccggttttttgctcgttcctccgatgtaggcgtcccccgccctcttcctggcaggggctttggagcggtagagatgcagttccaagtccttccccggcaacccgatctgccatgtgccacaacacctagtaagtggaatatgttttgattgccttgtgccagattataatgagaatgagaaaggtgacaattacttctgctgtttgcctccctcctgattcacagtttcatactagtatttagcaagtttttctctgtgttttacttaatgagattgctgtttgggttgtggactttagtattgtttctgctagttaatacatatcctgcagtcttcagtctaaccacctacttcatttgcttgcttgtctggaagggaaacacttggttgcattactgtgtagattatgtcagatggttctctagctgcagttactatagtaaaattgatcatcctctgaatcattgcaggtgggaggtggcatgaatatcaaatctgattgtgacgaaccatccccgtatgctgctattcttgcttctcaatactatgttgtactgttgtttcaagatttgtatgcaggcattgttcttgcgtaggacaaacggacatatcttgggttacctatttttggaattctgttgagtttgaactaacatattgccttgctgtacgttgagaacaatttgttttgctcatatacaagtttcaccactagtatgtcttgattgccgtatgttttgattataatgaggatgaaaaggtgacaattacttctgctgtttgaagagagctctaaacacatgatagatgtgccttttgattcacggtttcatgtttagcacgctctcgatcgatgatgtaggaaggtttatttgtgtttacttgatgaggagcaggaacatttcttacattttgctggttgggatgtggattggtaacgtgttcagttttcctactgggcagttgcatgggatgttttggcatgaaattgattttgacacaacttgtaattgttgtgtactctctccgtcccaaaaaaaacccaatcctgggtttgaactccaggttcaaacctaggattgggttccaggttcaaacctaggattgggttttttttgggacggagggagtagtagctatagtcagtttttcctcacttaatagctatagtaaaatactcaagaggaagtccagggagcccaaggtggggaatgatactcttcgacccactgaccgtgaaggagagtactatactacgtgcatgtttggagttgctcatatcttcgcatccttcaaatgacacattcattttaactactgttttggccagctactagtactaattcctgcagtctccagtctaaccacctattcactgacttgtcaggatggcattactgtgtacttctagattattttggttggttctctagctgaaattgatcatcctctgaattattgcaggtgggaggtggcatgaagatcaaagctgattgtgatgagtcatccccatatgcagctatgcttgtttctcaagatgttgcactgtgttgcaaggtttgtatgcagacattgttcttgcgtggagtataggacaaatggacagatcttgggtgactgttttctggaattctgtctcattatgctctgtgcggctggaggcaacaagacaaacacacctggacctgatgctcaatctgctctcagggctcttgctcttgctcggtctgggatgaatattggtcgcattggtaagctcagagtttcaaatactagttgatgctgacacaatcgaaggatacggaaatgttgttgatgctgtgcacaatacttgcagaaagggaggtagtagtagggaggaggctgtgtcgtaggccatttatcgccatggacatggagagtatctcctctttggatagtcgctccaaagcttcccgaagagagagtttcgctcattgtcctgaatttctgactgtcacttaatttggccactctgttttggttaaggaaatatcaagttttcatgcttaacaagacccaatctagtataccttggtggttccatataatatggttggattgttttatgagtttgtgccatctactgtatgagtttgtgtcagtttatcttttgtgagcataatataagtgtgatcttgttggctgcatgatttctggggtacagcttagaagttactcctatttactgtacttagatggatggttggttgtgctgttgaatcacttgtggagtagtagtacttaaattttaacatgttgcatttgcatggagttttgtcagggttcagttgcatttgaagagaatgtacgggtgatcatgttgcatttgtcagggtccagatcacaacttttgctggtgtgctgtcctgatctggtttcatgtgatttgttgaatgatgatggacctgtgtgttgaatacgtagtaggagtaagtactactccttgctgcaattttacaccattgtcgaatttatgatgatgcttgactgaaatttcagacgtctcaaggagggataggcaggggcgcagggccttttaccattgaggttacttgggccatggcaactagtaccactatgggcagtgtggctacaacatgtatcttcagattttttgtgttggccttatcatagcatgctgctctgctctgctctgacgttaaacaagggctacgagcaggcttccctgaaagaccagagaatttgagttcattggtatattcgacaagggaacaatttattggtatattcgaccaacaaattcatttattcatattgttctatcagtgtaaaagtcgaagaatattgttctactagtgtctgtcaaaagcctagccgagcttgagcttggatcaagaagctaagctcattgctactccatccgttctaaaatgtaagagattttagttgaataagacacattctaacgtccatcctaaaatgtaagagattttagttgaatgagacacattctaagttcctgtgtagaatcataatattaggatatatatcatccaatcaaaatcataatattatgatatatctcatacaatcaaaagcctttctattttaggacggaggaagtagctctcaaatgtatatatgaagatgcgtcttggccctatataaattttatgcacataaaactaagcaagaaaacattgcactgcaaccatgacatacggagtatatagtaaaagcagttcccacttgcgatttaagaacgcaccaacgacgacatgactcccaactgggagctggaaacttaaactgaaaactcagttttcaattcctcagcaaacgaacaggtccaaataatccaagaaacaaagcatggtttatctataatttgattaaagcgacaacattgtgcatttcagatagcttatcgcatagtcttaagaaaataataagggatagttaaagatgaaactacaaagatcttatgactaacatatactatcatttattgaaatacatatcacaactaagataagttatgacatcttccaccttccagcagcatagggatcatccaaaggcaagggaatgacagcgtgtgcaagtccccacaagagtcagagttgttgtaggtgcaactttatcctcgatgtaccttcgtacagcaatggcagctcttgcggattccttgagcacagcgttgctaacaggccagcaaatcttcccattactttccccagaacacctatcaccacctctaagtgtgtccaacacaagacgctcaagtgaggcagcggctttgacaatgcaacatgttagctcaaccaagctcttcgcggagttgaaccctatgatctccacactcttcaggcattcatggctgagctcgggcagctgcctcaaatgtgcggaagaatcttcaacaatcgattcatgcctcatatcttcctgaaaaacctggaggtgaacaattaaagaatatgaatcaatggcccagcagatatatatatgcaggatgttgaacagggtggcccttacatccaagtataaagtctccaaggaaggagacgcgtgaaggaaagaaaccagaaagaaataatcataggatggggaaaaggtccctcgcgcaatctgaatggtcaggtgcttgaggcagaggaatttggtaggcagcattggtatattgactgcctgcacaagaaatacattgtcacgtgcagattatttctactgtcatctatagctactatgcagcacataaaatcttagaacatacctcagagtctgaacttaataccatactctcaagatttggcataatggatggaagctgagcacgagcatagcacacgacattcggtcggatcatggacaagaccttcattgtcagtgtttctccaagtgagaacttgatccctccactaagggaaatactggacaaattcggagcttcacacacaatcacttgcatcctgcggcatgccataacactcaggcagctgagatgctgcagcacacacggtatcttcaggaaacttatcttgttgcatacattaagtctcaactgctccaaaacaagggagttcaaaagaagggactctaactcgtcacctgtaatatgcacaccacacagatgcagttttgttaggcttctcaaggggccaagttcagccatgggatggaaggcacagaaggtaagctgaagacatcgaattgagtctcgaacaccatcagataaaagtgagcatgcaaagatgtactttttatgtagcgtaagagtgagctcttcaatccctggtgtaacagcaacctcaagccatctatcaatgtaaggatatgtactgtcctcatcagctacattaagcttcaatatcttcgcagtgcccaagtggtttctcagaatgctgtcaattttgcacttgaaatttcccctagatgtcctcgggcaaagtgttttgaaattcaagctgaggttgggatgaaatctccaggaattcagaaaggaatgagaaaggcaagcagcacgagcagcagcactcatcggcattaaggaatgtatgtgacgccagatgtcctgcatccataagcatgggataaaatctcaaattaaggccaaatggaattacaacaagagaaaaaaaaagaacaggagaaccacatggagtatctctgccccaggttgctctctatatgattgcacaaggtgcaggatggtgcaattgattgtagtccatgatataagtttatgtgcatttgttcaaccaaaatgcacatcgatgattagtttattgtgcaatagcatattataaatagatcagtatagcaaagaaacataaatttgtaacttcagcacagggtgtaagcagaatctcgtgaaactagaagtcttgacatgtttattgtaagatagacataaaccttgctaaatgcaatgaaaaatataacatattgaaaaaaccatataaaaggacatcatgaaagcagttcaacctgtcatttcgtatggatttaggtagcaaaataaaaacatcaatgcctagcatgaatagtgaagccaaaagaaatagggatcactatttttatagactgaatatgtcaattaatgcttgtaagaacttggatacagcaacatttcagtatcatcactgcagtaaagcatcatatgcctatgtaagtaatcaaaactggatatttttcatattcgtcttaaatgaatatgcatgattgacatgattaggcctgctcaaacttataatgaaatcattcatacttaggcatggctcccaattgcttatatcaggagggagcacatgttacagttgttggacttaagaggaaaatgcaactactgatgcatgccacgccttatggccattgcccaacattaaaaaaaaaaaaaacaaagcaactacgcatcttattaggctgggccttctaagagagctagaaatagtcctaaatgtatggtaagtgcagcgatacagaggtagctgacaatattttgacatattctgtggttaaagatgtgtttaaagacatactgatgggaaaagatgaaagccgtttcaatatgtttaagaacaagcgttatattatattactgcttcctgaaagacttagacacagctgctacaataatggttcatctgcaaaggctagtaacatcagtcaaatagacagcccacaagtgagagatcctagggtgtatgattatactatatatttttatcaggagtaccatgaaagaatcaacagtcatgtctcattatcagtagatatgctcaggctctggcctggaggactagtgagaaaagaatggaatgcatacggataataagaacgcaatgaagatattgccagcctttgaacaatgaccataaataataattcactaggagtttaggacaatgttcgattgcatatatattttgtgactataaataataatcaactagcgcagtggggtgaattaggatgattaaagcagttaaagcttacaatctaagcttgcgtcagaattttacagtgctgttagcatacctcaggaaggtacgggagtgaataaatcagtgaatcgccatggccaacttgttcagagggggagttattagtgctacccactgtacaattcgatttatctgcagctgaaccagcacgattataattataatagcccatcagactgacaagaacacattagagagagagagagagacaaacaacgtagggggctaccgaccaatggtttattgggataaaaagatcaagaatttttcaacgaataaatgcagatattatggggttaaaaggagctgaatcggtgacctaacctagcaaagcagcaacagttgaatgttgtgcaaattataattcggtatccatctaacattagtcaacatgaaccgattagcgaacaagaactgatccaggtgagacgaaccagagacagggctgggaggcaaagggagttgaggcttactcatgggcagggctggggctagggctaggttttgccaccgctgctcgcgttgcacggccacggaggacatggcagatggcattcaggacgacgataactctctctccccccttggcccttggatctcagactctcctacctatctatatagctcttctagtatgagagttctgtttctggtttcctctccaactcgttttttattcgattggagctggactttactatatgtcaaaacggattattagtaataaaaaacaattttatgagtctcaaatagaaactactgctacagcagagtccttaacgacttaaaaaaacaaatattcaaatagaaactactactacagcacgatggattgggcacgattaattaggttcagcccgacgggcgtcgtaggacagcccgcaatgtgcagacattcgtttaattaggttcgtcaaccagcaacaagactggattatttcacgtgaaaatatttacacaagcacatgagtactccctgtcccaaatcaaactaggaacaagagagggaaacctaccaagagagggaagaaaatacaaaattgcaaaaacaaaaaaaaaacaagagagcagtgaataggaaacagattgaaagctactagctcaagaacatgcaagagaactcatagattcagcagagccacaagcactaatattgctaaatgacatgtcaagtgattaacaacatcaaacagctacaatctttcttgaaaactacatcaaacagctacaatcctaacacagatcgacattgctcaactttgtgtaatatcatgattagaaaattctcaatctcactcttcgtagtatggtttaaattcgattccctgcgctgaagtataaattgatcggtcaatacacagcatatttgattgcacacatcaaacaaatcgcaggagtagagtggcacatcaaacaaatcttgaacacgaaccgaagaagaaggaggaaaaagaactgaccggccgtcgtcgctgctgcacaaggtgtggccggccaattggaactgcaactctcttccatggcagatctgccaatggagctcgaagtagttgcctgctcccacgccgatggagcccttagagctggaggcggcagcatgggcagcatcgcagcgatggacggcgttcgctgctggatggatgggcgacgagtaagtcggcgtcggtgacgagagtagcggcggctgcgttgccgtctcgctgcccagcgacgtctccccgtctagtgcaatcgtgccctaatgggccaaaaaattttgcaattcgcgggcatttttgtgggggcgggactgcgggccgcaaaaaaagcccgccccacttgcacccctagacacgatgcagaatcgctagagatggtaccatgacttcacggagacaaacagcatgctactccatccatcctcaatggcgaacaactgacacccagtaattaagctcgagtatacgagcttcgaatagagactaacagaacaatgatgcaacgggcaaacagaacagaagcaacgcgactatgaacaaaaaggccataggctgaatgctcaaaaccataccatctcagcaacaggcaaagacaatttggtttggaggttcttaaaaggcgccttaaataaggtaaacagtcgcattacagctagcagcaaacatgagttcgcgaattgatcaacataacattaggcaaaagagctcaaaaaaggatagtctggggcagatagttctatatccttgcaaacaactcgctatagcaaaactccaggcagacgcagcagcagattttaagcgttggcagcagcctgggcggcagcatcccgcttcctttgctcctcgatgatgctgagcttgatgcccttgcccttgggcaggctcacccaaggcttgttgcccttgccaatggtgaacacattgcccagacgggtggcgaattggtggcccagggcatcctcaacgtggatggtctcgaagctgcctttatgcttctccctgttcttgatcacaccaacacggcctgtgttccttcctccagtcaccatgacaacattgccaacatcaaacttgatgaagtcgacaatcttgttggtctccagatcgatcttgattgtgtcgtttgccttgatgatcgggtcagggtagcggatggtgcgaccatcataggtgttcaggtaggggattcccttctggccaaactgcacagaccgaaccttgcaaagcttgaactgtgcacagaaaaattagaatcagccagcattctaacttgaattaatacactcaaaagtaacggaatgcacaatgctacaatcagttcttctctagaggtaaactaaagaagcaattctcaataacagttcaatcaaagcaaaatatctttctcagcacaacataaatttcattatttcaaacagaataccttcatataacaagagtgtgttcagcaagaacagtaccaaaaattaatatgtcctaaccttagcatcctcatccttgacagactgaaggcggaaacgtcccttggtgtcgtacagaagcctgtagttctcaccagtcttggggatggaaatgacatctgccaaaaaagaatatgtttagcacaaagcaccaagtgtttttacatcatacactgaagcatatattgattgcaataacgattgagcatacccatgaaaccagctgggtaggtcttgtcagtcctgaccttgccatcaaccaagacatggcgctgcatgaggatagaaataacctcacggtatgtcagagcatacttgagcctgttcctgataatgaggatcagaggcaggcactccctggacttgtgaggaccagaagatggcttgggggcctatggtaaaaggtaattagaaatataagctatcaggtaacagaaaaaaaaaagataagcttcaagcatgtgtagttaagtgtaaacaagaatgacaaacttacaaaagctccaccaagcttgtcgagcatccaatgcttgggcgcattgagcctcttcagatgcttcttcaaaccccttgcctggtattacggtaagggaaaaggaaatgatcagcacaaataacaacataactgcagagtagcacgacatgaatacaatgacacaatgaaatcacaaggttatgaacagccctaacatcgctcatggcaatggtgcggcatggtttctaagtaatctttgttaattcttaacaaaaaaggaatctagacaccagaacctataatccttgaagccaggcagatatacaagttgaaccttggcacgtaacagaaatgtagaggaacaataacgcagcaaacagcacgagctaaaccctcaaactagcattgacagtacaattatacaaagcatactgaaaataacgagctgtctaagatcccacaaatgggcgacagccaaggatgcaatgtccaatcctagactctactactagaagcccaacattgtgcatagctgttcattctcgcgcaacgctgaaacataaccactaggaactgatccacaatctgaagccagccagcgagtacaaattcaacataacatgcgtttaaatcctaacaggctgtagcgtggtacaaagctatctactcaacatacgaatcctacacatcacaaagaaatctcatggaccaagagcaaaataaccaagccgactactaagctactacatcctagcaggccacgcgccgcacacgaactcccactcagggagagcggggaatggaactaatcccaccgaagctacgaacgagaaggatgccacagatcagccagatccgcagacgcgagagagcgcgcgggggggagaagcataggacggaggagagggggtagggggctcaccatggttgcgaggtcgggctaggtcgccgtgctctgccgccgccgcctgctgcttcgtcctcctctgctccgcgccgcgccgccgccgagatgacaagagtgggagagcgagggttggagaggctatatatactagttggtgtagggttttagttcaccggatttacgagtttgccctcccgctcccctcatgggcttccacgatttattccagaaattacggcccgttttaagaccctcatggctgaattcatggcccaagtagttagatcgggcctagtttggtcccgggttgcttggatcatttgcttctcggcccattagactcttacatggctgtgatgcatcgtgggctgtattcttgcagcttaggtgaagtgacagattttatccaataaatgggcccatgtaacacaattaagagcatgggccgaagtgcagggttgcagcttgttctttcggtgtactttttccttaagataagattacaagcctgaattttacagagcagcacaaaggcccagacctcaaccaaagagagcagaaactgaaatctctcaactctccaaagtagttgttgtctcttctacaaatacatcacacttttgattttaatttttgaaaggagctacatgccgtcgtgagttgtgagtataacaaactcacactttgacttgtataacaaagtcgtttttcatgccatctgaaaatgacattgcaacctgcatatctctagttatttacaacagttggttcacctttgattcaggcggttcaactaggtaggtccgtataggttttgttataactttttttttttgcggggaaacaaggatatattactcagaataggagttctcacaaagcaaatgtgagatagcaatacaagagtcatccggccagaagtaagttaaggattcacttcggcctttatttgctaagaaatgattaatgctattctgagtcctgtgcactttattaagtgcaatcacccttgttccagccatcggggaagattaaggggggaagaaggggcggacgctgggacgtgccacgtcggatttttgctacagtcctacagtaccggggctggtctttttgcgaaaaataagttcaatcacctcgttgactacgcacgcatcagcagacaataccttattcactgacttgatcagctggattgcttcttggcaatcggattcaacgacgatgggcagcagagtccattggagggccagggctattccatctctgcaagctagcagctctgtttctaaagctgatctgcagcgactaatgtggccacagcccaaaatttcctggtggccctcttaacagctggggcaacactcttgtcagctcaaaattcagtgcaatttctggagctgattttgagcaactacagactggcagtaggggttgcgttgaaggatattgagccgaaagacattgttcttggtcgatttcttgccctccaggtcacaacacgactgcatgtgccctgaaaatcgagacgttggtgttccttgttgttttctgcaatcattgcatgttatgttattgtggagattatggatatcccatatctacacggcgatgatatttgggctgaatataggataccgaatatagatagaatatcttatgtgtatcttgggtttgtttctcaacttgtgcatcaaggaaataccctgagacttagtcggtcacgactgtattttatatgtatctgcatattccgttagggatatagattgtcttttgtaacacggactcctccccatatataaggggggtccgggtgcctctaggggcatatgttgtttttccccaaatcatacaatcaataatacactcggcggattcatccccggacaggagtagggtattacttcttttataagaaggcctgaacctgtataaatcctttgtctccaaacccatacacttttccagcttgatagccacccccttttattattgccgaaatctagtttcgacagttggcgcgccaggtaggggttgcgtcaagcttttcgccgatcagtgcaatgggttccatctccggcatcgacgacctcgtcttcccacccgggcagacgtttcggttcggcagcctcgacttcgtcaccaacaacttcggcaagatctctctccttgactcggagtcggaccagtcgggagagaaccagatttcggccccgtttggactcccaaacgcggctgaaagttacttcaagaccatctcgaccgagtcggcttcaaaccactcgggcgagatcgcatcttcaccaacgtcaccagatcaagatgatggggcttacccaccgatcctgatgaagctccccgacgatttggcggccgtctccatcacgacagcgtctctttcccgtaggcctaggcggaagtcggcttcaacaccgatttcgcctagcttcagggaagttggcgtcatcctccaaccactcggcacggtttcgacggatcagctagatggcgactacagctctcctaccgtcgactcgcgccccaccgacatcgtggagtacgacgagtttagctctcgctaccacgacccggatctcgacgacttcgacggaagcctagatgacaactacacccctctctattttggcgtcttcatggccaataacgagacggaggagcaacgccaagcccgggagaccgaagcgcgtcgcgagactgaacgccgccgactggaagaggagcatcaagcacaagaacaagaacggttacggcatgagcagcaggagcgtgagcggaccgcgaaggaggctgaggatcgacggcagcgagctttggaagcaggacgccgggcgcgtgatctcatcggccagcaagatgttgaagggacgccgatttttcgcacccctcaacagaatgcggttgccgcgatcaccctcctcgacaccctactcagggaaagcgagctcaatcaatccgatcacgtcgtcaacatcttgaaccagacgaagactatgattgcggcttcggtcccagttaactccgaaagcgtccacacgccgactggcagccgagtcccccacttccgatctcatgactaccgtcatccaagcctcagcatcaccggcgcaggatccaatcgcaggagcaggggccacgacgagcggtctgttcactcacctcccgaccaccatagggagcgccgagtggaacggcctcgctcaccacctcgtcgccgccccgtcgatcttcgcgacacaatcatacagcgccgcgcagctcgaggctatcatcactcgccggaccgccacgacgatgaccttgacggagtagcagccttcaccgacgacctgcgtcgagtggactggccagccggcttcaagccgactggaatagagaagtacgatggtaccactaacccagaatcgtggcttaccgtctacggtctcgcaatccgcgcagcaggaggagacagcaaggccatggcgaactatttaccagtggctttagcggattccgcccgatcttggctccatggattgccccgtggtacaatcggatcttgggccgagttacgtgaccacttcatcgccaactttcaaggcaccttcgagcgtcccggcacacaatacgacctctacaacgtcattcagaagtccggagaatcccttcgagattacatccggcgattttctgaacagcgtaacaagatctccgacatcaccgacgacgtcatcatcgccgcattcaccaaagggattcgccacgaagaattggttggcaaattcgggcgtaagcctcccaggacagtcaagctcatgtttgaaaaagccaacgagtacgccaaagctgaagacgccgtcaccgcgtcaaagcagtcgggtcccagttggaagccaaaaaaggatacgccggcttcgggaggaggtggaagtaacaatcataaggaccgcaagcgtaagcctgcagaacttgttgcaaccgccagtcactcttctcgacagcgttcgcgcgtcaacacgttcgacaagatcatgaactcccaatgcccgcaccatcctaactccaaccacgtggccaaagattgtttcgtctacaagcaattcgcggatcaatacaccaagactacacggaagaactccgacgaagaacaaagcacgtcgaggaagaaggacgacggcgacaccccggcaggttttcaagaccaccgcaaggagctcaaccatatcttcggcggccccctggcttatgagtctaaacggaagcaaaagttgaccgaacgggagatcaatgctgttcagcccgacacgccccaatatcttcgatggtcagagattgcaatcaagtttgaccgctcggatcatcctgaccgagtggtccacccggggcggtaccccctggtactagacccagtggtccgtaatgtcaagcttcgcagaaccctcatcgacggtggcagtgcactcaatatccttttcgccaagaccttggatgatatgcagattcctcgctccgagttaaaaccaagcaatgcgccttttcacggcgtaattccaggattatccgcaactccactcggccagatcaccctcccggtcacttttggcactcgggaaaactttcgcacagagaatatcagcttcgaagtcgccgatttcgagacagcataccatgccatactcggacgcccggcattagccaagttcatggccgtcccgcactacacttacatgatgatgaagatgcctggtccccgaggagtcttatccctacggagtgacatcaagcaagccgtcacatgcgacaaggagagttgcgacatggcccaaacccgcgagatagcgtctgctcgagaggatatccgactggctgcagccacggcggacgaaggagaagtgcccgctaccaagacttcaaaaagtggagaaagcgaagccaagactaagaagattcccctagatccctctgatcctactaaaactgctgtaataggcgccgagttagattgtaaataggaaagcgcgctcatcacctttcttcagaacaataaagatatctttgcgtggaaaccatctgatatgcccggtattcctagagaggtgattgagcactccttacatgtcaaagaagacgccaagcctatcaaacaacgactccgccgattcgcacaagacaggaaggacgcgatcaaggaggaattaaccaagctgttagcagcaggcttcattaaagaagtccttcatcccgactggctggcaaacccagttctagttcggaagaaaacagggcaatggcgcatgtgtgttgattacactgacctcaacaaatcctgccctaaagatccttttgggttgcctcgcattgaccaggtagttgactcgaccgccggctgtgagcttctcagttttttggattgctactcggggtatcaccagatccgactgaaggaatccgactgcttgaagacttcattcatcacgcccttcggggcatactgctacgtcaccatgccatttggactcaaaaacgcaggagcaacttatcaacgtatgatccagagatgcttctcaacgcagattggccgcaacgttgaagcctatgtggatgatgtagtcgtcaagaccaagcaaaaggatgatttgatctcggatctggaagaaaccttcgcgagcatccgtgctttcaggatgaaattaaaccctgaaaagtgcaccttcggagtaccgtcagggaagctgcttggttttatggtgtctcatagaggcatccaagccaacccggagaaagttactgctatcctcaacatgaaaccgccaagtacccagaaagatgttcagaagctgactggatgcatggcggcgctcagccgatttgtttcaagacttggcgagcgggggatgcccttctttaagctactaaagaaaacagatgatttccagtggggacctgaagcacagaaggccttcgaagatttcaagaaactcctcaccgagccaccggtcctagcctcaccacacccgcaggagccgttgttgctgtatgtatctgccacctcccaggttgtgagcactgtcttggtcgttgagcgtgagaaagaaggccatgtccagaaagtccagcgaccgatttattttgtcagcgaggtcctagccgactccaaaacgaggtaccctcaggttcagaagttgtcatatggtattttaatcactaccaggaagctatctcactactttcaaggtcacccggtaacggtggtcacatcatttccactcggtgatatactgcacaaccgcgaagcaaacggacggattgcaaagtgggctttggagttgatgtctttggacatatcattcaagccccgaatttcaatcaagtcccaagcgttagctgattttgtcgccgaatggaccgagttccaagaggatacccccgcggagaagatggagcactggaccatgcattttgacgggtcaaaaagactttccggcactggagcaggagtggttctaatttcaccaactggagaaagattaagctatgtactttggatacatttttcggcgtcccacaacgttgccgagtatgaggccctccttcatgggctgcggattgcaatttccctagggataaagcgtctaatagttagaggcgattcacagctggttgtcaaccaggttatgaaagagtggtcctgccttgatgacaatatgatggcatatcgacaagaggtacgcaaattggaagacaagttcgatggactcgagctaagtcatgttcttcgacataataatgaagccgccgacagacttgccaattttggatccaagcgcgaggtggcgccttccgatgttttcgtcgaacacctttatacgccgacggtacctcacaaagatactgctcaaattgcgggcactcatgacgtagctatgattgaagccgactggcgagatcccctcatacgatttttgacttctcaagaactcccttaagacaaagatgaagccgagcgggtttcaaggcggagcaaactttatgttatgcatgaagctgagttatacaagaaaagcccttcaggaattctgcaacgctgcgtatctttagaggaagggagacaattgctgaaagacatacattctgggatatgcggaaatcacgctgctgcacgcaccattgtcggcaaagcttaccggcagggttttttctggcctactgcagtgtccgacgccgacaaaattgtgcgcacgtgcgaaggttgccaattttttgccagacaaattcatttaccagctcaagagttgcaaactatcccgctgtcttggccgtttgcggtttgggggctcgacatggttggtccgtttaaaaaggcagtcggtggttacacgcatctctttgtggccattgataaattttccaagtggattgaagctaaaccggttgtcacaatcacagcagataatgctcgagacttcttcatcaatattgtgcatagatttggagtgcccaatcggattatcactgataatggcacacaagtcactggcggagtttttaaagacttttgtgaggactttggaattaagatttgctatgcctcagtggcacaccccatgagcaatggacaggtggagcgagccaatggcatgatacttcaagggattaaaacgcgtgtctttgaccggctaaaaccctatgccggcaaatgggtgcaacagctgccatcggtgctttggtctttgcgaactacacccagtagggccacaggccagtcaccttttttccttgtctatggggcagaagcaatgttgccgagtgaagttgaattcgaatctttgcgctttcgaaatttccgtgaagaacgctacgaagaggacagagtggatgacttgcaccggttggaagaagtccgtgaagcagctttgattcggtcggctcgatacttacaagggttgcggcgttatcataatcgcaatgttcgatcccgtgcctttttagtcggcgacctggttttgaggaaaattcaaactacacgggatcggcacaagttatctcctttatgggaggggccatttatcatctctgaagtcacccggccaggttcctatcgactcaagcgagaagatggtactctcgtcgacaactcttggaacattgaacatcttcgtcgtttctacgcttaagtttatcattgtacttccctatcttgactgtcaacatcaagttttcttcttgaagttgtcagtcgggggctattatcataataatggagtgtgattttttatcaattcaatttgcttacttggtttatcattgccttgttcgatttttctacttagtctgcgaggactgaaagtttttaatagcttctttgggttttaggctcaacaaagcttgataaaagcttttaagaaatcaaagatttggctggaactatcaagcacagcataaatacaccagtattgtacaaattgagcctccatttgttacattcatactcagtcagagtcagtcctttcatcatcagagttattgttgctcggctgaaggtcgttgttgtggaattgctctacaacgtcacttgcaatcttgtcagccgcattttgagcattgttgataagatcaagagcagcctcttcgcttgtcccgtctgcaaatccatcaatggtgtcgatttcaattctcgggtacaaggatttggtcatcgccaatgccatgctagctcccatacttccagctttcttgatgttcttgaaatatacatccggtgcaactctcagcttgtcaaagatttcggttgcgtcaagtgcactcggaccactgttattaaggaacatagcttggacaagtggtgtagcgacattggcaacttcatctcttgctccttcaagcctctggatcttaccaaccaggacgtcaaactgagcttgagatttgattttacggtctacaaaacacatttataataagaatctgctgcattaaaaagaggaaagttcagattgtcagctggcagtaccttcaacctccttcaaggccgagtccctttcagcagctagttctgttttgtcttttctcaaggcttcaatttgcttctccatttgagccatcctggtggcttgcgctgtttgaaatccaaatgtttgaggatccagttatgacagcataaatgggacagatctagagattaccttttgatgaaccactcagctcgtagtttgaatcctggagctgagcaattcgttcccttaattccttctccgttttcttggcatgctccttggcctcgtgtagctggctcctaacggcttcaagagttcccaaatgaggaaccagcttttctaaggttgtggtcttggcctcattgcgaagatggattctctgcacggtggttcatggattagttttgctaacgagaaaacaaagtcattaaaggcagtcacctagaagacttacattcacaatgcgagtagcttctccaagtactttcttcagctggcacacttcctcatcttctttttggcgatttatgacaatgccggaaacttgagagttctcgtcccaccatttgagtaagataggaggacgagagtcatcagctgcctttatgcggagaatttcttcttcgtcgccgcctagtggacctgatgtattcccaagacattagacgagtaagctggagttattcagaacggcatcacttgagaagatgagttacctgaggatgtgcctagctgagcgtgaggtgatccctgctctttatccggagacccaatcactgagtcattaccagcctctggtccttgagaagttgtcgcctgcgcttcagcttcaggaatctcttgatttagacctacatccgactggtttccagtcgggggctcttgggttgttgcagtttcagtagctgccgactggtttccagtcggcggctggtcactcggattggccttgtcatccgaagcatgggcgccagtcggctgactttcggcagtcggctggctttcggcagtcggctggttttcggcggtcggatcagcatctttggataaatttgactctgtggcagccggatcaggattttttccagttggatctatatcggacggtttcctgcaaagtgtcctttcggtattcagcgtaatttctatgagagaagcatgccgaaataaaatggtaccgagaagtttatacctggaagatgttctaatctttggcatttgacggccagccagttttttcctgggcatggtatgctttgggagtttattgggcgtgcccttgtccccagatttgttgctgtcatcgccttcgtcgtcattaagcaccagctttctcttgcgagaacctgtctgcccagccggtttggaggtttgaggttgcgggtctgacctgattgtcggccctccacttccctgaacggtgtgctggcgaggagatcggcgttgagcaattgggggatcagatttcatcaatacgtactcctgaatgagatgcttccacggttagctcactcaacatgaagataaaattatgttttggtcatgagttgaaggtttcagatacatacctgtggaggcggattgaatgcattatatggtacaactggcagctgatgtgagtagctgacgacaatagcatttgagaagattttatacattctctccttcatgattttaaagtccagagagtctgggtcttcacggtttggatcatgcttgccgtcaaactcgaatgctgtgcgggatctctctttgattggagctaatcgacacttaatgaaatgccgagtgatttgctctccctgtaagccttgctctttgagcttcagcatgcgttccatcagttctaaggcttgggcagcttcatctcccatgggaagagagttccaggtatcttggtatactgggggaagacaggagtactcaggaagagcgggctcgggattttgaatataaaaccagttggcgtgccatcctttgtttgaagtcttgaaaggcatagagaaatacttctggctcagagtgcccctcagttgaaatccagccccaccaactacgcatggtttgtttttgtttggttgaggcttaaggaaaaagattcggcggaacagagcaaaatgaggtctaatgcccaaaaaagcttcacagacatggacgaaatttgcaatatggactatggagttcggattcaaatgatgtaagctgattccatagaaattcagtatcccacggaagaactttgaggttggaagagcaaatccaccataaaagaaatgagagaagaccacggcctcgtgtgtatcgggggtcggaaaagcctcatcgcacgctggccgccacccgatgatctccttggcagggagaacgccgtgcgccaccatctccttcaggttctcctccgtcacgtcggacggcgcccattggccttcgaagctttctttctcttccgccattgattttccccgaatacgttgatttgattcgagggatggcttgggagagatgaggaattgaggcggtggatcacgggaaggattttgatcactttttgaaggtggatttgagtggaatggtgaaccctagtttgccggcgtagctctgtactgtagcaaggagtggggaaaatggcgagagttccggcggggaagacgaagtgtcgcttggatctcgggttttcttgttaagggtatcggaggtgcgaatgggcctaggcctgaatagtatctcagcccaatacttttaacagcgtggcccattgtgttccttagggacttaggcattttttgctttggcaatttatgtacacaatagtgttgcccaatgctgataaaatcctttttacgcggtcatataattctttggaattattgcaatgcaaattaaaaggtgcccgacagaaaggcgttatgctgtttttgtacgtttttttaggctacaaaagctgtctgggttaacttggaatgacttgtttttatcatagtcatttcctcggtatgttatatgcctgttttcattgtggtaaatagtcatagcctaggctattagacttattcattaccatgatttttataatatttggtgggtaatctttagagtcttatattcggatgcctgtcaagtgtgttcattcgtgaactttttagagtgttaaccacttggatttcttttattatggctaaaaagcagtcggctggaatgcctctttaggcgccgtgtatgcttttgtcatatgatgcataattatgctattattttgttctcaactatatgtttagtttgttaactaatcacatagttggaggctatacctaattaggtgcatctattcgatgcaccatattctttatcttttcgccctttacagtcttcgttttcgctactcggcaggccttggcatgaaaagtttgaagcactcggattattatctttgagcaggctatgatggttgactgcaaaggtctcgggggctactgtggagattatggatatcccatatctacacggcgatgatatttgggctgaatataggataccgaatatagatagaatatcttatgtgtatcttgggtttgtttctcaacttgtgcatcaaggaaataccctgagacttagtcggtcacgactatattttatatgtatctgcatattccgttagggatatagattgtcttttgtaacacggactcctccccatatataaggggggtccgggtgcctctaggggcatatgttgtttttccctaaatcatacaatcaataatacactcggcggattcatccccggacaggagtagggtattacttcttttataagaaggcctgaacctgtataaatcctttgtctccaaacccatacacttttccagcttgatagccacccccttttattattgccgaaatctagtttcgacagttatcttacacttaagatcgatcgaccgggcacacaggtatcgatcgatcgttctttaaacaattgcattattgggatcaattatttgggaaccatttctcggagaatctgtatatccgatacttaaagaaacagaattattggagatacacactcatagctaagctgctgacaatgcacaacaagtgtcaaacagaaacatccaacagcatctcgactctctctctccgatgactcggacagacactcaacttaacttccttgccctcagctgcttcatcaagctagtgacaatcagtttgctcgagctaattaagaaattgattagtccatttgggctactagctggcacctggcaacagcatgtgccaatcattaggctatgccaagaactcaaagctgctactagctcaaatcagtgtgctagctagctaaactccatgaccatgaccatgagagagtgagcttgtgatgggatgaggttagatgagaggaggagattccggatctccatgagtggtggggctgagcacagccaccagatagaattatttccttggggcctacagtgtcacttttggcccccaccccaccatggctagctgacatggcatctacaaatacagtacaatatatggcgccaacttcagatcagcctcaaactcaacatgtgatgaggatagattgctgatgtgctgtattgctattctagctctatcaatggcagtgctgttttgcaataatgttcatgaaccagaagatccagcagcttagctagctcaataatgctactagttctgaattgcctagctcgatctattggcggcattcactgttggtctactggctagggttgcttcttgtcatgcgagaggccacaatttcttgaagaaaaaaaaaagaacgaaccatccacgtggagtaaaaagcaacgacgacgctttcatcacacaagaggacatccttatttaatttgagaagcgaccattggaatgggtggaataaatcgtatacgttctacctgccaagatgcacgcgtgaatctcactctttaacattattattattattatactaatccacgtgtgttttgaataatgcagcaaaattttcaacaggtctgaaggtaacatatagccacgagtttggagaagatgaggggctgatgagatgtgatgtctagctgcaatcggcgacccatgagccagctgatatatcgctcatcataatcacattcatattaattaaatgactaattggcaggctactactccagttaatagaatgaatgaatcgtgttttttgatgccacgtcgagaccgaagtttgcattattgcaacacgacgtccgttagttaggcgcgtatatgtaactgtcagcacccatgccatatgccagcactttaccttcatctcatcagctttatatgcatcgaattgctgtcacaagtcacaacatcaactgctactatacatactagctagtaacatggatgtctgctaagagcatcccagcagctcattcaaatttgatcctccatatgctcatatggatgaccatctaaaaagattcctcattcatatttcttctcactccaacagatcatctatattgcatctttcatatcacacccttctatattttactaatatttttcaactaaccatacatttgtattattttttaaagactatattttaaacaactaaattttaaattttaaccgtgttatttatcctgataatttaaatgagtttattttaatgaatatatttttaatggtccggaccttttttttctcctcctctctactcgttttctttcctctttccgattcctcttcttctctcctcttctattcctcttcttcttctctccttttctccccagcgtggaggcggaggctggcggccgcggcagcgcgacgggagcgggggcgctgcggcgcgacgggccgcggcggccgacgggggctgcggcgcagcggcgctacgggctcggaggcgcggcagccgacgggcgcagaggcgcggcggcgtgacggccggcgtgtagaggcacggcgacgcaacggccggcgtgggttctccttctagatctggtatgtctctccctctccaccctcactccatagtgaaaaatgcacatccggacggcgacgacgacgacattggggaggtcgcggcggaggggaggtcaatccggactccggatgggggcgggcgacgctggcggttaggatggtgtgaggagagagaaacttcaaatttgacgtttctctctccccggatggaggatagctaaatttggatgctaggatggagtatctgctggagctcatttttcttctcccaacctctattttgtggatagaggactagatggagtatctgctggggatgctctaatatatactatatgcactaataactccaatataggaaaacacgtttctacatacatatatataggagcagtgatagtgattactacatgattacatgtatgcatgtagtactggaaaattaactgaacagagtgacccgtaacaaaactgaacgaaataggcttggtttagttcccaaaattttgttcacaaaaacatcgtatcaaatctttggacacatatatggagcattaaatatagataaaaataaaaactaattgcacagtttgcatagaaatcgtgagacgaatcttttaagcctagctaattagtccatgattagtcataaagtgctacagtaacccacatgtgctaatgacggcttaattaggctcaaaacattcatctcgcggtttccagacaagttataaaattagttttttcatttgtgttcgaaaactctttccaatatctggttaaacatccgatatgataataaaaaaattttatttcatgaactaaacagggcctatggcagattgagcgcatgttctcctacggcgaagcaccatgcatccatgttctcctgtctagctattggcctcaagatgcacgtacggattatcaaactgatccaattcaatgtactgttagcctaactgcctaacactagtccatatatatttctctgcttttccctccaatcttcattcacatgacaaattccggtaagtctttgtgtttacgcgtgcatttctaccatgcttatatgtaccatgtttcgttttatttccagcctggtttctttcatgaaaatataatgatacagatacaaacaaatcttataaaaactcggtttcaaactcttttttatataaaaaccggtgtggctgcatcttaaaaaggattatatcttgaaatagtaacaaaaagaagtataatatagtgtgtattacgggcgacgacaagatgggttgattacattggaagtttatagcgcacgtcaattagggcatcctcaatgtttgtggtgtaatgtaaccttaaggtgggccctataaatagtgagtcattattatagccatacccacaatgctatggttaaaatttagccacaagatggcccacttagaatggaaaaataattgtttcatctcttgttcatgaagtgaatgagagagaaaaaatattttctttttgtttgtggtagaacttaagcataaggtgtaccctaagctaatgctactttccacaatatatatggctcactttacaaatataatcattgccttaaggtgtcgtatcggatggcttgcctaccaatctgcctagtcagcatcgaccaaagcacaaacacgtgtcgcgttggaatcgatcgcctaattaatgtgtggctcccacgctcacgacgacgtggcagcagcccgcctgcctaaatgtccggaagcaatcacagccaccattttccacttcccccatcaatcatcaattggatgatgcatgaatgccttccttttttttaaaaaaaaagaaataaagaaaaggcaaaagctttgccttgtagtaggaggcatgaatgccttctggtatcaattcttcctcaacaattactcctacctatctgcaaataaaataacaatactacaagatatcgattgaagtcatttctcacatctctcttatataggtggtgttcttttcttctaaagataaagatgaagattaagtttttttttacgtaaaatgagatgatattaacatatggtagattaagttttaattattacaaacttaaaaaatagattaatttgatattttagagtaactttcatatagaaagttttcgtatgaaacgcaccgtttagcagtttgaaaagtgcgtcacaaaaatcttaatcttcatctaactcttgttggagaaaagaacacggccaaatgttgatgttcattaacaccatagtatataattcccatcctaggtaagcgcacacatatatatactacatcacattttgtattgttctactccaacttgcttgaactaattaatggcaatttactccctctatcatcattagctaaataaaagacgcgaaaaccaaagacaataaaatctctatggttttaaaattaattctcatcgatcaaagtgctctatcaccgtgtcccgcggattttgcatcatactttaaatattggatggagttgcaccatcagaaattaatcttggatagctgcatatatacggtggctgcatgtgtagcgcattcaacgacgtccattcactctttcacaaatagacgaagagagacccctattatatgatgattattttgagaggatcacaaaaatattaggtaaagattatacttggacgtatttgtataatccgcatcagtgaagctaacaaccaactccgcatcactaaaattttgtcacaaatttaagaacttatggttaatttgtgtttgtggtgttttcgctctttgtcgttgataggctagcaggcattccttactagtcaacatttgtcgattttgaaatttgtggccaaatcattactgcaacgaaagaaagcttttcatttttcttgcgaatacaaaaggtggtggaagaaagaaagaaataaggaagggagaaaatgtaaacgttttactaattaatttgcttgtgcggcccaattaatctgttggaaaccatcgccatcaattcagaaacaattaacaccagatactacacatgcattgtttgtgggccactgaatcatctgaacaaaagcaaattcattttcataccgagtgaaaagagggagaaagagaccgtgcagtgtggttgtgtaagagataatccgataatatagctagtgacttggcacaaatttcaggccggagaactattccaccacgtggttgatctggtctactcttaatttcaagccaccagctaatttgttttggattggccagctactagactggttgatgatttaccactactactttttataaagagaaaggcaaaggattactttattgataaataaaataaaacaataaacattcaacagataattgccgtggattatatacttgattatggggtaaattaaatattttgagaaacaaaccaaataaattgtagcttagaacaagtggtgtaaataatgcagtagaaatcttttcagaggcttggtgcaaataattcatgacaataatttgacaaattagctgaaaagaaaattaataaagggccnnnnnnctgaactttgacctagcgaagagacaacttacggacctcatcttttcacttatgcttatgcttatcagacaaaattttaatttttaaccttaaatttgaggctgattttgaggttttttcatcaaagtttatttttcagcctttgcttttagatcactaagaacacgtacataaaagttttattcacatgttacttttcgttatctcattatggttcttgtccttagttagttattacataaagagagtaaaaatggcttatacacatatggctgttgtataaatcattgtgtttcctgtggtaattatactgtggagtgaagcacagtcacgagttttcactccaccatcgtcgtggacgtacgtgtggtccatagcatatgcgttttgatggctccaatatatacattcagtagtcttctcttccaatcgtacgcgttgcattattgtacttggttgatttaatgccatttcatatccatatcacacgtccgctagctaaattaacattccaagccgccgcttcccccgtcatagaaatgaatcaaatcattctatcaactgaacttattatatttgtgccgtgtgaggcattatacatgcgaaggtaactatagatatcattactggcattgtgaccaatgcaatgaactcgatcgtaaggtgagataacgcatatataatttgtagactatgttactgatgatacatacatattcgatcagcagccagcaatacgtacagttccttttctgaatatgtttgtctgaagattgtgtgtatgaaagtcacaggttaatctactccatgctagcacagcagctagcatgcagcacctgtggtttgggttatcacaggtggacatttgatcgatgtatccagaatgtgcagattaacgaatgaaacagacatgacatctgctcgctgctgctgctagtggtagagatcgatcgctgcagctgcatcgcatctgcgatcgatcgatccagtcggctgaaggcacatgtatggcgatgcgatcaccgaacgaggattctgtctgctatcagtctcagagctagctagctaactgacgacgaaacagcaaatcaataatgctagctatatagctagtgccacttggcataacaacaacgatatgatgcagagataaatcatcatatatccatggccatggcttatacactgcccatacaggaaacggagtatatggtcatcaatcaatccatcgctttctcaagttagctgaatacgaagttggcaattactattaattactagtttctttttttcttaggtaatggatatatataaaaatagtggctggaaatagatggtagtcgttgccctttattagtctgtactattttctgttgtgttgttttcggtctctaacgtgagagcatgtaggcaggatcagggcacattttgtccaatttcaccaatgtgtgttttgcttgtagcctttcgatcatttcatttgcttgctgaaaagaacaagctagccatgcaaggcaacgaaatcaagagagactgagagaaagaaaaagaaattaagaaagaaagaaagaggaaatggagggtttgcttgactactggaccagcagcaagcgatcgacagaagagcacaagatagacttaattggcagccatcgtcgattcgcaagttaagaaaacgccgataaattatttgtgggccatggaatcattggtgcatctcgacaacaataattcactttctttctcttgtccatctcttcttcctcttctctttcagagagaggacagagacagagagtgaagagagaatccaatagctgtgacgtggtgcgaaattcaggggggagaagagctcaaaacttcaccaccattaagtgtcaccttccctccacgtggctggtctgcccttacatccatcatctacgcattggccaccgattgaattgttttggatgatttaagggattggtgagggatagaactgagttcatgatagttattatttcgaggatttaaatgaatgcagtaatgaaattgcggatctcctgcttctttgaaaaaaaaaatgaatgtgtcaaatattactccctccatttcatagtataagttattttgattttttttcttaagttaaatttttttaagtttgaccagtttatagaaaaatgtaatagttttttaagaaaaaacaaacatttcattaaaacataattcatgttagattaaataaaactaatcagtgctttaaatattgctaaatctatctataaacttaatcaaacttaacaaagtttgaccagaaaaaaataaaacgaccaatagtataaaatggaagaagtagaaagttaataggtcgattttaaaggttctttttcatagcgtataaagttctctagctaagaactgatgaggatttttttaaaaaaaacataccgtttagaagtatggaaatcatatctatgataataataaaggagtagttatatttatggcgtcatattttttactgaaaaataattgataggctagagcagtacctaaatttgatggggactgaattgagttactgctagtacgtcctgactcatcaacatctcatagctagtagctaataaggattccggccaattggttcaaggtgtgacgagcggttgatgcaaggcgtagagtaaacgtgatactccctccgtagaaaattatagagcatgtttatttggaaaaaggtatcattctttaactattcgttgtgcataagtatatttataatatttatggaaccaatgttttatgaaagctttttgaaagatgaatctgttggtataactttatgcactaaataaatatacctgtagctagtttggctaattgatcaaaatttacagagtttgactttatacatagcattgtgttccttgtgctgctaattaattaatgagtaaattcaataaaacttcatatattatagtctaaattacacaaaaccacaatggttttaacacgtggacaggaaataaatactataggtgccggttatatcatttccagcacctataatgccgacttgtacgtctttatatagtagtgcaagtatatattatggtcgtaaagttttacaaactacactatcaacaattttgactttgatttaccatgcatacattttttttctacaatcacatgttaaatttataagttttttatctatcatataagtgttgcatctgctttttaaatttggatacatggtgtatgtctaaatattaattgaaggtcaacctataatactcagagttatatgccatatgtttgtgtaacttagattataatgtgcaaggttttatgaaattgacttttaattagtcttctactaatgttgagtaagcagctagcctttttcctcttcattaagcaagccactatataggtaaccaattcgtgcttttgctggccttctgtctatgttactccaataaagtttggtagcgccgccgaccagagcagctggctaataaaattaaagaataacaatatatcatgcatatatatattagtagtagcatattagaacttgcaaattgcaatagattgaaccaggattttggaagggatcgatatataaatatcgaagctagatccggacaaagcgcatgttatataattatattacacacgcatgttgctgagttgcacaagttaaccatgcattcttgtctctgcatatacacatacctgctaactgcaatatataataagccatagtatatacatacatcacatgaccgattctctgttggagatgcaaatcaaaacatgcctgacatttgccatggtataatggtgtgcatgttataatttggcaaggcattgaaactctcattcaggtagtatgtgtacatgaacagcatgcagagaagaaatttaatatatattaattagtataattattatacagatttcacagctgagtttgatcgatgcatgaactgtgtatatctgtcacggtagtgtgatgaaatatatggtgggggcatccaaagccagcccacatgtcagccagctgtagatccatcgatgctatgatgcatatatatggactatatatactcgctcgaattaattatgcgttacttatttttctctgcgcgtttaatcaaacactattaattagtacagtattaaactagctagctagcttagacagcgtcacctccatccatggtggggtagctgcgtacatgtgctcctgctttagctagctcaaactagtgcatctatcaacacaacactaatcatagcatgccgtcgacgccgcatttaattatagaaaggactgcctaaccggccatctcttgacagaaataaataccctaaaatcatgtgaattctaaaccgttagatcactatagatctgtacagctatattcttctctctcttcaccgctaactctgtttgagtgcacgctattttcgacattgagcttctcaatcctctaagatagatccatctgtcaccgcttcgcaggcgccaaaaaagcctactagatcaacctcctctcctcctccgtgagcggggtgtcaccccgttgtcttcctcgtctccaacagctcctacatcgtcacccgcctaataactgattaggatctctcacccccactgtcagccctatctgtcaccctgccactaatccgtggcttagatggtgtggacgttgcctcgtcaccctcccgctctgcagccaccaaacattccctctaaccctagcgaactttcctagctagcccccttagaccataaaccctaactgatcgatccaccgctagttactgtagtgggagaatcgaggagccaccgctagaaatcccccctccgccttccaatacttacggaatgaattaggttagcaactatgaatcacaataagttagagcacgtacttatttttatttataataatgaagtagcgggttttcccgcgtaatttaaaattacgcgctaaattctaaaattaaaaacgatatttgacatataacaatgatttctatttctacaaatatgactagctagcgtttatatacaactataccgacaaaacatctaacattaacttgtatttctaacaaaacaagaaaaaacaccatgaaatttctatgtggcccgggcagtgaagcatgcagtgtgtgacgcgggactccggtgagataggcgaggaatctcctctcgtaagattcacctactcttctctcgtcaaattaacagcctatcgatgatcgattaacggaggctggcaactgggccaaataggcgaaacaaccaatgggcccgcgccacgtgcatccagcatcaatccaccacataataataataactaaataaaataaacaaataaattagtgatggatccgaactctaatactagtattagcaatacaagaaatagaaatagcaattggatcggaggcactataaatacatcctccgacccctcgccaatcccgcacacaacgcaaacgcaaactaatctcctcttctcctctcctccctttttctttcttgtgctaatattatatccatctcgcggcgacgcgacgatcatggagacccgggacgacgtcgccgacgcctcggcgcttccctactcctactcgccgctccccgccggggacgccgcctccgccgacctcgccgccgcccgccgttcccggaggcgcccgctctgcgtcgccctgttcctcgcctccgccgcggtgatcctcgccgtggcggtcctctccggcgtcaggctcgccgggcgccccgcgacgacgacgatggtcgtcccgggggtggtggagatggagatggcgagcagggggccggagtccggcgtgtcggagaagacgtcgggggcggaggagatggtgaggctgatgggcggcgcggcgggtggggaggcgttcccgtggagcaacgcgatgctgcaatggcagcgcaccggattccatttccagcccgagaggaactggatgaacgatcccaacggtacttaatttctttgcattttttttcttttattttccttcttcgatcgatcgattgattgttctcatctcaattcgttcattccttccgctctgttcgttcgttcttctagatctgacaacattcaaatgctattaaataaattcccattttggaggaacgttttatggttaagattcttccagccccattttcctttttttttatttatttttgagaaaagatttaaaaataaaaaaggaaaaccgagatacccttaagattccaaccgcaccaaccgaccaggcattgtagaattcgaattacaataatttttagatagataaaattcaaattacattatataatcaaattaacattggaaatgcaatgcaggtccggtgtactacaagggttggtaccacctgttctaccagtacaacccggatggggcggtgtggggcaacaagatcgcgtgggggcacgcggtgtcccgcgacctcgtccactggcgccacctccccctcgccatggttcccgaccagtggtacgacgtcaacggcgtctggaccggctccgccaccaccctccccgacggccgcctcgccatgctctacaccggctccaccaacgcctccgtccaggtccagtgcctcgccgtcccctccgaccccgacgaccccctcctcaccaactggaccaagtaccacgccaaccccgtcctctaccctccccgcaccatcggcgaccgcgacttccgcgaccccaccaccgcctggcgcgacccctccgacggcgactggcggatcgtcatcggctccaaggacgagcaccacgccggcatcgccgtcgtctaccgcaccgccgacttcgtcacctacgacctcctcccgggcctcctccaccgcgtcgaggccacggggatgtgggagtgcatcgacttctacccggtggccggcggcgagggggtggacatgacggaggcgatgtacgcgaggaacaagggggtggtgcacgtgatgaaggcgagcatggacgacgatcgccatgactactacgcgctggggaggtacgacccggcgaggaacgcgtggacgccgctggacgccgccgccgacgtcggcatcggcctccgctacgactggggcaagttctatgcctccaagaccttctacgatccggccaagcgccgccgcgtcctctggggttgggtcggcgagaccgactccgagcgcgccgacgtcgccaagggttgggcttccctccaggtacaccttcattacctctctaaactattttaagtttaactaagttcatggacaaacatatattaaattagtttcatcaaatcaataattaaatatatttttataatatatttgttttgggtgaaaattttactacttttttctataaacttagttaaatttaaagcaggaatttgactaaaattaaaaacaacttataactcgaaacggagggagggagtatatattaattaatccagctactactagtaattagctagcatgcatgattagctaggcatcattggcatgcatatgtgcacttttactgggctccattgacacgttggatcgacgaacaacacgtacatatgcatatgcctgccggagtgtagcgtagcaatcaaataatggcagccacttgtgaagagcgagagagatgacgcgaacaaacaaaaagcttgtcatgttggttgtcaaaatgtcgcttagcttcatccaggaatgaatgcggatatcctgttggggccccactgctcagctaccgaccggagcaactgttgagatacccttttttgcaataattgacataataaacagatcgtattattattggttgatggatggaattgcttgtgtccaagctatagtcctcctagcaactgttactactagtaggaatagctgtccttgcccataactcatgtgcaaccatgtgctgtagctgcattctgcttgtctttgctgatgctttgcctaactgaaatcatttgcacacacaacttaactgggattcatagattgcaaccttttcttttcaccagaaaaagggctgtcttttttgcttgcttttcaatataattccaccgctctcattttctttgctgtcacagtactgatagataatgcaaaatcgcttggttcatgtgaagcaagctatagtaataataattatgattaacatgtgtaattaaattactggagtagtagctaattagtaaaaataaaaaaattggcatgcagtcgattcctcggacggtggagctggacaccaagacggggagcaacctgctgcaatggccggtggaggaggtggagacgctgcgcaccaactccaccgacttcggcggcatcaccgtcgactacgcctccgtcttcccgctcaacctccaccgcgccacgcagctcgacatcctcgccgagttccagctcgacccgctcgccgtcgacgccgtcctcgaggccgacgtcggctacaactgcagcaccagcggcggcgcggccggccggggcgccctgggccccttcgggctgctggtgctcgccgacaagcgccaccgcggggatggggagcagaccgccgtgtacttctacgtggccaaggggagcgacggcggcgtcacgacgcacttctgccaggacgagtcgaggtcgtcgcacgccgacgacatcgtcaagagggtcgtcggcaacgtcgtcccggtgctcgacggcgagaccttctccctccgggtgctcgtcgaccactccatcgtcgagagcttcgcgcagggggggaggtccacggcgacgtcgcgggtgtaccccacggaggccatctacgccaacgccggcgtcttcctcttcaacaacgccaccagcgcgcgcgtcacggccaagaagctcgtcgtccacgagatggactcctcctacaaccaagcctacatggcctagactcctctcttcttcttcttcttcttcttctccattattacattattgctgcttacttgtaaatcatttttgacgccgccgcctgctgctagctgctggcctggccttcagaattttatctctttgcttctttttttttttgtctctgctttaattttgtatctcgatcgatctcgaccgatcgattaattactatatctccatgaagaaatgcatggatgatggatcatggatggatcgctcccttcgatccaactgtacctaggggaagaagatgccatggtcaagcaatacttctgtaaatgtttcacatgagtcaagatttatgcagagttataatatatatgtttctctctccctccctctttgcaaacaaaaagtatccaaatgaagaatcctctcttaatttgcaccaagatagagacacgcacaaaaagagtttcgcggcccgtgatagactgatgcttcttacatcttgctggcctgggttgtttgcctttttctttttccctgatttctttatatttgttttcagcccgcaaaaagaaatacagaaatgcacatgcttattattctcacatggatgcaaagcctgggacgtggcaaatgtagcacagtacatgcttatacagctacaaacaatacatgcatagatcagatttttgtcttctgctttatgttttttctacaccgtgttgagtttaatatatcatgttcttgacgagccaaaatacaaacaaactgccgctggaactgttaaatgccaaaagctgctatttgcagcatattaagggaactggggaggcagctagctagattggttagcagctcagcatgagtatcatcagtagtatctcagagaaatacatttcaatgcactgtggacacataccttcattgaacaacagctcagcctgacactgcgcatgctcacaaagggaataagggaaagtcaaattgcaacttcataaccgattttgaattaaacccattgaacacgctcatcattcgtgcatcctttctttcattttctgtaaggatcagatgatgaccaaattagatgagaaccaactgtaagattttttttttcgaggggaaggtcaggagttctgccgatttcaattaagtagggggaaaacaaagttttacaacatgcaaagtccagggtttggggatcccttggatacaactgtaactgtaagaatttccagctgcaattagtttttcttaaagaatcagatgacaaagaaatcagatgaaagcacctcatcagagacgtacaaacattatcaggtagcactttctgacaacagaacaaagcatggattaattccctgccaagactggtgccgagtaatttccagatatcatcgagccattggaaggagtcaaaccaatagtaacactgcagatgttagatcaatgatttgaatcactttgttagctgaagcacactgttctcattggcatcttcgttcaacaaactcaaggaagatctcaaattcataagtggagagcctgttcaatcggataaccacatatatcctgcgcatttttacaattcgtaaccaacctcaaatgttcatatagatatatcaatgatttgcactaagaaacgaaaaatgatcagcttatcagtactttgcatctgctgtcaagatcaatatgcaagccccacaggaactactgcaaccactgggaataaatgaaatttgaaactggtccacttgaatcgcaatcacttatctgaccatatcagagtgtggtgtgttcataactacacatggcccatttgccttttttaaaaaaatgcacgcacataatatacattctaaatgagtttttgcagttccaatttcaatcaagattgcctgaactggaatattctaaagaggcataggcagcaaaaaggtaggcagcatgttgctcacaaaaataatgatgaaacgaaaacaattcattgaatttaagtagccaacgattcttttacttctatcatggagcagccgtttagcggaacaaggccagagacagagatgtaccaagccctctggagagtcgcagctttcaaccagagaaatgctctttaccatccaccggtgatccaaagaaaagataacacatatcctgggttatcaccacttcaccataaaaatgaaggatttgggactagcaccatggtctcaaaaaaaagagagagaggctatttctgacaaggtcacttcacaagtcacaagatatcttcatctcaatggtgtatgttcttgtcctctctggcattttatgagatattgtacttattttcaattgcgtgatcttactgtcatataactgcattgtgactttgtgaggtggttcagcacaaatttccatctttatatcaagaagacatgaccgccaacacaaactgctataaagcaaaagggtagtgctgcatctgcatgtcaatgtgtccagttttctaggcagtacacgaatttttcaattatttggtttgccattctccttcgtctctctctcagcagggatttgaacatgaggcagcgaccaccatacttttcttcatgtcaaattaatgctagaaaatgtggattggcacttctgctgtgctgtcaaaacttgcctcccaaccaggcaaccaccatgtaactaatttaacaaaggctaatcagaactaccttcctgaaacacagaattatgatttcataaacacacctcttttcaaccctgcacctgcagggaacatgagaattcttactttcaggtgcagactttcaggaaagccaaagaatctgatctaaatttgaccttgattaacccttttcctttcttcaagtaggctgaaaactctggttcatatttcatactagaagaatgtgggggtgtaagctggattgacaggatgattaccagaagtctccgcaagagcacgtgccattgttaaacttgtgaaatctgacagcatccctcacaagaatatcacggcaaatctggaacgctaggaacgatttgaatttcaaatccaaaaaattgggaacctctgcaggtatgccatgcagctcaggcaatgatttatgcatatgagaaagaagcaactttggaagaaacaggtaatactgccaacaaggaacaacagcaagtagaagtcacaaacttatctcccatccctgcaggtatatttggtgctacgttgattgatttgtgtgtggataacaaaacaggaattgatctttttgtacatgatccagttatcccaggctgccatctggctaaaagctattagtgtgaattctacttccccttgcaggctgagcttacagatctctgggtagccttaaaaatctgcagtcttctcagcttggtgaatgtgatcttctcactgataacacaacaattgctactatcttcaagcaaaataattttcaggagaatctatgatattggagcttgaggccgctcctatcaaaatttcaacaaaatttgcaggatcagcaattgcaggtcaaatggattcctacaagggcaaatgaagttgctgataaacttgcaaatgaggcaagaaggataagttgttatagggctagaactttcagtttttgtcacaatagttctcatgtttgctatcaatctagatgcccaaatacaagtgcccttgtaaacctctgtcttgaagagcaaaacataatgcatgtattataatagaagtcatgaattctaaagaaagagaagacttaaggttgttggctcaaataagaattgccaagatgttaaaagaccaattgccaagatgtctatttgagaccatactcatggccacatgtagtgcgcaagttgcataagttcatcaaaacggcgtagcaataaaatttaatgacggttctagtgtcctgtggtttttcagaagataataaataacaaaaaagggcttatgcttaaaaagcagccaatttacttggaaactaaagtttctaagattcgttttttagggaaatcatccaagaaagcatattagtttattgcaaaggaaagcatattagtgacagcagtaaatagctatatctttatgtatttctgcagaaatcaatgcccaaggtcatatgaaagaaatcagcatataaatgacaaaattgatattgataggtgctggaagcctcaaattactttatcccgttggtgcttctatacaatatgatcctaccataaaagcaaaaaaataaaataaaaaataacagcttgagacctactcttttcattgagtagtaacactatttttttatctcatgggtggtgtgattaagcttatggataagaaattaataagacattgacataaatgtagcacctgagtacctaacaataatttaaaactaaaaaagaagaaatatatgcactaaccgcaattgtgtgtaccaactattttgcatccatgtacatatgcggttgagtttttctagaattcgactacctaggctgctgctgcgagtgtggtgtatcgatcataatttgcaggttttagtccttgcagcctagccaatgtctttgagtatggatagcgacctccttgaactcctccctcgaaagccttctttgaagggtgagatacacaagattaccctgagataaaaaacttgttcagtaaattagcaaatatatcatgaggcaggtgtgtgtggatagacaataaaggtacagtatatttagtactattcagatacatggaaccagtcataatgcagtccttaatatttgtcgtaaatatctgactgattctgacataaacactgtcaagcaaagaagcatatggattcaaagcctctttttttttgcaaaataattcaaaatgatatcaaccggttttgctaggcaaatctgagttgagtaggatttcaaggaacatgtcctctttgagcaattttatagccaatttagtaaaaagctctcatcttatttacatttttaagaggatatttctatgacaggcattacattggatcatagaaggaatcaacgagatgctgacctttcttctcaggaggtgatacttcccttttaccagtgacattttctgctttatgaactacagagtgagctaggaaatgcagcagtagcttccctccctacttcatctactgactgcactaacggatccaagcaagaaaaaaattcttccttggagatattatgatctatatacttggattgaactgaagaaatttacagaaaaatgtcagtgcaaaaaaacaacacacagaaaaactcaattagagaatggatatcagctattgagcttgcaaagtgagaggacctggatggctcaaagccaatggctctgaccggaggagctcgcagcgatcccttctcccatttcaggaaagccaaagaatttgatctaaatttgaccttgattaacccttttcctttcttcaagtaggctgaaaactctggttcgtatttcgtactagaagaatgtgggctgtcagctggattgacaggatgactaccagaagtctccgcacgagcacgtgccatcactaaacttgtgaaatctgacagcatccctcacaagaatatcacggccagttatcttagaaatgaacttggtagcattgtgacaatccacacatacccgtagattcttgacaatccgaattggcatttcttgtggaacaaagattaagccaaaggcaattgctagcttctcgctgtgatggctaatcatgtgaaccttatcagcatctgccacatcatgcagcaccgagctgacatcaggcttgtatccttcttcagccatctttgagttgagccactctagcttttcgtatattctactggagaaggggtgggattggtcatcggctgaaaatatgtgaactttgttcttgtacttgatccaactgcagcctggttccttcttcacctgcctgtccctcattccacgtctaagatgagcgacttcagtccattgacctttagcagcatgcatgctacacaacaacacatagctggcagggttttgtgggtcagtttccaagagattctcagctgcccacttgccaatctccatgttcccacgcagcctacacgagctcagcaatgttgcccatccaaaggcatcaggactgtgtggcatctgctttatgaattcctcagcctctttgaacctccctgatctactgtacaagtcaatcatacaagtgtagtgatcatctataggaacaataccgtggtccttctgcatggaatcaaagtagtcgcaccctttctctacaagtcctgcacggctacaagcagaaaggacaccgataaatgttaccccatcaggcttcaagccatttgccaacatcttctcaaacaaatctatagtttcttttgccttcccaaattgagcataccctgtcacaagagcagtccaggagacttgatcgtggaaggacatctcatcaaataagcggtgtgcatcctcaatgctgccacacttcccatacaaggtaactagtgcattggacactgtaatgtaccgcatcaaccctgagacaagtgctaggcagtggaactgtgcaccctcttccagacttgctaaattagcacaagaacttataacactgcctagagtgaaatcatcaggcttaatgccatccatttgcatctctgagaatgcccggacagcctcctcactgcaagcattctgtccatatccaacaatcatcgcagtccacgatatgatgtttctgcatgtcatcctcctgaaaacagcctctgccaatctgatgctcctgcacttggagtacatgtcaacaagcgcactcccgacaaagacattatcttcataccaagtccgagttatgtaggcatgtatctgcttcccttcttccaaggcagcaagggcaccgcaggctgtaagaatgcttccgaaagtgtactgatcaatgccaacaccctctgccctcattctcctgaaaacatcaagagcctccaactgcaaaccgttctgagtcagtcctgtaaccatcgtagtccaagtaatggaatccctgtccaccatcagctgaaacaaaccctttgcatcctcgatcatcttgcagcggagcagccctgtgatcaaggtattgtacatgaccacagtcttggcctccatttcttgaaacacccgcctggcatccctaatgaggcccatcttggcatacatatcgaccaacgggctcccaacgaaagcatatgccccgaacccaagccgcagtacctggcaatgcaccgagtggccaagcgcgcggtcggagagagccgaagcgaccatgatcatcgccgacagagtaatccgggttggcctgacgctctcctcccggagcagcgcgcggtacagctggaccgaccgggcaggagagccggtgctggagaagccggtgatgagcgcgttgtaggagacggcgtcccgctcgggcatcgaggcgaagaggcgctccatgtccgggacgagccttgagtgggcgagcgccgagaggagggcgttgcgggtgaagaggttggggtcgggcatttcgtcgaacacgcggcgggctcgggcgaggcggccggacttggcgtaggcggtgaggaggtggttgaggaggaaggttgggggagcctggagaaacgtcttgagaatgaggcagtgcacagcgccggccacgcgaaccccggtccggccgccgtcgccggcggcggaggagaggatggcggcgtagcggttgcatagcgcgtgggcggcgtgggtcatcgcgcgtgggctttcgcttactagactagaagtgcccgcgcggttagcagataagttttcgatcgttcgttttattaaaaacttttataaaataggtaaaactacatgtatacataaaaatatatttaacaataaattaaatgatatgaaaataattaataattacttaaattattttaataagacgaacggtcaaatattttttttaaaaaaaaagtcaatagcatcgaacgttttaggatggagggagtactattaaaggccttcacatcaataaataaaagttgggattgtacttgacagtagttaacaattcgggaaagcacaagaatgcatatgcaaacaagcatcaaattgggcaaacatctttgtgacacacaaacataaaataaacaacctggccactagcaaattgacacgacactaaatcaagaggagggaaaaatttcaaaaaaacagggaaaaaggaaccgtaccgatcttggggaattttatgattcgcgagcttcccctgcaagtactatggagaattttttttatttataatttttttattaaaagttttacaaaaataattttccattttgaaaattgacggaagtagtcgcctaccgccctctgggaaggcgatttttaaaaatcgccctcccagagggcggcgaaaatgacgtggcagacggccgttcgctctcgggcgacggccgtcaacgaaatttgcaggcggcccccttgccgccctccgcgagggcgattttgtactgtgcggggggccgcctgcaaatgggcggcgagggggggcatggaaatttgcaggcggcccccttgccgccctgggggagggcgatttttgcctctccccctataaagcccagtccctcctctgtgaaatttcattatattcactaaaaatccaaaaaaaacgaaagagagagaggggagggcagcagaaggggagcggcgaagccctgctggttcgctcaattcatcacaggtatgctcccatacatcttttgcatttgtactaatatgttatgtttgagtatataagttgcgttttagttttagttccatatattttagcacatctgtagcacacagcacatatgtgtagatccagagcatagaatataatagtatgaattgagacatagacagtagtgttaattgtaagatgtagtttagtttgatctggagaatgtatcgtaattttagaaatttagagaacaatattgtagagaatgtaacttagggcgtagtacagaaatgcgaggttaacgcagttattgttttcatcaggcacaatgtcaagtaaggtcacatttcagatagttcacggtgaaggaaatattagatttggtccagatggtgttgatctgtcagattttgtaatgacatctaagggcatcgataggcctgcggagagaacatttcagtcaatttatagttggttgttgagaggatttagaatagaccaagaagtctacacaatgtcagtgtcagttgtagtgagtcgtgcaacagaaggttatttttgggaactaatgccgatggacagcactgatgcttggagacggtatgtggaaatggcttttgaacggtcatggcccctcgttatatttgtgtcggtacaagagaaagatataaatgtttcaatgcaaaccgaagatgtagagggtcctatcaatgcagggggggctgcaggaat

SEQ ID NO: 9556 - DNA, 4537 bp, Oryza sativa
ccatatggtatctgaacaagctgagaaatgtaacctctcaccttgccctttagcaacaaccaccacagcctcacattctcctgcaaaatccttggcatcaacatactgcttccccttcaggtacttcatcacctccgccttcggcgtcggcttcccgatctcctcatagtactacaaaaccatcaaaattttgcacaattcctcaagttactcatcagtgttccagtttcagggacacaaaaaaattcttgatacttgaacactgactgactgctgctaccttgacgatgtcggcccatcgctcgtcggagtagtcggtgccgtcgagcgcattgagccctccggtgaggatgtgagggccatcgctggagcgcagtatggcgttcatctgcttcatcctccagctctcatcaaggtggtcgagatgtgtgcagtggaagttgacctccccggctctcggaacctcaatggtggccctcagcacgttcctgcatgatttggaaaacaaaattaacgcttaataatcacgtggagggaccatggatgggaagcagaggcaagaggagttatgttcactgttcagatggccaggcacaatcagatatgttgctgtcatgaattcatggtgttttttttttttgctcccgttttataggctcatagctcgttgaaaggtgacggttttctgtttatgatagcaacatagagtgtaattgcagagcaaatttctctaaggcttctggtttttgtcaacatgaaaaaaagaactttttttttcaaaggagaaagaggaacgggttagtgttgaataattaagaagaaattgtgagtatattgggagtcgaacacatgacctcaaggtcagagtcaaaaccagccacacttgccactacgctagcaagcgcatctaagattttccttttcgaacaatataatcgaaaatgtttgtccaggagaatgatgggtaattcttaccacttttctgggtgaaacagaagttaagatgatgctacatgtaccatccaaaaacttctctcttctttttccctgaaatactagctatatagacctatggtaacatatgagtttgttctttgtttctcttcactagttacacaacacaaacaacaggatgattatcacaaggaagcagcagtcgttgttgtgcaattacttgccaaggcgccgctgcgtggccagatgttgctatccatcaaagccattgccccgctaattgtcttgccaagaaaggccctgcctagctactacttctactagtaccctttctcgatggcgactgctcggaggacgcacggatttcagattttcagatctctcagttctcacgagattatgtggcagcagcactttgcttttcattgaccacattatgtcagcattactgcattaggatagtataattaatattgcctatatcttttttgataatgaaaataaatctagtttctacatcaagatgtatgatcatggccgtgtttagttcacactgaagtttgaaaatttggttgaaattcgtacgatgtgatagaaaagttatgtgtatatgaaaggtttgatatgatggaaagttggaagttcggaaaaaaaaaactttagaactaaacagggcccatgtccgagacgagtgtgaccagggttcaccttttcttattgagatccgggatctctacccctgacggtacgacagttctggccaacttttggtcaaattttactgtttcgaatttgaattcttgaaaaccatttgaaatttaacaccggaatccgcttttctcctgcatctaaacctcgaaattccgcggttttcaattggaccctgagtatgatatatatatacatggagacctaccattccttgtcacacaacttccactgcccttcaactgcatctagctatcaactagtagtagtagttaattgagcacacctaaacctgtactccaatcacatgtgaacgcggtccttttcgcttaaacctaaccaaagcgtcacgcgtaacccattttataggtaataatcaagcaaaacaagccaaattaagctacaattggggtgcccattttggccttggattttatgggatccgtatgcatatgcatttcccagggttttgatctgccaaaggagcagctcacctaatcctcattattattattctacctttctaagaaaggagcattagttgctaaaaatctaaattaaactacgcatctgccatacttacccagtaatcatgttgcctcttgtcggattgtgtaacaaactcctaatcccaactgctactgtcaccgcaatctgctcgatcaattaattaactaatcaatcgctttgtattatagcaggagaccaggagctagctagtgatctgagaccttgactaaactccccatctttcttttcttaaaacatcttttaaaaattatactatcttcatctcaaaatataagcatttcttacttcatctcaaaatataagcatttcttactccgatcagacaagtgattgtctacattcaaaataaggccgtgtttagattctaccctaaaattttttgccctgacatatcgaacctttgagcacctgcatgaagtattaaatataggctaaaaaataactaattgcacagattgcgactaatttgcgagacaaatcttttaagcctaattgctccatgatttgacaatgtggtactacagtaaacatttgctaattatggattaattaggcttaataaattcgtctcgcagttcagttctgtaattagttttttatttttgcccgaacaccctatgcgacaccctatataatacccgatgtgacacgccaaaactttacatccctggatctaaacacccctaaaaaatacttatattttaaaagcggaggtattacttaattatataactaactcaatccatcattacaaggtagtaaaaggtggtcagcttcaggtaagctggacgacggcgacgctcaccgaaccgaccacctgcgtcgtcgtcgtcgctagtccctcgtcggattcctccggcgacgggacaaaacccaacggcaggcgtgcgtacggtacggcccaataattgggcggcgaccgcgacgcgtccaggaaattcgagacaacgggggcagctagataccaagctgaagaagaagcagaagcagcagcagcaaagctaagctagcggccggacgacatggtggttgcgcgtgcctgagtgcctgaccgacggcagctagcgccgacggccgacggggttacgaccgggtcactgcgcgaagtggggcccacgcgtgcatgcgtggggccccctgtacgcatgtgacatgtcacgagccacggttggacaaaggagtgtatagtacagtacagcagtatgagtgatgtacagatgtaatggtggtagcaatctgtctgctgttttacagtgttactcccttcgaaaacaatttaaaatagaatgagatgttttctagtataataaatctgaataagcttttatttaaatttattattgtagaaaacatcttattccacgtagattggtatttttagagacggaaagacaggatgttagagggtgagaatgtgagatgcaagcatagcttggcagctcatgcgcatctgaagcacaggatggaacattcagattcagagagtatggcgtggcgtggcctgccagctctgaatcccattattatggcagtagtctgtactggcaatttgcaagtgtgcaactagtaggagtactatctagtattgtcgtgtagaaaataagagatatatacatatactgaatccaatgaaaagcttttcttgctactcatcgagtgctcagttggtaggaattgtactgaattttctggaaatttacttaacctgtttctacacttttcaccctttggcttgttaaaatatcaaaatggttcaaaattttatattgaaaaaaattacggacccatcggcatatttgcaaataaatagtaatttgtgaataagacttttatatatgtatttcttagcgatataaaagtacatgctgaaaaataaactttgatgaaaaaacctcgaattcagctccaaatttaaagttaaaaatttaaaatttagttgataagcataagcataagaaaaaaaaaaagccccttaatcgtttgcaaccactgtacaccgtaaagtgaaaaatccatgcaagaaatgtgatggttgatgcgaggaaattaaattacggcgagggaaaaggagacgatcggactgaccggaagtcggactggtcggcgacgcgctgcgacttccagcgcttgataggccaccgggagagcacggcgttgccgtactccggcgcccagctctcggcgaacacgtaccgcatgccgagcccctcggcgagctccgacagcgggctcatcccgcgctcctcctccgcgcgcacgttctgcagcccgatgatgtcggcgcccacctcccggagcacctcttccacgctccgccgccgcccttccggggtaccgagctcga

SEQ ID NO: 9557 - DNA, 2143 bp, Oryza sativa
tttacctaaaaagtatgttacatagatatttttgaaagttacatataagttacatgcgagttacagtgtaattacatcacgattatactataattacatctgtcaaatttttaaaagaaaatttatcgataaatgtataggtgatcccttactaactaattaatcacgtgttttaattaataaaaaaggattttacctcgacgaagcagtcatgaaagaagaggcggacgagccctgcgccgatgccgcggttggtgtacacagcattcttgacggtgtccttcacaatttgctcagcttttgggcaagaggaactgtaataaccaactctaagccctagggacggcgggcttgggcttgccggagccgggctcggaggagttgggcttggtggaagataggttgtcggcgggctcgggctcaccggtgctaggctcggaggagtcgagctaggtggaggataagtaggcggcgtgctcgggctcaggcttggcgggcttgggtatgtaatgggtgtgggtgggctagcattgccggtatagccttggcatgtcacagagcccaccagagccagcaatgtgagcaacacagcaagcttagccatctctgattctctgcactgaactctgaagtagctacagtgttctgaaactctgaagactctgaactttttgatgaaatgcagctgcttctgcatctccatttatagtcagtccccagccgaagcagagaagaaacaatttggctggcacgtcgcggtgacaaatgcgttcgaagtcaagcagggaacatgggaatcgaacagctagctaggctagttgacatggaggtttctttgattaatttttgccggtaagctgcagctgcactgaacaagtcgacggtctggttggtttaatttcagaggtttttcgtcttgcagcgtatgttccatggatgggttgtttattgtttctgaatcaaatttatcacccagatttatgttcttgcggccgttgaattggcagtttggcattggttttgatgggactcgtccacgccagcgcctacttcccggggtggtggaacgccaagttcgcataggcgatggtgaagatgggcagcgtcaccgtcaagaccgccgccggcgagataaggaagcagtgtcggttcaccaaccaggggcctgtttggggagcttaaaattctgagaagcagctagttggtagccagcttctaagaatcaaagctgggttttccagcttctgtcttgtagttcattagctggattctacaactacagcttcttagaatctaaaccaaaagctagactgtttcgggagcttctaattctgagagaagctgcagcagttagaagctcctctaaacatgtcctagtactaatcacgacgctttacatgcatgcctcaagccgagccagtgaacttaatttagaacaataattatctagattatgtgtcacctgcgataatatttaggatcttatgcaacttcgattataaaacgtgagatttcctaaaattcactctttttatatggtctccattgatcccacaacaaatttaatcggttataaaattacacggccaacctccgctagttttactaatacgactaactaaactttacttagacatgttcttatgtcatatataagggcatgttcacggctggagcctggtatatactagtaggcaatacacgtcacttaagattataaactatactcaatttctcaaatattataagagtatagtttatagtttttctattttctcatgttccctaccctatagtaaaaatttcttctataaatactaagagtctatgtttagcctgtgttaagcttaaatgtttgagaaaattctctctgtacccctaaaaattcatccaatcccttctatacccctaagatttgctcattcccttccataccccaaaatttcaatttagatcccttctataccccttccgttagttgaccattagttgaccgttaaattcatatcataaagtccattttaccctttggtatcaagaaaatataaatttatgaagtatattaatagagtgtataaatttattgtatacgattattatatttatgagtttattttgtgagatattatttaacaaaagtaat

SEQ ID NO: 9558 - DNA, 7150 bp, Oryza sativa
tatattttcttgataccaaagggttgtcatagataaaaattatttttgttttcccttcgcgaggcgaaactaaaatattacttttgttaaataatatctcacaaaataaactcatacatataatagtcaaatacaataaatttatacacttcatcaatatacttcataaatttatattttcttgatagcaaagggcaaaatggactctatggtagaaattttgtggtcaactaacagtcaactaatggaaggggtatagaagggatccaaactgaaatttaggggtatggaagggaatgagcaaatctcaaaggcatagaaaggattgtgtgaagtttcaggggtacacagggaattttctctaaatgtttcactctcctttctctcttcaatgtcagtaaagagccttctattaatattattaacagatgttgtacatgccctaaactagaggtcatgccaactttggattcctttttttcagttagtaataatgtttaaggcctcctttggaacaaaggtttttttaaagaaatttaggagaaattcaatccataacaaagagtatggaaatttttcctccatggccccttttgattaaaggaaaagccatccgaaaatcctacggaattcatttggattggctcaaaacttagaaacttcggaggaaatgtccaacctcttgaaaaaagtatactttgtgtgtgtatctccgattctagcatttttcccgtgctccatccacatggttattcttatagtttccttacatttttttcaatctataggatttgaaatgttagtgcgctccaaccctcttttttttcttatttccgtgttatgagaaattgagaatcctacgtttcaaaggagcactagttttttaggcatttataactgaaaataccaggtattatgattttagaaaaccacccaaattatgtgcaacccatttcagttattaattgggtaaattaagaaaccgtgtacaacagtccaaagcggtattgtattcaaaagggaaactattttgatctcttgaagggatgtctcctcgttatttgcatgccaatcaaatggttataaaaagaatggaaaattttgagaagatgtattaacatgtgatataacactccacaagaatgcatgttcaaattcaacttttagatctcgcaacggaaaaaacaaattaaacagcaactacataatgtattgtcatagtcaattttttcttgttgcgagatgtagaagttgaatttgaacttgcatgtttatggagtgatatatcatatgttaatacatcttctcattttttttcataaccatttgagtgacatgcaaacaatgagaggatatcccctcgagggatcaaaatatacttccatattcaaaattcccttttcataattaaaccacactttttataatataaaaattatatccagcaaacagacataccctactactagtagtcagtctggcaagtctatattatcatctttattttaaaacatagagacaattgacatacaaaataataagagtcaacacggtgcgctatgtgactgcgtggtgagcacattagcagaccgacactaatcactagtattactagtacactagtctcaaaactaaactataattgtcggtgccccatgaccttctatgagtttctataccatcagattaacaacacaaaccgacagtcaaaactgaattagaaacacaggccgcgaagcgtaattagtgcaatccggtagttgcatcctacagaggttgcatcccatcaaaacctaaacaatgccaaattgccaatccaacggctgcaagagcataaatccgggtgataaatttgattcagacacaataaacaacccctccatggaacacactctgcaagatgaaaaacctctgaaattaaaccaatcagtatcaggccgtcgacttgttcagtgcagctgcagcttaccggcaaaaattaatcaaagaaacctccatgtcaactagcctagctagctgttcgattcccatgttccctgcttgacttcgaacgcatttgtcaccgcgacgtgccagccaaattgtttcttctctgcttcggctggggactgactataaatggagatgcagaagcagctgcatttcatcaaaaagttcagagtcttcagagtttcagaacactgtagctacttcagagttcagtgcagagaatcagagatggctaagcttgctgtgttgctcacattgctggctctggtgggctctgtgacatgccaaggctataccggcaatgctagcccacccacacccattacatacccaagcccgccaagcctgagcccgagcacgccgcctacttatcctccacctagctcgactcctccgagcctagcaccggtgagcccgagcccgccgacaacctatcttccaccaagcccaactcctccgagcccggctccggcaagcccaagcccgccgtccctagggcttagagttggttattacagttcctcttgcccaaaagctgagcaaattgtgaaggacaccgtcaagaatgctgtgtacaccaaccgcggcatcggcgcagggctcgtccgcctcttctttcatgactgcttcgtcgaggtaaaatccttttttattaattaaaacacgtgattaattagttagtaagggatcacctatacatttatcgataaattttcttttaaaaatttgacagatgtaattatagtataatcgtgatgtaattacactgtaactcgcatgtaacttatatgtaactttcaaaaatatctatgtaacatactttttaggtaaaacggaggtcgtgggagctaatcctctcaaatgtttgcacacagtgacttttttcattcttcatttgcataaatcttgaaacaatctaacggtttaaaattatgtgaaagctatatgcaagttacattatagttacagtgtaattacactccgattgtgctgcaatcgagttagtaatccacgtgattaatgtggctgtgtattgtctcctttcgattgatcagggctgcgacgcctccgttctgctcgacccgacgacggcgaactcgcggccggagaagctcggcgtgcccaacttccccagcctccgcggcttcgaggtgatcgacgcggcgaaggcggcgctcgagagcgcgtgccccggcgtcgtctcctgcgccgacgtcgtcgccttcgccggccgcgacgccgcctacttcctcagcaacgccaacatcgacttcgccatgccggccggccgctacgacgggcgcgtctccctcgccgacgagaccctcaccaacctgccgtcgccgttcgccgggctcgaccagctcaagaagaacttcgccgacaaggggctcgacgccgacgacatggtcaccctctccggcgcgcactccatcggcgtctcccactgctcctccttctccgaccgcctcgcctccaccacctccgacatggacgccgcgctcaaggccaacctgacgcgggcgtgcaaccgcaccggcgaccccacggtggtgcaggacctcaaaacccccgacaagctggacaaccagtactaccggaacgtgctcagccgcgacgtgctcttcacgtcggacgcggcgctccggtcgtcggagacggggttcagcgtgttcctgaacgtggtcatccccggccggtgggagagcaagttcgcggcggcgatggtgaagatgggcggtattggaatcaagaccagcgccaatggcgagatcaggaagaactgccgcctcgtcaactagccgccattgatcatcggctaatgatcacagttcacgtcacagaataagctcgtgatttttgtttgtcatatattttccaccgattaaaggtttaattagttagtttaattttgccattcttttgttgtaattctgcatgtatctaatattggaatttcagcaagttttaatgagattattattgataagtacttccctttttaatgagattattgttggttgtgtgtttgcaaaatttaacatgaaatgagcgtagctgaactgattatattacttatggtaaaaccagcccacctagatttaaattttagatttgacacgacacgggtgtttgtatttactgctaattattttttcgatggtagatgacgtacccgatgatagcggtcgcaacagctgaaatagaagccgccaaaagcataaagctctcaaagatagtccttgtgtcaaagataaggaaagaggccaaaaattaggctctatcaggagcaaaatgattctgagctcacatatcttaactattttttcctttgtacagttcttctcttacttgtccaatctttttgatcctgctatatcgaaaagaaattgacactatagatgcacgttaaaaaaatcatttgtttctcgagcttcctgaagccattaatttcttagtgtcaaacatgctagaagcagacaatattgaccggagatcttcagaaacgagttatcaacccttgcaaaacgccgttagtagttcatgtctgtagttcacaggtattgagaaattcgcctccgcgaacttggcgttccaccacccggggaagtaggcgctggcgaggacgagccccatggtgtccgccgccgtcatcagcgccgcgtccgatctgaacagcacatgctggctcatcacgttcttgtagaccagtgacgaatctagaaataaatagcaatgggatttgagtaaactagatagagttacagtccccctcctatctacatatgataaaaaattttagtggggtcttcgtgggggctctcatagtcttcacgtcagtagtgggggctcgagaccccgccgcccccatgctggatccgcccctgcttgtagtactggttgtccagcgcgtcgggcgtcacggcgtcttgcgccaccgtgtcgctcggcgtcgtgcactgccgccgcagggacgcgacgaggtcggcgtccatgtcggagccggaggtggtggtgccactgggcggcgggacgcggtcggcgaaggaggagcactgggagcggccgatggagtgcgtgccggagagcgcgaccatgtcgacggtggagtcgggctgccaccaccgtagccatagccgccggtttggcacgcaacggaggcgagcagcgcgagcaaggtgaggacgacgacgagcttagccatggtagcgggaaactattttcatccctcgaggggatagccgccggtttggcacgcgacggaggcgagcagcacgagcaaggtgaggacgacggcgagcttagccatggtagcgggaaactattttcatccctcgaggggatagccgccggtttggcacgcgacggaggcgagcagcacgagcaaggtgaggacgacgtcgagcttagcctcccctcattgtttgcatgtcacccaaatgattatgaaaaaaattaagaagatgtattaacatatgatatatcactctgcaaacatgcaaattcaaattcaacttctacacctcacaacgaaaaaaacaaatttgactgttaatatatgataactagttgtagttaattgttttttcgttacgagatgtagaagttgaatttgaacttgtatgtttgtggagtgatatatcacatgttaatatatcttctcaattgttttcaaaatttttcatcactatatgggttgacatgcaaacaagaggatgtcttctcgagggtgaaaatccactcccgtagtagctagctatactgagcagtgagctcaagagtggcaagagagggatgaagaggagatgctgggttgcatggctatttatagtcaccggacggcggccggggacgcacgccgacacgccgtacacagtacgtactgctgcttgggaatgtttttggcgcgcacgttgtggtggtggtggtgtggtgtgtgcagggtcaaccgtccggtgaacgtggcgagcagatcgaatgatcgatcgaatacccaaagctagcttaattagtgttagctagctagtgtgtgcttgcattctgcacaagtcatagctatagcgttaacatgagctgctcgatcgatgacgttgtaggtgactcgatcagagaagggaggatctaccagaatcccaaattaaactctgaaactctgaatgtcaaatcaaattcacatccctttgaccggagaacggcgtaaaccggaacgtgcggcttggctgggtcggagcgggaatccgacctccgtgcagctcattttttttgggttaggaatttgtggcatataattagttatgtgggctcagatctgctcttgacgggctttcattaaaggcctggcccaacccatcacggagacaacagtcttcaaatatgcttataggggtagaatttacgtgcgtgcgtttatagggggtgagtgtgtgttgtgcgttgtgagtgtgtatgtgtttatggtgtgtaattttttttaaaaaaacaccagatttgtacattacacgccattactaaacgcgccgatcgatcgatgcagcactggtatcatcttcttgtcgggcaaatattctagagaggaaacaaaatagccaggaaaatatttttagataaatagggagtactagtatagtacacgcatgattacatagcatgcagccgccaaaataagaagggacgcagtatcatttttgtctccagcctcccaacagctgaaagccacgattatacgtaccttcatgatgtcaaaccaaacgtgcaagaagcagacaatatcgaccggagatcttcagaaacgagttatttttcctcgcaaaacgccgtcagaacaacccaactaaatacccctaatctagacgcccgttcgaacatatccattgtcggagctatattagccgttgaccccggcaatgtcaacttctgtatagctcgatcctgttcgatcgatgatctataactgcaaatcgtgctcccatgttctgccggttgataatcaagctgctaaaaatgattagaatttcttaattaattatacacacaaacattccctccaatgcatgcatgcacatattctgatcgattcatcgatctccatgctataaatagactcacagaacagcagcttccatcacactaacacttgaattaacacggagtagttgtgata

SEQ ID NO: 9559 - DNA, 3655 bp, Oryza sativa
  unsure (1)..(3655): unsure at all n locations
cgaggggaaaggattttgctagtaataactctgatgcggattntatatcattatagattatgaaacaagatgttgaacaccaagatttggtctttaaataagttggttgcaacatcatggctggagggaggatccttgagcttcaaagcacctggttggaaacatttgctaccaagggacccagcttcaacctccaaatggccaatcagttgccatgagtttatcattgaaaacaatgtgcagagcctttgttcatgttggttgcagacaagcatactgcctacactttgaacaggttcagacttgttcagatttgcagctgaagcagtgcaatgaatcagtgcaaatgtgcaatgcatcagtgctaacaggcactgtgctgcaacaggggaacacaacaagatccagtacagttcatgtcatttggctggatggagatccagacttgggctgcctccaagaaaagccggtaagagtgtggcatttgcctccatgacaaagttggattaggcagaggccttgacaaattgtcgcggcaaaacataaaagatggcgaaaccaagaacaggctaaagaacaacccaggattggatccatatatcccatgcattgcaggataagtgaatggtgctgaagcttcagttggaattgacgttttacaggctagctcatggtaattcaggaactttacagagctcagaaccagcaacctcaagcttacgttatgccactgctttcagcaacttcttcctcacaagaacttcagggttttggtcatctccttgacaagatagtattcagagagagctgtgacaaaactactatccatgataatcaaagcattcaaaaaccacatcgaatccctctccaaaaaacctacatcaaatcagcatgacagcgtatgaattgaagcccttcatcaataatgctgtttactgtggcagtgtggtattctttcctcctccgaaaggatgtagtcattcagaggaagttgcatgtacttttcatgactactgatcacctaagcacttcatcaacatgcgcgaagagcagcattatttgagggtaatgtcatatatgactccttcaagatttgagatggttgttcttgtcccatccacctctttgacatgcattccatgtttttcagcttccttgagcactagaacatccatgctggtaatcaatgagagcagcagtgtcttagttaaggaacacacaagttatttttaaatgatctatcaacacttgaagtagtacaaaatcaattaaagttagatggagagtaaaataacccaaaaaaaaaacatgggatgacttattgagagttgggattgctccagattttactggaatttgttacgagaagctccaaaaggtcccaactaagtgaaagggacaacactaaatagcttaattattttttaccacctttctgtattgcagttttttaaacagtacaatctggacataccaagtattatgctggcagtatgtgcaagatgtcagtacagtaatcacattctggcagtaccaagtaaaatatccacagtatgctgctacctgttctagcccagttaattgtaatcaaactactgcaagccaacctgtatattctatttgctcatgaatgcaactggagtactggacaatcattttgcagaggacaatgaactgtcaggtgcagagtatctcaaacaagcgacaagctgacgagagaatgggtgacataacaccttgttgccatgaaaatctgcagaacttctgtagatctacatgtcactaggaaaaagatttgcctgtgaccatcctctctaagtactaattaacgctagatcatatttcagatgtttaatctgctttacatttgaatccatcagatcaatatattttggatgcagcattttgattatttggtgctattgatgcactcctgatttcacttgtatatatctttgatcagttctatcatgactactcagctacctttcatactaagatattcattattccatgtgtagcaaacccagacctatagtacaagcaagttaatcggtatattaaaaagaatcaatagctaagtcagtccttgttcttggtagacacaataaggataccaccaataaaaatgtacctattccatagttttatcaataaaaggtacaatcatttatattttgatcagaaatgagacacgcattaaattggctttcctaacttggaacagcattcgggtacacgatttcacaaaatattagaaactctggtaaaatatgctcggacaggaagatgatgagttattgagttgagaaaacacatacactttagctcgtgatacataagccaatatgaatctacatttactagcctgaatacgaagaagcctctctacagtatcaaagagacaggaaatgctagattgctgaaagctttctgcgagtcaaggttcacaaaattcacaagatgcaacaatcgatatacgattatatgtcagaaagaatagaaagagaaaggatcagaactgaaattaaatcacgggaaagtaagaaagaagaaatcacagcaaagtaagaaagaaggatataaatatcagctccaaggatgagatcaaatccagaaggatgtttctcaatgatattgcttatatgaacatagtttccccactctagcttctctgctgtcaacactgcaacaaaagtatcagttctatttgatatctggaagatttatatttcagtgattcacataatgatgaaacataattaaccagaagttaagaagtggtaacctgcattggcattcccagaacatgactgcatctctatattcttctttataatctgtcaaacaatctttggaataaatagatgcaacatttatatagaataagtagatatgcaagtggcacaatggaatcatccttgaatattttataatgtatgactatgacaccactttctagaatttgaagataaagcagctgcaccgaataatatgtgaacacaatgtgaaagtctcaatatcttctgtattttgtcaaactaagtgacatcactggaagatattcgtaaggtttgaagcttgcctctagaacttcatcattgtgatcagtcaagacaacttctttgcaaaaacggctgcacaatatgccagtaatgcctgaagcaagtcacaagctcacaatactgtcagattttccaagatcacaaagtgaagtaaacatgagaggagaatgccctcaccaaccccagatcctagctcaattattgaatgatccttcacagtctcaggatgttcagacaagtaggtgttcatcagaactgcacctggccatactaactgtccagtaagatcataatcagctgccacaaatcattagaatgtttgtaagtgttggccccatgataaggaaacagcaaaaatctggcgttatgaagtgcaatgcagcattgtgcccagagcaaaaatacacccaaacaagttaatgtactgatgagaggttctagtttgtaaataagattgttcatatttgtccactgcacaaatagaaataaacttgagtatatcatgctcagatctaacttttgtgttccacggaagagctatctccagataaatgatagattgatagttactatgttacacaaagcagcat

SEQ ID NO: 9560 - DNA, 7791 bp, Oryza sativa
ctgcagcccatacatctagtaaaaggtcttggagtagaaaacgataatcatatttgcatatggatctcttagaggaacagccatgaaaattgattttcacatacggttgtaggaccgtctacaaaattgacgatataaatgttggagacgttgaactaaaataataagcgatatctctttcttgatcaagaaactcaatttgaggggtttttttatataccggtaaatattcgctaccgtattcgttccgtctcgtattcgctccgtatctgtattcgataatattcgatttcatttccgtatccgagttttcgatttcgattccgattccgaaaaaaatatgaaaacgaatatgataaagctagtttccgtccgtttccgatccattttcatccctatgtacggccggaagcgcggcgaggtcgaggctggcgtggcagtcgtccaagcccccttacggcgagcagcgagagcgcgctgagcaccacgagtagagtgttcaaaaattagtggagtgaataaagtctatggaattatatatttaaatatgaagggggtaattttctcggtccaccaaatatgttataactcatgcggattcacggaagaaaatatgttatcaccatcatgttgtgttcaacattgttatcgagcgatgatacgtaacgtgcatgaggttgcttggttcagttaatcttttttcccttaaagaagcgtgtttaaattctgccgcacacacaacagcatcaacgcaagatgtcaggccttcatgcttaaccaggtgcgtgacaaactaacaatcaataataatctcattaaaaagggaaatatttatcgataatagtctcataaaaaacttgctgaaattccaatattggtacaagcagaattacaacaaagggtgcaacaaaagaatggcaaaattaaactaactaattaaacctttaatcggtggaaaatgtatgacaaacaaaaatcacgagcttattctgaccaacaacatccccgtcgtcggagatgtggattaactgtgatcattagccggtgatcaatggcggctagttgacgaggcggcagttcttcctgatctcgccattggcgctggtcttgattccaatgccgcccatcttcaccatcgccgccgcgaacttgctctcccaccggccgggaatgaccacgttgaggaacacgctgaaccccgtctccgacgaccggagcgccgcgtccgacgtgaagagcacgtcgcggctgagcacgttccggtagtactggttgtccagcttgtcgggggttttgaggtcctgcaccaccgtggggtcgccggtgcggttgcacgcccgcgtcaggttggccttgagcgcggcgtccatgtcggaggtggtggaggcgaggcggtcggagaaggaggagcagtgggagacgccgatggagtgcgcgccggagagcgtgaccatgtcgtcggtgtcaagccccttggcggcgaacatctgcttgagccggtcgacgccggcgaacggcggcggaaggttggggagcgtctcgctggcgagggagacgcgcccgtcgtagcgccccgccggcatgtcgaagtagaccttgttgccggagaggaggtacgcggcgtcgcgcccggcgaaggcgacgacgtcggcgcaggagacgacgccggggcactccccctcgagcgccgccttggccgcgtcgatcacctcgaagccgcgcaggctcaggttcgggatgccggccttctccggcgccgcggcgctcgccggcgtagggtcgaggaggacggaggcgtcgcagccctggacgaagcagtcgtggaagaagaggcggatgagcccggcgccgacgccgcggtcgccgcggccgccgcggatggcgttcttgacggcgtccctcacgatctcctccgcgcggtcgcacgtgcccttgtagtgcccgaccgtgagacctccggcgatcgagcccggactggtatagccatcgccattgctgctgccgagcaacgcgagcaagacgaagacgacgagcttattagcagccatggatgccatagctagcttaattacaagctttatcacaactactccgtgttaattcaagtgttagtgtgatggaagctgctgttctgtgagtctatttatagcatggagatcgatgaatcgatcagaatatgtgcatgcatgcattggagggaatgtttgtgtgtataattaattaagaaattctaatcatttttagcagcttgattatcaaccggcagaacatgggagcacgatttgcagttatagatcatcgatcgaacaggatcgagctatacagaagttgacattgccggggtcaacggctaatatagctccgacaatggatatgttcgaacgggcgtctagattaggggtatttagttgggttgttctgacggcgttttgcgaggaaaaataactcgtttctgaagatctccggtcgatattgtctgcttcttgcacgtttggtttgacatcatgaaggtacgtataatcgtggctttcagctgttgggaggctggagacaaaaatgatactgcgtcccttcttattttggcggctgcatgctatgtaatcatgcgtgtactatactagtactccctatttatctaaaaatattttcctggctattttgtttcctctctagaatatttgcccgacaagaagatgataccagtgctgcatcgatcgatcggcgcgtttagtaatggcgtgtaatgtacaaatctggtgtttttttaaaaaaaattacacaccataaacacatacacactcacaacgcacaacacacactcaccccctataaacgcacgcacgtaaattctacccctataagcatatttgaagactgttgtctccgtgatgggttgggccaggcctttaatgaaagcccgtcaagagcagatctgagcccacataactaattatatgccacaaattcctaacccaaaaaaaatgagctgcacggaggtcggattcccgctccgacccagccaagccgcacgttccggtttacgccgttctccggtcaaagggatgtgaatttgatttgacattcagagtttcagagtttaatttgggattctggtagatcctcccttctctgatcgagtcacctacaacgtcatcgatcgagcagctcatgttaacgctatagctatgacttgtgcagaatgcaagcacacactagctagctaacactaattaagctagctttgggtattcgatcgatcattcgatctgctcgccacgttcaccggacggttgaccctgcacacaccacaccaccaccaccacaacgtgcgcgccaaaaacattcccaagcagcagtacgtactgtgtacggcgtgtcggcgtgcgtccccggccgccgtccggtgactataaatagccatgcaacccagcatctcctcttcatccctctcttgccactcttgagctcactgctcagtatagctagctactacgggagtggattttcaccctcgagaagacatcctcttgtttgcatgtcaacccatatagtgatgaaaaattttgaaaacaattgagaagatatattaacatgtgatatatcactccacaaacatacaagttcaaattcaacttctacatctcgtaacgaaaaaacaattaactacaactagttatcatatattaacagtcaaatttgtttttttcgttgtgaggtgtagaagttgaatttgaatttgcatgtttgcagagtgatatatcatatgttaatacatcttcttaatttttttcataatcatttgggtgacatgcaaacaatgaggggaggctaagctcgacgtcgtcctcaccttgctcgtgctgctcgcctccgtcgcgtgccaaaccggcggctatcccctcgagggatgaaaatagtttcccgctaccatggctaagctcgtcgtcgtcctcaccttgctcgcgctgctcgcctccgttgcgtgccaaaccggcggctatggctacggtggtggcagcccgactccaccgtcgacatggtcgcgctctccggcacgcactccatcggccgctcccagtgctcctccttcgccgaccgcgtcccgccgcccagtggcaccaccacctccggctccgacatggacgccgacctcgtcgcgtccctgcggcggcagtgcacgacgccgagcgacacggtggcgcaagacgccgtgacgcccgacgcgctggacaaccagtactacaagcaggggcggatccagcatgggggcggcggggtctcgagcccccactactgacgtgaagactatgagagcccccacgaagaccccactaaaattttttatcatatgtagataggagggggactgtaactctatctagtttactcaaatcccattgctatttatttctagattcgtcactggtctacaagaacgtgatgagccagcatgtgctgttcagatcggacgcggcgctgatgacggcggcggacaccatggggctcgtcctcgccagcgcctacttccccgggtggtggaacgccaagttcgcggaggcgaatttctcaatacctgtgaactacagacatgaactactaacggcgttttgcaagggttgataactcgtttctgaagatctccggtcaatattgtctgcttctagcatgtttgacactaagaaattaatggcttcaggaagctcgagaaacaaatgatttttttaacgtgcatctatagtgtcaatttcttttcgatatagcaggatcaaaaagattggacaagtaagagaagaactgtacaaaggaaaaaatagttaagatatgtgagctcagaatcattttgctcctgatagagcctaatttttggcctctttccttatctttgacacaaggactatctttgagagctttatgcttttggcggcttctatttcagctgttgcgaccgctatcatcgggtacgtcatctaccatcgaaaaaataattagcagtaaatacaaacacccgtgtcgtgtcaaatctaaaatttaaatctaggtgggctggttttaccataagtaatataatcagttcagctacgctcatttcatgttaaattttgcaaacacacaaccaacaataatctcattaaaaagggaagtacttatcaataataatctcattaaaacttgctgaaattccaatattagatacatgcagaattacaacaaaagaatggcaaaattaaactaactaattaaacctttaatcggtggaaaatatatgacaaacaaaaatcacgagcttattctgtgacgtgaactgtgatcattagccgatgatcaatggcggctagttgacgaggcggcagttcttcctgatctcgccattggcgctggtcttgattccaataccgcccatcttcaccatcgccgccgcgaacttgctctcccaccggccggggatgaccacgttcaggaacacgctgaaccccgtctccgacgaccggagcgccgcgtccgacgtgaagagcacgtcgcggctgagcacgttccggtagtactggttgtccagcttgtcgggggttttgaggtcctgcaccaccgtggggtcgccggtgcggttgcacgcccgcgtcaggttggccttgagcgcggcgtccatgtcggaggtggtggaggcgaggcggtcggagaaggaggagcagtgggagacgccgatggagtgcgcgccggagagggtgaccatgtcgtcggcgtcgagccccttgtcggcgaagttcttcttgagctggtcgagcccggcgaacggcgacggcaggttggtgagggtctcgtcggcgagggagacgcgcccgtcgtagcggccggccggcatggcgaagtcgatgttggcgttgctgaggaagtaggcggcgtcgcggccggcgaaggcgacgacgtcggcgcaggagacgacgccggggcacgcgctctcgagcgccgccttcgccgcgtcgatcacctcgaagccgcggaggctggggaagttgggcacgccgagcttctccggccgcgagttcgccgtcgtcgggtcgagcagaacggaggcgtcgcagccctgatcaatcgaaaggagacaatacacagccacattaatcacgtggattactaactaattattaatcacgtgttttaattgtcgaaactagatttcggcaataataaaagggggtggctatcaagctcggaaagtgtatgggtttggagacaaaggatttatacaggttcaggccttcttataaaagaagtaataccctactcctgtccggggatgaatccgccgagtgtattattgattgtatgattcgggaaaaatcagcatatatccctagaggcgcccggaccccctttatatactggaaggagtccggattacaaaagataatctatattcctaacggaatatgaagatagaggtaaaatacagtcgtaaccgactaagtctcagggtgtttccttgatacacaagttaagaaacaaacccgagatacagataagatattctatctacattaagtatccggtacccagttcgaataccatcgccgtgtagatatgggatacccataatctccacagtagcccccgagtcctttgcagtcgaccatcatagtcttctcaaagataataatccgagtacttcaaactcttcaagccaaaatctgccgagtggactgtaaagggcgaaaaaaataaagaatatggtgcatcgaatagatgcacctaattaggtgtagcccccaactatgtgattagttaataaactaaacatatagttgaaagacaaaataataacacaattgtgcattatatgacaaaagcatacgcggcgcctaaataggcatactagccgactgctttttagccaccataaaagaaatccgagtggtttacactctaaaaggttcacgaatgaacacacttgacaggcatccgaataaaaaaattctaaagattacccatcaagtattataaagattatggtaataaataagtcaaatagcctaggccatgactatttaccatgaaaataggcatataacacgccaaggaaatgactataataaaaacaagtcattcctagttaacccaaacagcttttgtagcctaaaaaagcttgcaaaaacagcatgacgcctttctgtcgggcacctttttaatttgcattgcaataattccaaagaattatatgaccgcataaaaaggatttgatcagcattgggcaacactgttgtgcgcataatattgccaaagcaaaatatgcctaagtccctaaggaacacaatgggccacgctgttaaaagtattgggctgaagtactgtgcaggcctaggcccattagcacctccgatacccttaactgaaaaatcctatatccaagcgacgcttcgtcttccccgccggaactctcgccattttccccactccttgctacagtgaaaagctgcgccggcgaactagggttcacaactccggccaaatccacctccgaaaaacgcatcaaaatccttcccgtgatccaccgcctcaattcctcacctctcccaagccatccctcgaatcaaaccagcacatttgagaaaaatcgatggcggaagagagagaaagctttgaaggccaatgggcggcgtccgatgtgacagaggagaatctgaaggagatggtggcgcacggtgttctcccagccaaagagatcatcgggtggcggccagcgtacggtgaggcatttccatctccagatacgcatgaaattgtagtcttctcgcattt

SEQ ID NO: 9561 - DNA, 7260 bp, Oryza sativa
aataaggccaagagctagtttgatctcgttgatttgcctcatctttgtgcagtttatgacttgttatattccatcgcaatggatgaatccgtggggaactatatgataaacttggcaaacatttatgagtttttcatctgaattgaatgtccgcacgattatattagcgaaaatgttcagtaagaactctatgaatgctgtagttagcattcgtgcttagagcatgaaaaatggtagttcgatcttgttgatttgcctcatattgcgcagttcatgacttatagggatggtttggtttgggggtctaaattagccttaccaatatttgacaattttaatagcgtttagtgtctatttggtttggagtcaaattttggcatgcctaagaaaataagtcatttaaatagttaatttaggctattttgacttcaatccaaacacaactttgccttaccaaaattatgcatgccaaaatttgctaaaatttagcattgacaaaaattggtaaggctaatttaggccacaaaacaaaccagcctatattgatgtggaaatctttaattgaaatggatgaatctgtgggaaagcagatgataaatttggcaaacatatataaattcatctgaatattgcaaggtagttagcatgcatgcttactagagcatgacaaaatggtagcaccaagaataaaattatttgcaacgaggtccgtcctcgccgccggcggccggtgagctcgaacacgcggtggccccggagctccggcagttttgtctgctccgacgagacgatctggccggtggagacgttcgggacgccgtggcgcctgtggccgaccaacgccggggttggaaaccggacgtagccggtgaggcggtgacgtcacccgttgaggcccaactaataatatgggccggaagttcgccacagcaccgtcccggcccaactagcattacgggcctcatatgggccaataccaaactacggcaggccgcaccgtcacggcccaactaataatacgggctggaagttccccacaacggcccaactagtattatgggccaagctccgctccggcccaatagctagcactccaggtcggagggagcagcgcgtccgtgtgttggcctcacgctcgctgcctctcctcttggcccggagctcacccacgcacgcagccgtctcgtctcccttcttctctctcctctcctctcttctccggcacaccacaccccaatcctcccccgatctccccaatccgagagctccggaggagcagcgcggaggcggagatggcgctgcggcgagcgctgctcagatctgccgagatctcccccgatcgcaaggtccgaatccccgcccttctccactctcctccttcccccccatctctctccggtctggatcccccaaccacgaggggcgcgaacgctgttaccgcctttgcgagaatctgagaggagtgcgcgtagcgggtttgagctgtgggagggtggaggagggtttgcaccagtcgatgtgtgttggtggtgcgcgcatggcgacgaatctcttcttcttccgggagtagaggataggtcgaggggagaggagtaaccgatgtagagcatggaatgccgatggacagttaggaggggctccatgtccgtctcttttgcatttcgtattagttctgtagggatttctggctgtaaagtgtttacgacttgatgcttaggatcgagtttcagtttgttgcggatgtggtttcttgttatgtcgtggatactcggagcatgccgtaaattgcttggataggccattcaaaatctcatttgtgaaaaccgaaaatgaccatgcagttgcagactagttactacctctttgtattcggtattgctgatgaaaacatgtgctacactcctttgcttgattgaaatagagaacaataattcaaaagctcgtttttgaactgaagatgaccattcagttacaggcttgttgctacctctttgtattcaatattgctgatgaaaacatgtgctgcactcctttacttgattgaaacgcgaaacgatctttactctttctactatattagtgtttccctgatgccccgagcggaataccagtattgtggttatcttatttcaatagattaaacaaacatggtgcatttatgaatatgctacattctgtagggatataaatgtgtttgatattggtatttcgtggcttctcctttgggtacaactaagaacacaacaaatgatacttcacctcaaagtgatactatcttttatgcctttcgtaggcttacttagtttttactttgcatataaaaccactactacaaataggaaaatcgtattgcagatactgaaaacctgtcctttatcaggacaggtatgctctatgctgcaatgagattatcaaaaacaccaacttgctgccaactgagcatttgatcttttctcttgttacttagatacttctaaaataatgctccaacattgtaggcacctgctgggcttatatataattcatgtttcacttatgggctgatatatttgaacttgatgtatttattttggtttctaaatctgcaaaattgttcccattctattcgttgatttaccatttacctgcagcagcaagtttgagttgaaagtagagatccttgtcaccatgttctaattactctattctagttcacttaactagttaaaaactgaaggcaagagcatcagaattctgtatttctgatcatttcttgatgttcatgttgttcttaattttgcttctttcaacacttgcttggatacttagtcagctttcaaatgaagattactttagtcttttgcttttgacaagtattggcgtattgtagtaaagtaactacaaacttttttttgtcctgaatcacatctcatggatcaagctgtgataacaaattggttttttttttcttgtcaggctgcacttgagtacctccattatctatcgagagcacagcctactcgttctctaacaggtgctggcctttattctgctggcaaatcattcagcactcaggctgctactacatcaagcacaccacaacctccaccaccacctccacctccggagaagactcactttggtgacctcaaagatgaggaccgcatttttaccaacctctatggtcagcatgaccctttcctgaaaggtgcaatgaagaggggtgactggcatagaaccaaggatttggtgcttaaaggggcagactggatagtgaatgaaatgaagaaatcgggacttcgagggcgtggaggtgcaggattcccttctgggcttaaatggtccttcatgccaaaggtatctgatggacgcccttcttatcttgttgttaatgctgatgagagtgagccaggaacttgcaaggacagagaaatcatgcgtcatgacccccacaagcttctggaaggctgtttgattgctggagttgggatgagggcatcggctgcttacatctacattagaggtgaatatgtgaatgagcgtctcaaccttttgaaagctcgggaggaagcatacgcagcaggtcttcttggtaagaatgcttgtggatctggttatgactttgatgtgcatatacattttggtgctggtgcctacatttgtggtgaagagactgccctactggaaagtctcgaaggcaagcaaggtaaaccaaggttgaagcctcctttccctgccaatgctggcctatatggctgccccacaactgtcacaaatgttgaaacagtggctgtgtctccaacaattctcaggcgtggtccagaatggtttgcaagctttggacgcaagaataactcgggaactaaactattctgtgtctcaggtcatgtgaacaaaccttgcactgtcgaggaggaaatgagcatacctcttaaggaattgattgaaaagcactgtggaggtgtgagaggaggatgggacaacctgcttgcaattattcctggtggttcatctgttcccttgttaccgaagcatatatgtgatgatgtgttgatggactatgatgcactcaaggctgtgcaatctggattgggtactgcagcagttattgtgatggacaagtccacagatgttgttgatgcaattgctaggctatcgtacttctacaagcatgagagttgtgggcagtgcacaccttgcagggagggaacagggtggctgtggatgatcatggagaggctcaaagtaggtaacgcgaagcttgaggagattgatatgcttcaggaggtcactaagcagattgaagggcatactatttgtgcccttggggatgctgctgcatggcctgtgcagggacttatcaggcacttcaggccagaactggaaaggagaatccgtgagcgagccgaaagggagctactggcagcttcggcttaggacactgtcaatgacgatcctgcactagtttcctgatttctttcacagaaataatgcaaactgatggagctcatctctgtatacgaaatgcagctcccctgatttgtttaaacctttatgtggatgtttatttaatgcactcagaagctggtgaattttgatggactgatgaaaacttttttaagtagaaacaaaatgcagttactgtaccatgtatgtcacatgagccagcaaaatatgatggtggatgtggacgtgtaccctgcttgtttttttttcactgttaaactatgcattgtttgaaattgtctagagttcgtgtgagctggttgaaaccatgtctacatctggggcctatgtttgcatctaatgagccagcataatctcatctgcatggcatattgttgatctgcatacttctatagggccaccggccctggcatgcatctgttcgtgattaaccaccggatgcttcatggtggttgggatatctacaaatgtattctggacctgtgtttattgtactgtttggtacagcacgtatccatcagctggtatgccgtgccgtatccagtagttgccaccgtcagatatctctggaatagttgggcttgccggttactgttcttccattttgtctccaggaatctgaatttgcaatggaacagttgagttgactgtgtccagaagatgtgtaataccaaactattttataatctctgttaagtaaaacatgagcattaagcaatgacaattcaactaaggcttgtttagattcaaactttttccttcaaactttcaacttttccatcacatcaaatgtttggacaacttttttatcacatcaaatgtttgtacacatgcatggagcattaaatgtggacaaaaaaaaaatcaattgcatagtttgcatgtaaatcgcgagacaaatcttttagtctaattatgccatgatttgataatatggtgctacattaaacatttgcaaatgacggattaattaggcttaatagattcgtctcgcagtttacaggcggaatctgtaatttgttttgttattagtctacgtttaatacttcaaatgtgtatccgtatacttcaacaaaattttggcacacgaactaaacacaacctaagcaaccaaagcttcggccactcatcacatatacgagtagaagatatgctgatttcagggtttaacactgagggtgtgtttagttcacgctaaaattggaagtttggatgaaattggaacgttctgacggaaaagttgaaagtttgtgtgtaggaaagttttgatgtgatataaaagttagaaatttgaaaaaaaagttgggaactgaaccaggcctgagagcctaagtcactactgcatctcacttccacttctcctttacggcaaacagctcactctctgtaagtagaaccagatgtaaggtagtaaccacaaaaaggggaagccaggccaaaatacattacttccacttcttggtcatacatcacatccttcaacctcattccaaatattagctgtatacacaattaaaagcaacccacaaagaccttttggcaccaacaaagattaaaaaaaaaccctgaaatttactcaatcagaatgtcatttagctgcccataatcccttttttgaacacttcttgtttatcttgactactctctgtctctggttgccgctttcttcatcagtttctttcttgtcctgtattgttacatcaactttaacgatgtgatgatcagatgttccttttgaggatatgaccgtgtaagatcctggcacgaacttgtagggagagtttggtgaggccagtatgtaatccacccttgtgccatacttgcatgtcccttgtacatctgaagttcataaaaagttcagatattcagtaaccactatacagcaacagcgagtaactgaaaaactaacaaagatcttgtgtttcataaggtagctgaaattggttgtgcaatgtgataaatgcaccttaggtcatcaatttttagaggaaatcatctaaaaatgaggagctgcagtccatcatatacatcataggttcagtaaagagcagattaactgaaatgaaactactttgttggccatatggtatctgaacaagctgagaaatgtaacctctcaccttgccctttagcaacaaccaccacagcctcacattctcctgcaaaatccttggcatcaacatactgcttccccttcaggtacttcatcacctccgccttcggcgtcggcttcccgatctcctcatagtactacaaaaccatcaaaattttgcacaattcctcaagttactcatcagtgttccagtttcagcgacacaaaaaaattcttgatacttgaacactgactgactgctgctaccttgacgatgtcggcccatcgctcgtcgcagtagtcggtgccgtcgagcgcattgagccctccggtgagaatgtgagggccatcgctggagcgcagtatggcgttcatttgcttcatcctccagctctcatcaaggtggtcgagatgtgtgcagtgtaagttgacctccccggctctcggaacctcaatggtggccctcagcacgttcctgcatgatttggaaaacaaaattaacgcttaataatcacgtggagggaccatggatgggaagcagaggcaagaggagttatgttcactgttcagatggccaggcacaatcagatatgttgctgtcatgaattcatggtgttttttttttttgctcccgttttataggctcatagctcgttgaaaggtgacggttttctgtttatgatagcaacatagagtgtaattgcagagcaaatttctctaag

SEQ ID NO: 9562 - DNA, 2523 bp, Oryza sativa
  unsure (1)..(2523): unsure at all n locations
ccatgcgtaaagacaggtttcctaaggtatatgccaacctgctcaagtgtttgtccttggctgttgttgatagtcattgcataacaaactcgaactgggaattgtctcctttgtaatgcaaaaggccatttcattttcgatgtgcttagtgtaattcttagtatataaactgtttcaccgatgtttgatccagttagtatagtacattgtaaaattgtttcgcctaaagcaataagtaatagtcttgttccattacaaaggcctattgattggttcaaatttcgtagaagcataacaacactaccttcctttaaaacaagtttgtgtgtaggaaagttagttgctacacctcctagagtctgtgtaggatcaaatgcacaagccacagtatgcatgcatgtttggctacttttgctataagacgtttagaaacactaaaaaccaaattttgggacgcagtaacctcttttcatcatattgcctcatgttaaaatactactgctattatcaaacagagaagaactgtaatatattagtagtttaactctcaaatatatttgtaaaaaaatattacattacacaatgcaaagcaaagtctttgaaaactaaggtcccaactcccaacaatttgctgggtcttcacttttgaggaagacctgtaacatacaaaatactctaagcagggacatacattaagcctaatgcatcagaaaatgttcctttacagtgcactgaacctccctttggtctgacgattaaatcattgtacaaccaatcgtactgtttatacactataagatgtaacaaagctgaacagaaccctatgtatatacaaagcatgagcatcatgaataaataggcatatatgatgaaattgtgggagcatgttctggaaaaacctcacatcatacagctagtataaataaaatatcagcagccaagctccaatattctagaatcattgaatactaatagcacaatacaaaaatcatatcatgcagtaggcatgtttaatgtgaagtaatcaatatcgcactaaagcaaaaaaaaaatgtagtcacagatacccctgaatatagatataagaggtggcttaaaataattgcgtgcaataataatcatggatttgacttaacatcttgcagaatatcataaaaaaagaactaaacttgcaaaaaaggcaaaaaaagacttaatagtttaaaggcacactacccaatttgcagaactatcaagccgcttcaacagtttaacaactgcagcactaatatatcacttacataacagcaaaactgccctgctgaaagctcagaatgagatatgtcactccgaagcaacaacagaaaaagaatgttaaaaggagtttatatataaaaacaaatgcctaattaaagtgcaaaattagtccatttggaagccttcacagcaaactgaatttctgtcaactcgctgaataaatatcttgcactatataaaatagatatattttgtttcaaaagggaaaatatgtcttgcaaggaaccctggcactctcccactctcctagccatcatataaactccatcatacatgagtatattttccatgttccaaatcactgggtgtttatttagatctcaatttaatttgtgaaaagcgagaacaggcaagaagcaaaacttttgctttgaggtcgcagtgcgcggattgattacttgtattttttttaccagagataaacaatatttaataatagaggttatatctttaaaacttcatatggcaagcttgtcttaaagataattactaacttttcccaaaaaaaaaatcagaggtaatgtgcaaaagttgtgcagccatgtaggattaaaacgccaaatgcatattttacaaactatcgaatgatagttttaattttactctagataaagggaggtagagttagaatctagaagcatgcagagctagaagcaggacaaaacgaggcatcaatagcaaacatatttagatggaaagaggaagttttacaataatagctccaaagcaagaaaagatgacatctggaagaacaaagcaaaaacctagctgactttgatagaaaacatgaggcagaggaaagcaacattcttatgggcagcaagggacaaaatattaggaaagagagtatgcaagaagtgtatgcactgtgcaacggctacaaaaggtactgcagtgaccattatgactgcaatggcttacgaaaccgagaacacgcatgtaccaagcgctaagtgtcacaggtaagctatcaatatagtaacaaacaaagcaccataaatgcacaatatcaaaaagaagcagaaaatagtgcaaaatagtaatcaataaaccgaaaaggaaatattgaaacatagtacaagacagatgggaatnnnnnntggtaggtacgagaggacacaatgtgggggggggttaaggttaacacaaagaggtgtaagataagagacccaattagcctttaaggcgctagtcacacaattcacatgaacaacagagacgcattga

SEQ ID NO: 9563 - DNA, 841 bp, Oryza sativa
aaaaacaccaaaaatttatggccatgcaatatcctattttattcccatatggtgaagaatgggtttccatgaatccatcatgtataaccaaacaacaagttcatctgccttgcggcatgacaaagcaacaatggttgaattctttgcttacataatgcatgatagagcgggccaattcaacactccattacgttgtgggaggttaacccaatcttatttggttgatggctattgttgtgttgaaggtgagcacatacaacactataggttgcctagttttcaacacaaatatagattggcaccattcaattctttagccagctctgtgtctagaggcattacagctggttcttcggctggccaacgggttatcttaccagcctctcatactggaagccctcggtatctatatcaaaactaccaagactgcattgctatttgtaggaagtatggttgcccagatctttttgtcacattcacatcaaatgcatcttggccagaaatcctacaagctctagcacctggacaacaacctttagatcgtccagatatcgttgaccgtgtgttcaaaatgaagctgaatatgttaatggatgacattaaaaaaaataatttttttggtcccatacatgcaggtaatttccaaaacaactttcaatcaaaattcttagatacatatattattcatcaaatccatataatagttaacccttttgtacagttgtctacacggtagaatttcaaaagcgtggactaccacatgtccatataatcatttggctttcaaaagaagaacctctagatgctgaaaaggttgacctacgtatttcagctcaattac

SEQ ID NO: 9564 - DNA, 1596 bp, Oryza sativa
tagcgacagaaaccatctttgcactcccgtcaacagcaataactctagaagcaccagccttagctgcaaaaagactatacagacagaaagcatacatcaacagctcattcaacattcattacttgttgtgttttgcatctcaacaatataatcattacacaagcaacttgtatcataaaatatactcatgaatcaacccaggattgcaacaacaatctacatggtaggaatcaaattcaccttctgaggcagaaggaagtcagaattcctcccagtaggctattacttgagtgcattagatctaaccaagcattctcaattttttattatgtactacaagtttatggctgttgctcattttcttacttgcggtacgtagcatatagacttttagtggattcaagattgagagcatcaagctcatgctaaaacaaagtaacccaaaagaattttacacatgcataccttagaattcccgtgccacaaccaacatcgagcacagttgcaccattcatgaggctaggattgcctaaaagggcatctctgtaagcttctgttcttacctgaaaaggtcagtcagaaatttattagccgttgggcattttggaaaacaaagagatagtatatgtttagaaaaacagtgtcagggtttaacctactttgtcaccaagcatctctctatggatgccaaatgaactatacgacccgaagtagctctcatccacacttttaattcccctagcagcagcactagcacgtgcaatttttaactgcttgtcacttggctcctgagcaagagacccactgcactccccatctgtactctcaatagtacatgttctctcaaatctatcaatgacatcagaaccatcattgataatagatttcagattgctctcacatgtttcagctaaactcccattgcctgctgaacaccctcccttttccattggcattccacagtcgtcctcgtcatcatcatcaaagacggacaaactgtgcaaaagagaatcatcctccaagaatggttttaagtatacatcatcaccccatggaacctttccctctagttggggaatctctaatgcatgcaaatggccgcatagttcgctgttgctagagaaaacttgcccacagctccaacatttattctccgccacctacaaatcaatcttaataagttcataaggttcataataatccatgaaatggagcaaaaaggcacagaaactaacgaaattgcaatcgaaatcaagtgaggtctagttcatgaccacgcaaacaattagcacaacaattaaattaactatatacggagtatacagctcgatttcaagctgctgaagctgaaaccctgacgcaccttggaccgaacgaagttgatgagcttgatgcacccgtagaaatccatccccgtctccttcacgaccctgtagaaatcaaaccggtgctcggaggcgcagtgcgagaagagcgagctctcggagtcgaaccgcgcgctgcagaacaggcagaggagcccgccgccgccgccgccgccgcccgcgtcgtcgccgtccgactcccagtcatcccacccctcctccccctcctcct

SEQ ID NO: 9565 - DNA, 6928 bp, Oryza sativa
cagatatgtattagagtatctacctacaccgacacagatgtacaatgattccaaacacagggtcttgagctcgtacaaaaggttagctggtacagttcgtcttcatcaatcaccagtgagttttatccccaggaccagcaagtatgatctgcattcggacaagcaaagttaattactccgtgatcattgcgcacaacacagtccaaaaaaaacgttggggaagaaacaaaattcctcgagctggagcaacagagtgcgacaacttcttgttgtttttttcttcctccaagacaggttgcttacattgcaatcgatggcaaatctgcgagcgagcatgattgcagagttgcgttctctggccgtctcgaagcccagcaccaggctcaggtctctcctcggttgccagtacatcgcttggggtgcagcatctccaccgcctctcataccacatagctgaaatgaacaacaatgcaacgcaaattttagactatatcatagtccaatgatgtggaatgaaagctatcatcagtgagatggaagcaagtttctacaccatcttatgagtgctaaaagtgttgcctagaatacctgcatcgttgaggagtagaattcttttgcaattactgtcttcccttttgcgagtctcatccgcagtttcccgatggaaagaacatgaattgaatcggtaggctgtttgattccattcacttgaagaacaacaacctgccataaggggcaaaaataggtgtccttaaagaatgactagtaacagtgggtaaagctgacttcatgagcagtaaatacacagttcttttattatttttagtgacactgaatatttgatacaagcatccaaatagaatgatttcttgacataaaagcagcagatggcatgccaactgggaaattatgaaaaccaaaatatctgacaagactcagtaaatagcaagatttataacaaattatgtaggtataatgcagaaacaaaaatggataaggaaggaaaaccattacattatattcagtttcaggattccttagaagagtctctacgtaatcgaccaatcctgcagctgctcgacaaaataacgttagccatgtcataataataaaagcgcattaatgttaccagtcaggaaaactaaccaggatccacagggccagcagtcttcacgacagagatttcaccgcaatggttgatctcagcttgcaaataccgcccaacatcatgtggttctggagcatatgcttgctttatggcacctatagaagatcggtagcaagtagcaacagtcatcagtgttacatcgtatgtagaaacaagatcgttttgcttgatggaaatagtttcacctgaaattatctctttcttgtttccttcaggctgcacacggaaccactgtattgtacttcttgataaatcaacatatccatcactctgggaaactatgcgcaacattgagcctaagctttcaaggccctccagctcatacgaggacacatcgttttcctcatagctttgatgcaggtgtaactgataaaaaggacagccaatcatgcatggaaataaataccagatcttgatctctacataccgaaattattcatgttgggaacttcacagatttgagaagcaacatagaataaaagaaacgattcgatctaaagacactattatttgtcttttacggctgatcatccaagtagcaagataactcctatagaaaaacaatgacagtaaaagtaggcatgaagcagcaataacaaaccactacacgctctttggcatcgttctgcttatttgcacaagtttaaaagaaagaaagcaagctacagagttgatatatgattctatcttcgcaaactttgacatagaattggtgagctcttgcggtgttttgttttcaacatgctccacagtgcacggtgtgattcaccgcaaattcatattgcaatagctggtttcaatctggcctactgtagaaatgacaactgaaattgccaaaatcagcatgtgttaaccatacctctttcaaaagatgaacacaatttgaggacttctcagctaattgttcacgtaggacttcaatctcattttcaatgtccattgcctaaaagataattaaaaacttgaaattggtcatttagaaaccataataccatacgatcaagtatgcaacataggcttgcaatttcacatgtagagtgacataataagtgcattctaccttgctgggacaatgcagcattttcactctccgtgcttcttgagccttttccttaagttcatcctcatcctaacaaggtttcaaaaagaaatggtaaacagatatgtacaattcagcttgaaactagaggaactctaaatatggaatctctcttagcataaatgaatcacaagacacaggcagctggaaattaggggtttagggttgaaagtgcctaagacatgtaggaaatgacaacaaatgtaacaagaagaagatatctaccaacaaaaatgatttattatgacttcatacatcaatgtttaatgttgcatatatctcatagttatttcaataaaataaaagaacatagtgttcctaccacctacctgtttcccatttatttgaggatcaatttcttgctctttaactaattgttcaactttttgtacagcagctctagcattatctatctctatgcgagcgttagatctttcttcttcaacaattctcctggcatcttcagaagcctgtatgaaaatacagaaaaacaagcaatgattgaaaagggatgaacacatgaaggtataccaatggatagatctacccaaggcgatattaaacacgattctacaagaagccggtaaaaaaacagtaattattgtcagcatgcttatatctgaaccatattgaggaaatcaggtggaagtcctaaaacgtgttattcaataagctgtgattacatgtgactgaaatttcactctgtattttggaagggaaaccactagtacttcaatagttcagttccatagtataatacagtcccaacataagaagcattctattgttcattagtactgcatattgttcataggaagaactcaactttccttactagcaatttagcgaaacagagaacacttaaaaacaatggaacctgacattttgctataacaataaaaaaccaaaagtgaatgtcacaagatgctaaaagtatgttgaccgatgttcatagcatgcatacactactgaactacaagaaattttggacgcaccagtttcaatgaggttgcaattttggcaacctctgccttttgctgcagcaactcgtcttctcttttagacagctgaactgttaaaacatccacctatagaaagtaccaaactattaaaacagcccacagaaaaggcaccatttttgcatatggagcttggagggaaaaaaaaggacagaatagtagcctcttttgaaaacacatgcaacacaattaaagataaatagcaacaccattagaaaagttacaaattgagtagcaacaatccttggtgaaaaatcaaaatatggttcataacaagaaacaaaccatagaaagggactcctcaatttcatccttatgtttccctgcaactcgacttctcagcgattctaatacactctttagatttttcagaaggatgtctcgctccaataaagcagcttgtctccatttaacctgagagttcaagatttcaaggtgaggccagatagacaactttgatttatataactccattcattcaagtattgggccaatcgtcaaagagcattcaggaggacagggcctaaaacaggtaaaagttccatacctcattagacaacaatgtggcagtgttaagacccttctcaaatttcatagcaagctcacggactgaaaggcgctgactccgatgaagtaggtctgctgtttccttggcaacagcctctttcagagatggcatttcttgatcatctgtcaatttgataactatcccattcaaactcttcttgtatgtagggaatttatttctgatgaagtttgcaggacgcaatggccctgaccagaggacatcattatgtgtcttccgcccgaaatcaattgtggacgcccgcgtcatttatacagcaccctcaaccttgactaaatagcaggctttacccctcaatagtttacagctggccacagtaaattatcattagttgaaatgctcgataattatagtttgtttaaaatgtgcatccataatcattaggggaagtcaacaccatcaaaaaaataaaaaggaaagagtacaaataaaatgcagtgtccatagataataaaaatataagacaaaagcaagtgctggtcggtttcaaacaaaataagtgctggatatcatagtatcatctagctgcacacaagtgctaccaccaaaccaattaaccaaacctcatgcgtcgcaagtattgaagtataaacaatactggtcactaaactcaaagttacaaatctgtattggaggctacagaccaagtaattgttacacttaaattccactatgaaggacagttagtagtaccagatggtaaagctataaactactagtgcaaatttgtcagtggaatagggaaaaaggacgttcatgtatgattaaagtgatcggtggggaacaaaaggttaaccaatcaccaggtagcatcaagtacagttggaaattttcaaacattgtagctggcatcagccaaaaaatagtagttactctaatcttgcgaacaacaaaaataatttggagctgaaagacctttgcaattttattacaaatgaaactaaacaacacagttcagaattcatgggtaaacttaagcttagacatagcagagctattcaattcatgcacagttcttctgggcttctggctacacggcactcgtacgaaaattaaaactgaagtaaaggcgcatgaattcaattcactatcgggacatgttttctagtaggttcgttggcaaatcattgctagtatatactcctgcgctaaccacctcgccactccacgcaaatgcgagtgcaattccgtactaatttccttatacaattcttgtttcaaaaatatatataatttgcttaaattttcatcaaataatgcactatagcagactcatactagcaaaataaacagagagagagaaaaaaaatataaccttctgccaatctgcctcccaatcgtccagccattcaaaagcagtaagtagaaagatgaacaaacaaaaaacacacacaaaagaaaaagagagagagaaactaaaaaagaaaaaacgcacagagaaaacaggagagggagctagaggtcttaccaaggagcttccagaacgcaaacccgccggcagccggctcaaatggcgctcgctcgccgggatcccgcggcagctgcacccacggcggcgaggctgattcggcgaggaaaatgtggcgcaaatctgggggagagagagagattttggtgcgggtttgcctctctctctcctctcttttctctcttcttctctcgcgagcgggtgcgagctttgaatggcagtggcgactggcgacgcgggggtgggccctaccaaggaaaaagtggggcccacatgtcagtgggcccaccggaggatcgcgggtcaggtgagagtcatcacaggggcaagtgcgatccggggacacgacacgactcgactccgctccccccgagattccctccgggcggcgctgcgggccgtaggatctcgatcggacggcggaggatagtgggaaggggtttcgcgaccgttccgttgatggcgcggggcgcgtcgtggaccccacaccttccaccggtagtactccgtagtagtaggaagttgggataattcttgtctgtttctgtctgcacttcgaatttttcttcttcgtattttttttcattttgattgaattttcaggggagctgaacttcatctgcaaattggaatattcaatttgatttcagggcgtttgggacgcatgatttttcacagggttctcatgtagtgctaacttgctagtaggaagttgtttgttcagttgtgttgtcagtcttcacaagccacatgtgtggttatttataaagctgaagagttcaccaaaaataaaaaggacattgcgtcgcctctgagcatcgtcaagttagaagttaataagagcatcgtcaatcacatggttttaatttttttctcctctttttttttcaaacaagagtaatagatgtggttagcagctgcatctcgttggtgctacgcatgtgctcggctttgacttcgcaggattgattgaatcgatcccgggaacagcgggctatacatgtagctagcgcggttggtatctgcaaatctgctaacataagtaagagcaagtttaatagtatagtcaactactgactttaaattatctatatctaatttaatagtttgtttatattatctataaaccattaatatatggtcacgcctcgaaccttttagctctgctcatttctagtaacggaataggggcgcagcccttgatcaaaaaaaaatatggtcacgtctctcatacacacaacgtattggagtttgttgtgcagttggctataaatctgtagatcgctttccttctttcttctcttctctactccacatgtgcttacaactgactttactccctccgtttcaaaatgtttgacaccgttgactttttagcacatgtttgaccgttcgtcttattaaaaaaattatgaaatatataaaactatatgtgtacatgaaagcatatttaacaatgaatcaaatgatatgaaaaaaataaataattacttaaattttttgaataagacgaatggtcaaacacgtactaaaaagtcaatggtgtcaaactttttgggtggcgagccgatgtcaatcaaggccagcg

SEQ ID NO: 9566 - DNA, 6579 bp, Oryza sativa
ctgcttctcccactcttgcacgggtgcggcgttttcgtgggctgcgcgaaacgtggcgacggcgaggatgcgaagggcgggtgaaggcggtggatcgtgcggcgggaattgaatcacgggcgcgggagcatcggcgtggcgcggtcaaggtgggggcacaggcgcggcaggacgttgtcggcgtcctctgcctccgcgcgcaagaagacaagggcgagaggagagaggccgggtttagaagggaaaaagtgagggaggacggtggaaagggaagcctctcccttccgttttgggcggcgggcaggcgaggcgcgtgggagcggcgtccttgccggtcggccatgcgcgcgagaaacggcagcgtggctgggattttgggcggcgtcggcgggagtcaatgagagagagagagagaaagggtgagagagagcgaggaagaaggagagagcgagcgcacacgcgcaacgcacgtgcgagggggaggaggaggaggaggaggaggaggagcggctgagaggagatgggccgaggagaaaatggcccacaaaaatccgagggaggcataatagactttttcggaggagattgattcgaagagaatttgaacttggaatttgacttagattttggaattgggatctggatgagaggaaggagtagacggaggattcaagatggggttttggatattttggatctggggaagtatttggcgatgattcaaagagagggatagaatttcagagtttgatttggagacttgagttggaagaggaatttcgaggaggcaatttttgatggtgacgagagggatcaaggacggatttgaattgagatcttggcacaacttagactcgcccacaaagaacggaaattttcgcatataagattttgccaaattagtttttaacgtctcacgaaaagcggagcgttacaactgtcctctcaagcctacaacatgcaaccttcataagctaaaaaaaaactatccagagtttgacacgtagaggctgttcagattatagccaatataaatcttaccaaataccaaaattttagtaagttgataatatcatcaaaattttagcatgatttcttatgtatttgccaaagtttggcaaaaaaaaaacctaaatatataggcatatctttaacaactttgccaaaaaaaattgtatggtttaaaatggcatcaatttgaacagccttgtacacatatccggattctggagttaaataagcaatacttccttttaaaatataaatagtttcattttagaacggggaagtagtaaagtagtgtcctatagaaaataaatctaggactggatatgatatattctagtgttacgaatctggacatatgtatgtctataagtattaggatgtgtcacatatgatattatgttggttttttacgggacggagggagtatatctcaatataatcagtttacttattgcatattgattgattgcctcgtcatgtcgatcatgttcaagtgattcgatccccaaaccgtgatctatagaacgttgcttgtgatctgactagcagcagcgtgcaaaggataactatatgaggacgacgtagtagcagcagcaacagcactgacgcgtgatccgtcaaattgcgtgggaaatcgatgtgaaccacaaggaatgcgagagatcttttttcagccaaagctgtccacttgcacggcgaaagccgtaaaccaaggcgctgccacgccaggtcggcgcactaagttcactgctgtagcctcgcgcgagatcccatttaggtctaccaaaccgtttggcgtaaagttatcatcaccctacactacagtttaacggttaaggtatataccgtgattttgaaaactgaaaaggttacagcgcatgataatcgcgtggtaaccgtacggtgttttatcaaccttggatctcatccatctcatgatcacctacgcctcagcctcgcccaactccgctttgtggctacctggaactaaagctgattgttcaaggagacggatttggtggcgacgatgcgagcgagacccgcgtacgggcggcggcccagcaaatcgcgtggatgtggcgtgtgattcgcggtcatgttggcccattggcaaattgtgcggtggtagaaaggccgcggtctttcgtgcccaaagcccactggtggtggtggtagggagggcagagaaagcagcccacaacgccaaacgcgtgtaatattatgatatgtccctgcactatacctcaatcttaaacgcatcactaaacaattaaatcacaaattagatgtgaaggcttcttaaactatcaaatattgcttttttttccttctatcatttcttagaacagaaccaccattgaaatctctagagacaacaaatcgagggagcgcccatacttacttcataggctaaagattttatttcctaccctctccgtttcacaatgtaagtcgttctaacatttctcatattcatattaatgtgaatgaatctagacatatgaatgtgagaaatgctataataacttacattgtgaaacggaggaagtatttatctaacaaagtatgtatactcacatagccacacgcccacaccactctatattttaaacattttaaaatgtgaaaaattgtagatgggtggtcgaccattttgcatccatcccttcacaaggggcatgcagcactatgccttggatgttcatgctcccaagtcccaaatcgcaaaccttttcaccctagctccattcacatacttctcaacattgcatcggaattcggaggaatacacatatacatacataaactttcttttagttttagcccgctaatatggtatacaaaaataagcaaaaggaaaaggacaggatgccggatgcaatgcaccactgtacatacatgccgtgcatgttaaccacagttaaccacaaaaatacatgcacgcatgaatgtctcctactgcctcctgaagccagcactttgtttactgacactgaggcactattacgaaatgataaacgctactactacctattgtcagcaagaggcacctattgcatttcatttcattcccatcatcatctggagctcttcaacacggatctccttgtgctccttgcctcctttcttcctaccaaatgcgccgctaatcagcttcttcttcctctcctgcagctccagcatcctctcctcgatgctatccttcacgatcagcctcaccactttcacctccttggtctgcccgatccggtgcaccctgtccatggcctgctcctccaccccagggttccaccaagggtcgaagaggtacaccgttgatgccgcggtcaggttcacgccggctcccgcagccttcaggctggccagcagcacggtcggagaatcagggccaacgcatccgaattggcggataacctctgacctcttcttcgccgtcatagagccgtcgagtcgtagtatgttaaagcctgctgctttaagtggcccttcaagcaagatcagcatcttcctgaactgagagaaaataacagactttgacaaagggtcttcgctctgtgaacgcctcagtagtttcagcaaggcttgcaccttggaagaaagaggtctatcaagattgactgaggaatcctcatcgggatgtttaatctctggcgcaataaagaggtcttctttgcatagcgagcgccggcatattggacagcgggaactagagctcttgaggattttcatgatgcaagtctggcagtatatgtgcgtgcagctcgttatgacggttttggctggtggagcgagacaaatcggacattcgaagtcatctccatcgtcaaccaatgaggccagcttcttcaacagctctgggtttttagacacatctacagcaagcaacatgtttactataagtaacagttactctgtaaatgatattttcaacatgcaagctgttatagcgcgtggttgataaatgtaagcaatgcaaccctataagaattgaaagaggatagaaaacaaacgatctcatcaatacttgtttttaggagtccaataccctaacaaaacaaagtctgaaaatggaaaaaatttacgcgtgcttgtcttcacttaaaaaacaaatccagaaaagtgataaatcatatcatacaaatggtgattattaattcaagcgactcaccaaataacctggacttccaataaatcctaatatatcaatcaaaacagtataaaagaaaaggttaaaaaaacagaatttactattttctggatataagataaagtaatccctgaaaataccaaaaaaaaatgtaaggagtgaggaccttactgctaatattgttatataaacaaggaaaacatttcagaaagcggaacttttatctgtagaagtataaacagaaatggactagagaaaataattcaaaggaatatgggaatatgatttcactggctatgcagcgatttctgcggtttactaagttatattgatataatcaacagagcagttgacccattggagaaaatgacggataggtagcaagtttgtaaagttaagctggcaagcagcaatgtactgatgcaatttgtcgattcaaatagataaaccaattacactcaacttgctagtttgacactctacagtaagatggaacagttctaagaaaaatcaaaagaaatactactatcatacaatgcttagtgtgcgaaatctctttggcaacaagatggttcaatctaaacagcacagtttaattttgatgagtgtattatggccatattatatcatcacaaaataaatccagaattacaaacaggaaaaaatgccataccttcaagggagctgccactgccaggaagccatgatttcaggtctaatgggcatagtgctatgtcattgcagagctggcggagcctcagaatgaaataaagcacagttgagtaattacgcaaaatcgaatccctgtcaccaaactcccgcagtttgtttttcccttccaattccatctggtcatagtactcacgttcctctgcagaaagctcaatataacaagctaaaacagttttgggcggaatgctgaccaagcttttgctaccactctctgtctctttggttctgcgcagggaaatagcacctaggaggctctgtaataagcagataagaagaatttaattatcagaaattgcaggtatgcacgtgactctttcagatcctttccaacaccattattaaagtactacctaagtatagttactagttcatgtgaattgtgaattacaaaaaaatgacatgtaatgacaaggcaaacaattttccaaacttacctgcaatcgtgccaacccaattccgttattctttctctctaaggggagctggatcaagctctgccagtagctcttgattgagaatggttggaatctcaaaaatgccatgagcgggtaaagatcaaatgagctgttctgaatgggcgtccctgtgaccacccaccgcctctccgcgttcaaagcaatcaccgccttggtttggcgtgctgcagagttcttgatcacatgggcctcatccagaatcacacggaaccattcaatttcctttaccggtgagccctcctgctcaagttcttgccccaaggtgctataagtggtaatcacaatgtcatatttcaacagctctttcttctcttttgtccgctctccatggtacaaatacaccttcaagctaccggttttcgtgtgctcctccagttgtgtcacccaagatgagaacaccgatggcgggcacaccacaagcgttgttcttgactcctcctccaccgcctcctcaaccttcctccttttcgcccctctagccttcttcccacctacattgcgagctttactccttccgatcagcgacaacagcgtgagagtcttccctagccccatatcatcagcgaaaatcccacccttcaacggcggcggtctctcattcgtcttctgatttgtaagaacattcttaaatcccccatcattatcttcctcccagaatggtggaaggtcgcatgactcctcacggtgcaccagccaccccagcgccgccttctggtgctcgaacagttcggacaccaccacatcccgcggcgcctccatgggcgcaatccgagctctccctcccttccccacatgagagaacagcctatcgacatccccgcgagacctcttggtctgctgctcctgcacgatggcggactcggagagggcgaactcggggtggtcgacgtggatgaggtcgatcccggaggcggcgagggcggcggcgacgagggcggcgtggggcgggcgggcgaagaggtggacctggcaggggaggctgtagagcctcttggaggcgggcttggggacgatgccgtgggcggcggcgacgtggccggcgtcgaggagcggggcgagggcggcggcggcgcggcggccgatgtggccgatcttctcgccccgggcgttgtcgacgcggatggcgttggcgtcgtgggggttgtggggctcccggacgaggccgacgctctcgcggcgggtgatggctcggccgcccttgtagtactggaggcc

SEQ ID NO: 9567 - DNA, 6056 bp, Oryza sativa
ggcggcgccgccgccgccgacgcgccgacggcccagctcctcctccaccccgagggcgccgccagcgtccctagcctctgtagctccgaccgcgccgaggtcatcaccgacgacggcgccgtccctcgccgcgacgacgaccccgtcgccgccgagaccgagcgcatcaaggccatcctcctcaacgaccaagaaaaggtcctcctcctcctcctctctctctcaccatcctccacttctcgtactgaatctgttctgccatgttgatgcagtcggaggcgacgttgctcgagctgctccggcgactgcagcagctggagctcacggtggacaccttgacggtgagaccgccgccgccgccgccgcagccatgccaaaccaagctcatgtgttgactagtgtgttcatgcggattcgtctttgcaggttaccgagattgggaaggcggtgagcagctaccggaagcacaactccaagcagattcgtcaccttgttcgattgctcatcgagtatggccatgtgttcccatctcgtcttggattgttcatattcaaatcgaatttgtttttcttagccagttgcattcgttgacatgtttgtttgcgaatcgaatgcagaggttggaagcgcatagtcgatgagtggatgagcagccgcgacgccattgtaggtaggaagcaagcaagaacagttcatcgtttctaagtttcaacctctgtatcatgatttagtagagaattaagcattctgcaatgatatgatacacagatcatactcctcaatccatgcatccctctggcttggagcaggatgaacgggggctctcttctccttccatggatgagggcgctctcttcgctacgccgagcacttccatccgcctatctgaggtaattggaattgtcggcacatccatccgaaatcatatctggttggtatgatctgacacagctccctctgagttttcctcaggaaaaccaaggttccaagttcttcgatggtatggatgatgatggaagtgagtgatcagacccttgttcaatatttttttgtgatggttgttggcttcttagctggtgtttgacatcttgattgttttgtggattatctgtagacacgaggagcaatggcggcagggataatggccggctgtatacaaggaatcaagaaccagctagaaggccgctgccgccaatggcccagcaatatgatccagaccagagctggaagcaagaacaatctgcgatgaggcagtcgagaccacaggaactgagcaatgggcagacgagagagcaattcatcgcggcgatgcttgcaaggccctcaaacccagagtccggtcctgggcgacctcaaccgaggactaagcagcatcaagatgcctcgccagctcaaggcagatcgcaacctatgccatctgatgtgagcatattgctttatcgacaaaatatacatgcttatttgattgatgcaaatgcttgtttgaggtcttaattctttgccatggctgtagaaatcggcgagccatcacgatgaaaattcagttcgggcaaagctagaactcgcgaagaatgcaaagcttgaactcacgaatagtgcaaagctagaggtgacaaagagaaaacttcaggaaggctaccaagaatttgataacggtatgtgttccgccatgaaattgggtctattatcacttgttgcaacatcaactggatcatggaatttgtttacttgaaccacaatatcttgtcctctgtttggaatattatagtactactactattttttgctgatcagtaaatttcattgatttgagtttctatatgcgacgagtcatggttatatttttgtgtaaatgcagcaaagaagcagagaactatacaaatggtggatccacaaaatttgccgaaacaagcgaaccggaattggcagcctaatggcaggccgaggaataacagcaacttcaacaacaaccggaattggtcaagatgaggcaccaattccatcatccagcaccaagggatcatagactcccatctcccaattccatccaaatttttcttcttttttcggctaaagttagtccagccaagtacataaacagcaataaggctttccttcaaaacttgcttccagtgccacacacacacaccacaaacacttcttgagagctgtgttgctggtttgcactctcttttaaccttttgatcacgatggctggtttttttttcctagtggtttgtcaaaaaaacttgtaaagatagtgctactgccaatccgagatgagtttctgcaataccgatcctgatcttgagcccctaaatttgctgtttgtgttggtgtttcctcggttgaaatgcaaattgctttctaccctgccatcggaatgaggatgtttgctgcctactttgggtctctgcgccctgcttttcaggctcaaagaccttttggggtctgtcttttcgctgaattcagcgtagcttgtcccccctgcgaagacttggactggaacgccaacgtatcagactgtacatagcctcaagtgaaagtttcttggtaaattcaaaattctagttgatgccaggaaaaattaactatgaagttacctatggtcaagatcacactgtcaaaaatagtaggaccatactctccgtaagtctttttgtcttgttaaaaataaaaaataatttattgatttttttaatacatttgttcatagcgatttaaaagtcaatactgaaaacaaattacgttgaaaatatcttaaaattaacttcgaaaattcaaattttagcttttgctttgtcttattaggccaattgatgcggccctaaaatggttgaatatccaaaagattttgtaatgaccattcgagggcacttccttcgtactcgtaaaggaagtcgtctagaacaatatttaagctaaactttgggaatataaatcatgaataactattaggttgtcgagtttgaaaatataaaatttatataaatagatttgtcttgaaaaatactttcataaaaatatacatatataactttttaataaatatttttatagaaacaataagtcaaaattctgttgtgtccataacgactttctttacgagtacgaagggagtacaaataaatgaatcaataattataaagttgatataaaaaaattgacaagaaatttatacatggaaagttttttaaaaaatcacaccgtttattagcgcgggagtacctttgtgctgcttcttggaacttggaaggaaacttgagttccaccctttgggagttggggtccaaatgaatgaccttggacggctgaatttcggtggatagaagtcaatccggtccattcttgtggatggattccaaattcaagttcagagtaagaatgagcaggctttgtgtgaacactataaactatttttgcggctgttttgaccccccaaaaaataaatccaaacagatcatattcattcatttcattcatcggccatgattcactcatgcagcagttgtgctgttgcttcgaggagcttgctctacttgcgttagcactgtacgggtgactgccgggtgggccccagttctgcggcggttaggtatgggcccaccgtcagtgtcatgtgtgtaccacgtcggggggtgcgtttaaatatggagggaatggacagcattgggggggctctcttggctgcttcaaagttcgaagcactgcacttgtggcgttgaaagttcccagctatgatcatctgtgttcactatctctgtgtcccatgtgtggccatggaaaaaaatgcatcatcttatacttatcagctaaaatttaaattttcaactttaaatttgaaactgattttggggtttctttcatcgaagtttatttttcagcttttgcttttaaaatgttaaagaacacgtatataaaaattctattcataaattactttttgttcgcaaatataccgtttggcttattcaacgtataaacgaaatgatggtgccgaaagtgtatacacttgagcatatttgcatttatggagtacttgaaatctttcttaaaagttttttaaaaaagggagagtagtactggtacatttccattgcaattaatgaaagatctgatatattctctcccttcaggttcagcatatgcggcattttattgttcttttttcttccgaagcatttttgttgacgttgctcgatttaaatgccgaacgatttcttgaatatttcaactatagtagcatattgttgcggctgcaacttctctgcagccgctagaagatggttgtcgcaaaatagctgaagcaaacaacaaacccactatagtattagtacttgctccgtttaaaaatataataatttttatacgattacacgagtattaaaaagagtaaaaatacttatttgctttcttgaaacggcgaggtgtatgaccggactataataaagtcaaagaatagtacgtgtagtatgggtaatttagtggcaaaaataacatttacatcttgttatatttagaataaaatctgttttttttaaaagaaaagtttattatattttgaaaccgaggaaggaatatactgtactaatagtatgcataaattgatcatcatatatatttatgcaccaagactaaggataattaaatcatatcaattaaaacatcatgcacatattcttccacaatacatgcatcgattaaaacactatgctaattgtatcttagcatgcacatattctcccatcatgtattaattgtattttgataaaatctttgtccattcagttatatgacgatcaattggagaaattttaaattttattatgtaatgattaatttgggaagaacggagtattatgcttgccagaaagtaaacttttcgcagccagccgggcaccgaagagattgagatcctgcaggtcaggtcaatatcttcagctcgtgacggcggagcagaacgcactagttttgataatgatatcgtgttggaaacaccacacggctacgccaaacacaaacaaaaacaaaaaacaaaaatcaaatgacgctcgtttttcgccgcctaatgacgggatttgattttcttctcactttaattaacatagacgatacgcaatcgcatctagttaagaaaatgcatcggatgctgattgctgtcgctttcctttcggttttctgtttcgtgttttttcttggacgaaaaaagaaaattgcccttgttttttagtaacgggtgttctgctctaacaatccagctgatttttatatcacgacagctcgagtgagaactaaagctggacacggattggagaagaagcaaccgattataatcatatagaccaaaataatcgttagtttcatgtcgaaatcacacccaagtaataatatgttgggtcttcaattaaaaaaaagtttcaaaatgatacatgtcgctttgttggactgaagtgtactgtaaactagtgctactagtatttgatcctaattaaactggagaggcgaattctagtggcattttgggtctgattagttgccggtaacaacttgctacaatctgtcatgtcctatgttaatcaagtttaacgcatagaagcccttaattagtttgaaaaatataaaaaaaattggggatttcaatcctataaaaaaatctatgaaattctatgtgtcttttaaaattatatgaaataatttgatagagattttggaggaaaatttacatgaggtcaaacctcatgggaaatttttcttgagtctctcatctgattcatgcgtttatttgtcttcaatgaaacaatcttccttgtgtttttaatcatatcttttacacttgtatttctatcaaaattctatgtttttttatctattcctcagttttttatttttgcgattcaaaggacccttagagaaatatacctggttacaacatacaccattcatccaaaaagaataatgccaactatatacggagtacaaagacatgcctaacagtacaaagacaaatacatgcctaacttcatagctagaagcacttagactgtgttcgggaggag

SEQ ID NO: 9568 - DNA, 62441 bp, Oryza sativa
gtgtccaggactgtcacacctggagttttcccttcccttaggttccaaatcactaataaatggcttcaagaatttgctttggttaaccaagagaaaaccccagttaacaatacattaaataatcggaattgtcctggagaattttttttaattctctttgctatgaaaatcactaacatgacttaaagagtcaagctaataatttcttcctttgcctttggtcatgaattgttcccaattcactcccctctcagtccgcggtttcgttttgcatgacgaaccgtatccgtttcagttcacggaaccgtttccgttcttttcctaaaacggcaccgcattgtttttcctttttgggaaagtcctagtctcccccttgtttcctttttccctccccctccccagccggccgtgcgcccctcctccccctctctcgtgcgcgccccctctccccctcttgttcgactccctcccctcctcccaatcctactccctctaggactccacctttccaagtctagtcctctcctatataagtgatccctcccctgtttcttttccttttcctcctcaatagcgccaccaccgccctagctgctgccgccgccatcgtcgccctcacgtcgcctcgccggtaatccgttttccctcttaattgaattggttgaacccaatgtcaattatctccccatctaacctagcccgctgtgtcctctctagcgtcgcggtcgtcgatgatctcgtgcttgccgccggaccgccgctgccatcgtcgtgttccctcgccagttttgctctccggtgagaacctccctcttgttttagggttagttttctcctcgttttagttggtttgagtcgtgctgctaaaccctagtcgttgcaccgcgcagccccgcctagccgccgctgtgccgcaccgtttagccgagccaccgccgtgccgcgccgtctagccgagccgccaccgtgccgagccgccgcagcgctgctgtgccgagccgagccgccgcctagcagagccgcgccgctgccatgccaagccgccgcctagccgagctgcttgccgccgttgtgccacgatcgcgctttgctagaacctagccgccgtttgtcccgttgcatggtagttgagttgtttagccgcaggtgcaaccctaggttcataccgacctatcgtttgccgtaccggggctttaccgtgaattgtgtctagcccgctggtttagccgcagtcattgttgagtcgttccctcgttcgttcgaacgaggtgtcctccgtggatcgttcgttcgtccgtgttgagtcgttctttagtttagagccgttcagagccgccggttccgttcaccggtttcggttgatcatttgggtgatctcgtgtcatgtgaaattgactcgttgagtcggtatctcgtgagtctcgcttgctagtcaatctatcatttgttcttattttcctttcgggcattaatctcagtcaattgattaaggtttttatgttattagtaataacgcagagcatcttgtaaaattcataactaaataatctgagctctgttttaacccattcaaattgcagtaaattcgttaaaatgtcaagaatccatgaaaattggtttcttttgctgttttagtagctttttagcttgtattcattgtgtgccttgtttgtcgtttagactccggcagtttcgacgctccagtttattttgacgtggtcgctgaggttccgtcagctcaagagcaaggcaagtcatacagatatcatttatcatattgagcctatttgcaaaacccctgcttttctcttaaaattgcattatttttataatgtcatgcgggatggaatttaccgtactcagtctttatttaccctgattcattgatagcctgggataataatttgactagatgattggtttaggaatgcttagacatgcttagatcaactagctcacaatgggatttactataatatagtccttaattttatgatgatgttatgccatcttggcatatggttaattaattaaatatgctttattggtgggtcgtgggtacatgcatgatttatttggtggtcgtgcccataacaattaaggaccggttctcgggaatccctggaagatatactcgtactaaccacaagtcagatgggctccaggctgaatcttaagtataatcttttttagctagcacaccaatggcaagggtaggcatgatggagtatggatggaccgggaggtgatctatgctgcttccggatttacctaggcacaagtagggactgcccatcgccttatagggatggggtgaaaccggaggtgggtgtgctggttaggtgtggttatatggagggttttgtcacgatttctgcatgatttatttggtggtcgtgcccatgacaattaaggatcggttctcgggaatccctggaagatatacttgtactaactacaagtcagatgggctccaggctgaatcttaagtacaatcttttctagctagcacaccaatggcaagggtaggcatgatggagtatggatggaccgggaggcgatctatgatgctttcggatttacctaggcacgagcggggactgcccatcgccttatagggatggggtgaaaacggaggtgggtgtgctggttaggtgtggttatatggagggttttgtcacgatttctccctttggggcatggttttatgtgtggaatcgtgtcttgtgggtaaagttgtacacctctgatcagagtaaaactattcaaatagttgtgcccgcggttattgggtggtcaaccagctcaccgtgattagtctcaccttaataatttgacttaatgaactggtgtagttcaagtggtttggtttggcttgtcgtaacgtggtttagcgttggacagtgatgatattaatactgcttaattatctactgttttactgatttcaacatatgatttataaatgctgcttttactgtaaaatatcttatgagccaatcctttgattacccttgcatcataccttccacttggtatgacttgttgtacggtggttgtactcagtcttgctttatttttcccaatcccccagaagctaagaaaattttccaatccccagaagctgagaatctgtcagattgtgagttagaagctgagaatctgtcagattgtgagttctatgaagattaggcttgtgccagacgtcaagattttgcctatggagtatggaggaagtttcgctttgctgagaagattaagtttagttggtctttagttttttcgctgcttttctgagtttattttatatttttgtaagacgtggaactgtatcaaattgtcgatttaagggttgaggcagcatttattatgacttttgcagccttggagtatctagtgaaaatgttcaattcaatattttacatgacatggacatgttagctatacttggcaaccaatctcatgtcgctcataaccagttactgaacaaggcccttgtgtcacttatcattgctatgacattgtttgatcttgtaactaggaggttaaggctgatgttgtaccgctcaatttaactaggaggctaagtcaccctatcctgctaggtgtaaaattgacggggaccaaggccccctagtcccacccgttgtaaaattgatgtttagtgactcatactagaagaacatcttggatttaatctaaaagattataatgatcttcatagagagagaaaagatattgcaagatgctaaaaaaatattaacagtgtttcaagaaacaagtcatattagggttgagataatttttctacataaacatggccagctgtaatcctttactattagcattctatgaaacaacaaatgaatacattatttcccttactccactacttgttgaaaactatttcatttatgacgaagaagtatttgtgtattgttattgtttctagccatctgagaaaacaaatcttatattgtatttgtatactaatttttttatgactttggcaatgcacccgaaccactacaaacaagtatggaataaacatgtcatttttgtgcccctacttagttataagcatcatttttacattctctaacaatccttaactgtaaaatttagaaataagatggaaaaatttcatgataagacaaataagcatcattttttacatttataacaatcctcaactataaaatttagaaatgagatggaaatatttcatgataagacaaaatagtgaatttattctcacaaaaacttagaaagagtttatcacatttttaagtgtttttaaatgattttaatcctcttaatgccatctatagatttcatggttttaattataagtaacactatccaaattcttattccaaattcatataacaaccactgatagtaatgacaactgcaatctaaatttttaggtttctgttgttagtcggatttgccacatgattatatagatttgtggggtttgactagtgtaggcaaaaactacgtatcaaacaacatgtacagagaaaacatggacttcttattgaggacatcaccactgaaagtctcatctagtgacactttgtttattggatcagctagtgacactttgtttgccaaggtcatgactaactcaaccaaagagcagatgtatgcagttgagtagtgttttggtaggtgtatgcagttgggcagtgttttggtgttacttatattagtaattgtaagaggtgtgtcaccaaggcattacaggacatgcaacaagtaagtgtttcaaagatggatgctatgacattttatagcttatgtaacctcagaatttctggtaaagatcttaagtgcaatattagacatgacaatgcttatttagtaagatggttatgttatttgttgttgctctggcaagatatgcaacatacttatcatgctacaggacgagaacaggtaatacgaaatggatatataatatcatatatggactcacaaaattcttaattgagttaaaccgtttaggatgccagatttttgtggggatctagtctctactccacattttcaaatttgtttggtgatctagtctctactacacattttcacatgtcaacatcagtagcgacttgaatattctttgatcttgtactcgctctcgatgtaattaggagtctaaggccgatcttctacccgctaaatgtaactaggaggctaaggcccctatcccgataggtgtaaattgacggggggccaaggccccctagtcccaatcaaaattaatgttcagtgactcacggtaattgtatttaaattgattatacactgtagcataaatattaagtctattcagaattactggtgagttgtatcttgttacatatataaaagggaaaattgtaaaaaccaccctaaatgtcactatgagtttgagatgcctccccaaaagaagatttgttgcaaatccccacctcctaattcatcttgttggtttgatttaggcaccttctctccacacgtgtgtgattcctgaagaatctcatggcgaaatcaatcaagccccactcgacgggagcaagagattgtgttgtttgttctgtataagacgatcatttcgttgggttctcatggccatttcatagtgtttttcatggtatactagctatatatttcaaactgattcatgtgtactgaacaatatattcgttttttttttcagggacgtaatgagtatatagaaacatttgaacatgaagcagtaatcatatagccagattataactgtataacttcatctgttgcaattggtcagatggcccaaaatagcagatttcagtacagtttaatcaaaaattaaggccacacaatctaatgcaaaaggaacttgttgacaaatcatcacgatgagcgggacttagctaatttcaccacgagatgctctaggaatcacgcagtgcagagggaaggtgcctaaatcaaaccaaagtgaattaggaggtggggatttgcaacaaatcttcttataggggggcatcccaaacttgaagtgatatttggggtggtttttataattttccctatataaaaaggcgcaacatatttggcctatacaatgcttggaacatgacaactaaacaatatgaaagtgcattaaggacttgttgatttcactgagttgagataataaaattgatataaaattaaattcaagaaaaattattttcccaagatacgatttccttccaacaaaacggtgtttaggttaaatgcacaggtagccagtggacaattataaaaatttaaaaatatattttaagagttcgagaatttaggtgatatatataacaagtaaatttagaaactgtccattcacttaactaaaaagagtaccttcccacaatcgacagaaagaataaaccattgcgaaatattttaccttacgatagcttgtcggtcgaacaatttcagtttttctcgttaattatttgctctactcgtaccgataattgccagacacgttttcctattttctgtgattggtttcggtctcgacgtatcactacagtgtaattaggtatatgcattagatgtgtcctcctccatcgtgtacgtccatgatccactatggtgtggtcttgacaatttgattagttattaagcgtgtgcacatgtgcatgctgaaactgaagagctttgcactgttcacttcgatcgtacatttctttttcgtgccaagacaagcatgctagttaagctggacaatccacaacacgcattatatgtgcatatatgtctgtacaaaaacggaattaattaagagcaatcttgattcttgaaacacaaatcatatgagatctacctaagctctcaatgattaaccacacctcccccttgcgatggacagatatgatggttttggtctctcacactcacaggtcatagcacgtgcctgcatgaccctttccgtcgaggccacgagctaaattacactgacatgttacttccattaatcaaccagctgttagttaatcagtgactagcttaggtaggtgctttgctactttctcttttttctctttctttcgcttttccagccatgagatgtaaaattaatccagctagatagttaattaatctaagctgcgtggatcgatgcatggatggatggatcgattcatcatccatgggaataatcgcagctgcagctagctagctagtttagcagttgccatcacatatcgggatctgatgcccagctgcctgagctgatgaatctttttgcagcggtgtagcagctgaacatgattgatgggtaggttgctcgatgcccaccgacactgacgaccatctcgttttatattaaccgacagcttgattaactcagctgatggggaggctgcatggagcctgtgtaaagcatagatccccaaattgttgtggcctgcctgcttcactagatagtgcctgcataaatatctaattaaatatcccattttcttttgtttcctgcataaaagagtctcttggcatgagttttctggagattataattgattagaaggtacaaataaattgtttctaaaacaaagaaggtacaacaaataaattctacagggaaaatttgatctcccatgcatgtgagtgtgtagcaccggcacaattttggtctgcttaatcaatttgatctgcatcaagttgtagttgactcggaggatatataaacctgcttactaggaggttgctctaaatgtgcacacgctttgttggttctgaatctctctgttacaggatgccttggaccattgggttaatgtctcactatgcaaacctattgaagcattagtcaacagggttcggctatgaattattaattagttagaattaaataatatctgaatgacaataataaagaagaaaaaaaatagaaatgacaacacaacaaaatcagtgatcacagctaaaaagctttagaaaaaatactttaattttacactagttagatattaagtattctatgaaaaggtgaagcaagttgaaatatggttcccaattgtactgttttagaaaatgtcctggcgaaaatttcatagaaaataaatcgttttcttttaatgtacttatttgttgcattcaattgtatttttatcattagtttttgccattgaaaatacttttatggtattataattgtatttgtcagggttatggataccacatacctaatagtagttgactaaatctcggcaggacccactacataccatgtcctatacggaagcaaccttcggatataagaggagttccggataaggaaagacaaccagagttctacgtggaaacgacaaagactactcggattgtattcatattggtttccctagttctacttggacaagaggacacctatgggtataaatacaagcccccctaggaggagagggaaggggatcaacacccaacacaatcgatatagaagccacaacatagaatcctacatacgccaagacacgccgccggatatcgacttcagggataagcacggctagtaccctacggtgtctccggatactgtcaggagagacgaaagcgctatctctgatctcgccgggcacggattcgaggaggaaggctaccctgttgtcgactacgagtcagatcgtcagaccgccatgtcgacaacagttagataggctaccccaaatattgtactggtgtgattatcatgaataagagctataccggcttcggccaacaggatgtaggattattacctgacaatttaggggcccgaacctgtataaaaatccatgtctccgtctcttttacctcaatttcgcgtatactctagtaccaacgatccccatactatgcaaataccggaatcgcgacatcaaacatcgacagtattattataaaaaaaatagaaatgcaatgatgatcaaagctgagtatcaataaccataaatcgcgtttttagggtaaatcttcaagtagtaaaaataaaaacagagtcactactagtttataccttaacggttcattaaatatctttgtgtgaattattgttctgaacgaagaagcacctaccagtagtgctgctagtagttgaatccaatgtcccttttttttttttgaaaaaattaatgttccatgatgcgagcgtgcaggaagatgggatctatgttggccgagcatcaaacgactactggtcctccaatctgatgaggtccagactactactcttgtttttgagatgtcatgataacaagtgtactaccgatcaatacatatttttcacttaaatggtaataagatggtatgcggccctttatgcaactggtactgtggtagaaatgaatctacacttgcccagttttttcttttcttttcttttttctgaatgggtgtatgggtaatctaattttatgataatctttgaaggtacagacggatgaattaactagtatttgatttagcgacaggtataaggcgacggtggaagtttcggtgacttgtaaagttgcaagagaaactatcaaatacatgtacagagaataagacgacatgcaaatcacctgtgaatgtgacagtacagctaaacacaaatcaatttttcatagccccaaaatccatgttactagtggtacacaggcagtatgaacagaaagctccaacttaacaactagcttagcaagtccgcagagaatagcatgttagttgcaccgacggatttagaatagcatgcatttgacaaatggacatgcctgcagtactacctgttctaacattaatacacaaggatttaagagctctgtttcaaggcctgagcttctgctgcagccatggggtctgcattggtatcagtctcctcttctttctccccttctttttctgcagccaatttctccctgtgcagcttctctgctgcctgcatcgctgcacgctgctctgcctgaaggcgttgcatttcttcttcctgctgctgcctctcgaaccaagtatctgcatcagcccaaactgaaaagagacaaacaaacttgtcagcattttaccattaatcaatgtttagaagcagtactaacaaaagcacaagcaacaaagggatgctcgacatacagtacgaatcaatcacattatcaaattcgtaatttgttcagatgtatctagtgtcctgatggctcatatatagtagagtttatatagatgatattgcgacaaaatgctatctttgatttcagctaaggcgaatcgtgctgcaggcatagagggtttactagtatataagcaaacagttatacttaaaacatgtataaaataccttgacatcatttttaccctctgatccagatcagaaagtatacctggtagaatcatctatgaaaacatagtaatatggtagaagttcttagcagttagcagtgttccacaatacataatttatcagctgctttctgctacaatcattttaagccttagaaaaaacaaatggtataggcataatgctttcagggacttaagggtttcagtggcaaaaccaggcacaccattatatggtaagaaaataattttcccaacttttggcaaagtaagtgttttcacccctctattagtgaggactaacgtggtaaaaactaaaaagcttgtatgctaccatgaatataggtggtaggagctgaataattccacacaaccattggtatttcaatttccaaaaataatgtcttgatttgaaaaaaatacaaaaagcttgaacaagaaattatggaaggcacaagcattggaagtacaccagaagatctatcagagtctgtgcagtagttccctaaatatgagctgagcacttgtaatgtgcatggtagggataaggggctactaagcctaattaaggtgttgcttgaccaggcaacccaggtgcaccgtctgggcagccccactacaagggcaaggaagaggagggagataccaaagacttttatttacttcttggttaatgaaaagagatacaaacctcatccttacatcaaggaatttgacctataagaaaattctctctaaaattaaggaaatacctgacagctcaacattatcttatctctaaacaactatgatgcacaaacacttcagaaaagttgagcattggtgtctaatgacatgtgcagctctgatacgcttaggatgcttatcgaccaaatgtcggatgattatacagaaaaaataacttcttttattctccgagacaaggtcgactcatccccgaatcatatgtgacaacccaacccacttggccaggacactaaaccctaaccccatctcaatccttcagctcccctcatctctggttaatagaattctagaacatatagacatctactgaaattgaattctaggagttaaggatcctatttgaggtacattttccttgcttaaagctcgcaatacattatttcagtggcaaacgattgaggatgtgaaaataatgcatatatactacttttttattagaacgtgtagtggtgtcaccatatcagtgtcatgcacgtggaacagaaaaagggccctagagtgtagtgattccttctactatatgagtctattgggtgatacatgacagcaattatgcaataacgaaaatcaagatgaaatgaatatattgcaaaaaaaaatgaaataaacaaaaaagatttcagtgcaggtaagtggtatgtacagctaggactcaaggaaaacatcattgagaaagatatagaagacctacaagattgcaacacaacattagacttgatggttgctcagattatttagctaaatatttaaaatgatgtaagtgtttgtggaacaaagaatttctcttgaacattcaaatacacaaaggacagttccgcacaagtgatgctttgatcattaagtaactatggctggattaaatcattagatgcatggcaatactactctgtggcaagataatactactttttttgtgaacgccgatgcagtgattcaggaacaccgctaatacaaattgtagtatgtacaataaattatatagtgtggtcattcttgttcttttcattctcataaaaaaatttctaagttcatttctattcttgaaatatagcagtcttgtaataaactgatggttaaggaagtcttcactctcatcggatgttggcgcttcctaaaacattatccttcattttaaaaggggcctaaaattgaatgatattttcagacgatgagaaatggagaatcaccaaaatgattaccatgacctaaaaaggacttcattaacattgcattatttgtttgttcatattatcaatacaagtctctaagaatagcagtctccagtgcattgtgaagggttgcaagtcctggaggaagaacatcaagttctatattatgggaatagttcattactaatagtatcgacgtgctttcactacacagggatcacaaagtttagccttctacattcctgtataatctgctaatcatgtattcactttcctcaaagtatacatcaacttatgaaataatttaaatgcccagtaaaacaaatcgagcacattaccaggctaattaatgaaattataatactgacatagttagcagactgcattggacagagaacagttaataacctaatataggttatcgaatagagtgatgaaacagtagccagggctaagtagccattcttgactggcatttcaaacttccagattttaggaacagcaagtgcatgcaaatgcagtacgcacctttggtgctactagtgttacacgtttttctcagaagaatcccaagctagcatgtcaatagagtccgtcaaagattgttagaaaacacttacggcatccaatattaataggaataatttcgcatcattggctccatctattagcacaaggctcatgatctactacgatatacagttttgtaatttgtacagactgaagacacaagggtcatgatcttatataagttaagcttgctctttcctacagcagttgcttattgccaccattacaactgaatcaaattgaaacatttggagtgctacagattataattgggacttttagcactgtgatttcgacctaacctagcaaacgctgatgtttaaatatccaaatgccctattagaaaaatataaggctccagaatttcaagaagcacctaaaacacactcattcatcaactactaccaattgtaaagtaatcattgcaagcctcaatagaggtctaaattctgcaaattcaaataatgttaagaactaaaattttctgtggactacaagagctgaattttatcacatgagatagttctacttccataacagaaaatcaaattttgtagggcatgctactcattgagttcaatgatacgccactctcatgtctcactgactaatggccccaggacccaaatgctaaagataatgttgaagaaacaaggatcttcaacattttaaacttttcattgttcacattgataaccccaatttgttacaagcaaataaaaatgaatggaagaaaattcatggcagtgaaaacctaaagacaaatcatgataaaatacaagtcatgacaaaagacaaatcatgataaacttttgccattgtttactcttactagatcaggcaaaacacaagtcctacaatcaaaattctttgcgactcctcaccctctacgatctggggtctggaccacgcatttggcatttgcaccacattgcaaataaaaatttaagccaaaacgaggtagtcaaaaccagcagttctagagttctagccctaagtcaggaaactaagcaggtataagcgatgagcaatggagacgattggacaagcaataagaaggaaggaaggaagctggacatacttggctgtgctgcccacccctgctctcctcccttgatgcgctcagggaaggcgtagttgacggtgaggacgcggccgaagagctcggcgccgtccatgttgtccatggcggcggcggcgtcctcccgctcgaggaaggtgacgaagccgaaggagcggtgcttctgcgtggcctggtcgagcggcgtcttgacgtccttgatctccccgaagggcacgaacgccgcgtgcaggatcttctcgtccacctcctccgccagcccacctgcggcaccacaaaaaccaagaaacgaggcacgggttcagctcagctcactaccacactgctactccgccggcggccaggaaaaaagataaccccgtgaaggaggaatttcgtcgagcaggtggcaggcgtggaaaagaaaaacagaagagaaagaagaagacgggtgaggagagctctagcttggagctcgtggcacgactggcacgtacctacatagagcgtgttcttctgcaccggctggttcatatctccgtcagcggcggcggcggcggcggcggcgacggcgggatggagatcagcgcaggcggctggcggactctcgtggagacgggagccgaagcccggggggagggggggacaaggagtcagagaggagagtgtgcggcggaagcagcagaggaggccggcagcggtgctcgccgggatggagatcggcgcaggcggcgcggcgcgggcgaaggagacaggacaggagaaggggaaggagaaggcgagcccgttccgccgcgatgttgttcgcgatatgggcttttccgtacccccagtctcgtttcggcttacgctttgggcttctctggaccaaaaacagcattactccccggagtagtactccgtatcagaacttccttttttaaagactgacagaatgttactttgaacttttgttttttttttactttgttacagaattaaaagaaacatcaaatgctgaaaaaattgtatttcttatcattgtaatttttaggttttatttaaatatatattatataagtatcctatcttactataaagttataacccactaactccttaaacttaacatgcaaaaataccacatcatcatccattaacaagatgtcacatcatcatccactaacaataatcacatttaaacattatgcaaacatgctatattatctactccctccgtttctaaataattaacgccgttgacttttttaaatatgtttcaccgttcgtcttattaaaaaagaattaaatatgtgaattaattctttttctatcatttgattcattgttaaatatacttatatgcatacatatagttttacatatttcacaaaagtttttgaataagacgaacggtcaaacatgtgctaaaaagtcaacggcgtcaaatatttagaaacatagtgagtataattttatagtttttataatttaagagcttttaaaatataagcattttaaattatcatcctagataattcacataatatttcaatgtatatttttattatgttttatgatatcctatatacttatatagtttatcctcacttagttagtgcttaaatgattaatctatggtccaaattatctttctctttttttctctaattaagtcatatcacctcaattgtttttagcctttagatgattaatctacggtccaaactatctcccaacttttcttcttccataaagtcataccaccttactttttacgtttgaatcaccattctacatactatttaaatttaaattatcataaaccacattaacttacttaatctgatgttatctagttatcttacacgttatttttttattgttatcatactaaattcccgcagcaatgcgctgggtttcacctagttaattagatgtgcatgctgtaaaagataatcactgtgacttcatcgtgggttgcgaccactttttatttcagagtaaattttataaaaccacaactattatggttaaatttgcacaaaacaacagaaattttggcaagcgacatataacccagatattatggttatgaagtttcacaaaaccacattgttagccattttgacatactcctatatcaaaattttgaaaagtaacatctatattatggataaaatcctcgtaaaatctgagatatgattgtaaaactcaaagtatgatagatcaaagttaaaatgatcaatagtgtggtttagtgaaactttagaaccataatacctgtggttatatgttacatgcaaaaatcttcatggtctcgtgaatttgtacataataggtagtgttttacggaatttactcttttattttatcatactcatccactccaaaggcccaagtccatctttgctaccattgaataaaaaaaagatcagtctatcaactatagttgaaaagtaactctctaacaagggggatttataattatgacactgcaaacataaacctttgctataatgaccctggacccacatttcatagacatagatgggcccatttgtcatccactcgaagtgtcaaaacaatgaagccccaatgtttgcagtcccaatattgcaaaattagcttaagggtgtgttcagatgcccctcttcccaacccctctccctcgttttccacgcgcacgcttttcaaactactaaatgatgtgtttttttaaaagtttatatacaaaagttgcttaaaaaattcaaattaatcctttttgaaaaaaaattagcaaatatttaattaatcacgtgctaatggaccgctccgtttgccgtgcgcaactgtgcacgttcccatcccatctactctctatttctcagctaccgtgaggcaagaaataaagtttgatgactttgctatgtttaatttagattataaagcagaccattgttatagattatctattggattatagatataaattaaacatttcaaaaattcgatgaataacttgaaaaaatcagagcctttttaatgcattactacaatatatcatattagccacttcctgatcaaaccattatacttcctccgttttatattaaaagactttttagtattgtacatattcatatatatgttaataaatctagacacggcaatgctataaagtcttttaacctataacggaggaagtattatttacttcaatccaagatcagtctaacctgatctcgctccgtcaacagtgccacccttgcacccacactcaatggccaggtgcccatagtttcttcattatgtgtttgattgatctgatcctaccgcttccgctgtgcggtttcgatctcacgagttgctggtagaagaacttgttctgggaggaggttgggggggaaaggggggggggggggggggatcgatagatgcaaagtcgggaggagtggggggctcaagtcgtgcggccgaaggcgcgtccttgtgaagatggatgaatttttagaacagaagcgatgtcatgcaaggcaagcgcgtgcagggaaacaaagtcgaacgaaaagctagctcagagtagaagttttcttccagagcaacagatgtaataacagacgatgagtacaaagttatctttaatttttataatataggtaatgataataaaattatttttggtggccttttgtttcgaaagaattacaatcaatcttccggatattgcaggtcgaattactgcgaattgaataaaaacgacttagattactagtctaaaagcaaagatacaacctccatttatatataattggcaaaaaaaaactgctaaatatttcatctgcttgaatgttggatgtagtccttgccttgcttaaatgaggatacaaaatatccaaaaacaatatccgattattatgccgattaaattttgctcagatcaccactaatgagagtacatatgcgctggattgtttcacttgccaccgcccctaacaactaaaccggccaagttagtaagtttcaaactaaggcccacgatcattagagcgtagaaggccggacggttagcccaacccatacttggttggggttggaggccggagtccgaagtgccggagaaattaatggagtaaaccggtgacttgtccgggttgaagagcccgaagtgcttctcgatggggaataagttcactttgagaccctcaaaagtgatcgaaatctaatccgtaaccctaaaccacaaaaccggatatcttgaccccttaactcttaaaagcggtgcaatttaactccttcggtggttttggaggacggtttcgctgatgtggcgcatacgtggctttctactcatcaaataagttaaaaaaaataaagtgaggcccacctgtcagtgagtcctctcctacgttctctctttcttcattgccagcagcggcgggaggacggggtgagcagcggcggctggtggcatcggggcgcagcgcagtcggcggctaggacggcggcggctcggccgcggaggctcgcgatagtgggaggacgagggaaacggcggcggcggcggcccaatatgctgctcgtcatcctcgcccttgcggttaccggcgcggtctccgacggctcgcgagtcgctggaccacatctccatcaactgcatcggtgtcgggggacatgtccggctgccgctccatccactcgcgcccgttcagcaccgacgaggagggcgaggctcctcgtccccgctcagccgcggctcttcttggatagtcccgactggaggcagtcggcggcggggagggagtgggaacgggagcgggacgatggcgacgacagaagaggaagctggctcgcgtcgggatcttggtggttcgtcggcgatgatgccgtgtgcgctgatggatattttgcaatcttgagctttttaatttctgttttgcatgcatatagtggctggctgaagtctggcttgttctttccagttatgcatgtaacgaactgctgatggagatgaataaatagagaagaaaacagagaagctgcggtgactggtgagacttaagcagcacaaaaaccactctgatcttcggtttttcagtttactgttcacagtcttacaatcttcagagtttcaaagattcagtgaggttgagcgtgtgagttgtgagcgaattgcaagtttcctgacgatggtggtggtctccccctctcccccgccgtaggcgacgacgcgatggtggagagcgcgtccagcgcgccgttcccgagcgacaggagcgtcacgctggtgatcgtcgggagaggcggagcagccacgagaggcccttgaggctagagcagaagtacaccgccgccgtgtcaccgagcaggtagaacagcacggcgagccaagccgccatcacgccgtagccaagaacccgccgctccacaccgaacacgcagtcgaacaggtacaggtagtcgacgtagtcacgcgggaatcgccggcgatcatggccatcctcctcggcgacgtgctcgcacctctccccatagctctcaacctggaatacaccgccgccatcgcgacgcccccggatcccgccctccttggacgacgataccacctccggcggtgtgccgccgcgcggcaagatgatgaagaagaagacgagcaggagcaagaaggccacggtgacgctggcaccgatcagcacccttgtcgccggctagtgcgaagaacagacgccgaccccatctcgccgagagctggcctcgccatcgtcgactcctccactgtggggaccgcttcagctcccgccgggcggcgccacaccgcagcccatgccctgccgccggccaaaggggaagaaggggagagaaaaagagagagaagggagagagggaggaggactgacatgtgggtcccacagttagtgggccccacatttttctgtgtgtgaatgacaaacgggtcccacgtaaattttttaattttaatgccacgtaagtgccacgtcaaacgccacgtggatcaaaggctcggtcaatattgccacgtaggtgccacgtggcgtcacgtcagcaaaaccgctctctaaaaccaccaagggagtcaaattgcactggttttaagagtttggggggtcgagatatctggttttgtggtttatggtcacggattagatttcgatcactcttaacggtcatgaagtgaacttattcctctcgatggcatctcccttcttctggttctcgtcaaacatggcgaatatgtaagtctccaatgccacgggcctcttgggcgtgccctttccgacatggttgatcaagttctggttgtacaccctggcgttgtccttgctcgcgccacgaccgtcagccgatggccacccggtctcggaaatgacgacgggcacatctgaccctccctccttctccattgccgagtatatgctgtcaaccatggcatcgaagaggttggtgtaggtgtgtccgttgtcatctatcgtcgtcgagcttggccggaagagcgcgaagttgaggtcgacgccgttgtcgttcttgtaggcgtagtaggggtatacgttggccagcagcggcgatccgtttgctcgccaagaacttgacgatgggacccatgatggagggggggtcggcgaacgcgcttccggaaggcagcggcgagccggcgaccaagctcatttcaacggcagtggacaccttgatgtggccgccgaggccggccgcggagagcgcgtctctgatgttgttcatggccgggaggatcttgggcttgtcggcgccgtctttcacctcgttgccgacggcgatgtacttgatgttgacgtccgggtagtacggccggacgttggcctggacccaggcttgcgcggcggaggacgacgcgttggtggcgtcgttggaggcgagagagcggacgtcgggggcgtcgaggacgacggcgattctggtgccgcggagggcgtgcaggatggtgtcgttggggaggtagatgcgcatggcgtcgatgtggttggactggtaaagctgcaccacgtcgcccggccggcgccggcaggttgtctccgttggtgccgtagcacacgccgatggccaaatctccttcgaccatgtacgacctccgacgtagtttgagagagccaaatgcaaatgtgtgtcggcgtggagcgtcacataggaggtcgtgcacggttaaaagaggtttagacctgtgatacattaagccactactaaaaactgattttcctgtgcaatgagctctttagattgcagacgaaccataattggtcgcgtctgcaaaaatcgtcccatcatttttgcgtgcggatgcttaagaggaccgacacgtgaaaatcaaatttcgcaggcggacctctccgtacgcgaaaatcgatttccgcgtgcggtcctcttaaaggcccgcctacaagtttattctccctcactctcttccctctcatcaatttcaaaaatctaaagtcccatctccccacagctttatctcctttctctctctccccacagccttatctcctcctctctcacctcctcccgacggcgacggtgacagggacggctcaggagatggagagacgcggtgggggggcgtgggacaccacagagacgggagcggcagcgagcggctcggcagctggcagagaccggcgggtgcgtggcggctcgcaacgatgacgaccgcgcgtggaaggcggtaagaggcaacagtgaccggcccccgcctggatcttggcggcggtggcttcgggcttgcaggcgcggcgggctggctccacggcgacgaggaggtggccggatccgcacacacgcccctaccgacgaggaggaggaggagcggtggtggcttcaggcaggtgggctcggcggcgaggaagaggtggccggatccgcccgcacgcccccaccgacgacgaggaggaggaagaggcggccggtgtggcggtggcttcgggcggacgggtttggcggcgaggaggaggtggctggatcagcgtgcacgcccccaccgaggacgaagaggcagctggcgccggtggcttcgcatgggcgggcccaacggacggcatggatttggcctcccctcgctcgatctcctccgtgcacggtggccccctccagcgacagatccggcagtgaggaggcatgggggtggcggatcaggcgacggcgctggcgacgacgaggacaacggcgaccacgagggcggcgtatagggttagggtttcggattttattttatttttcggtttttaatttttgtgtgcggacaacataagcacccgcacgcgaaaatcatattttggcgagcgccactcgcacgcaaaaattccatttttgcagaccctttcgcccgtgcggttagctctaccacatgtgaaaacccctctagaaccgcacggaaaaacctgttttgtagtagtgagccaaaattataaatttaaatatgtatcttacaagattttgaacataaatgacaccaccttacaactttaaacacatggcatgtatttgactgatgaggaaactacttcgttcggtgtttctgatagccaccaaagctttgagatttgtgtgaggggatagagatacaggtccattggttcaatcgctgttttttaaattttaagaattcatttataaacaacaaacatgttccagcagcatcattaatcgagcttcagtgttatactccctttgtttctttttagtgatgtcggttatttgttttgaactaatcaacatcatacattttaacatgaggggatcatcgtttatgttgtcatatggacttgccattatgtatactttcttcgttttcaaatatggttcattttaggatcttgtatctgatacgaccatggatactgttgatacaaccgtcgctcacatcaatattaagttgaccaagttttagaatccaattcggccacctgctatagtactgacttcaaacggccgccaaatatacgtacgggctccattttgggtccatgagtacttcatggaaagccctcgaagtactctttccaacgaaaccagcctcatctccaaattccttcttagttggttgcaatcgcaaaaacacctatattggaccgatgggcttgtaactttgtttgggaccatgacccaagtgaggccaatgtagggtgcaccccaaccaggcggagcatgagcctagggaccccttggtcgtcctctcaccttcataaatagctagatacccgttcagggttttgtttagattaaggcaaattttgctataagacatcgtggcttcgtggttttagctataggacaccacgcgaagtgacttttggggaaagacactcgcaaaagttggatatttgctggtggacaccacaccattaaaataatcatgtgaaagagaagagagaaatcacgtgaaagttctaaaatgcccttgggcccacatgtcagatctgcaactctctatatatatctctttctcaagcacatggggcccgcatgcaaacctctagcatcgttttccctttcttcttcttcttcttcttcttcttcttcttcttcttcttcttcctcctcctcctcctcctcctcttcctcctcctctgctcacaggaggaacaggtaacgtgaggcgtggcaagcttgatggcggctttccatgggcggtggcgacagaggaaggagatgcataggccggcagtgggcgagcagcgtagtcgcaggaaagacagccggcggtgaagccggtgtcgacgaggtccgcggggaaggaggtggatccaagaggagacagccggaagaggcgagtgacgccgcacagaggtggtggccggcgccgatgcgggccatgcggctggaggagtccagacggggttgaggacgatagggctagtggcgcagtgacagaggggagggcacccggtgttccaggcaaagaagctggcggggagcttggggacacggaggacgacgacggtagcgaaggagattcggtggtcagcggtggaggtccctaggcggtcgagggcaggaggtgaggtgaccatcctctaggtgtgatgaggacacaactagctcagatataaccatgactaccttatgtattaatcaactaaaggtgcagatgttttacattagatttacatgttatatatttgaacaaacgttgctacacaatgagtttcctatgtttttgtttgcataggtacttgcttgggcgaaggaaaagagaccaagcgtaacaaattcatggatgatcaaagaagttgattggggaccatatcaagaccttctccaagtacacttccatctcatcacgtcacttttggtccatagaagataagagataaagttctacacgttttggattcgaattcggccctcctgacagcatcaacttcaaacggacctaggcactgatctagaaggaatttcggggcccatgagtacttgttggaaagcttatggagtctgctttcagatggttttggtcccatatcaaaactcctaccgagctgccgagaatctgcaaaacaagccacgcaccttatccagtccgaatctgattttgagttttggccttgtaattgtgtcgtgggcttagcccaagggggtgtgcgccctagggcaaccctaggacgtccctaatcatattaattcagtagccgtcatcgtttagagttaggttttgcttagattactctgtcaagaatagttttgccgctagatcggtttgtggaaccccaaattcgtgtgcttaatcattcatatgcaatttggttgcaatctatcttgttcttgcttgtgttcttcgattcgcatgcagggattagccttctcggcgaggtcaaccgggtttcagcacggttgataaccagagaagacgtggtgctgcgattgcggggctcggtagcgtgtttgttcagaagccggatcgagttgtgtcgcgactccgctcaaatcgattgtttatcaatacctatcggaagatcgggacctaacaccccttatcagttggtatcagagcgcggttgcccgttaggtaatttatcttcccataaccagaaaattgcaacacaaaaatatttactctttacctagacaatttgagccgttgcattgttctattagattttgctttgttaaattctagattgtatcatcgtgtcgagtgctggtttagttttagatttaacttttagttttgagtattgcatctgttcatcacctagatctagggttcatcactcaagtgtgagagttgtacgtcagttttgggttcagtttttcatctcgtcgattgttgcagggaccttgaaaaattgaatcgtctcgtcgtcgggtttccgtttttgtgatttggagaaatttttatcgagtggttagagagttgcttgatttctagggttcctgtgttgccgtgtgttcccgagcttatgtgtgccatgagaaataaattaaaaaaaacgcacgaggttggttgatatgggttggatctgttagatataaaaaaaatattagtggggccacccttatcctgtggaggccggggccgaaacccccacccccacgtccgcaactaccacctcccctcacggccgaccacctccacctcacggcaatttctcccgtgccgcttcctcgattatcacattgtttggtattttggtggttgtagatttgagatatttttataaaaacggaacctacatgatgtgagcattccatttttgaggtgatctaattttagttttacactttgtatttgagtccctgtaatattcatatttacatttgagtctttctttgaggtcagtggttcagttcttgttgaaaaaaaaagtaaaaaaataaaaaagaaagaaaaggcagaaaggtgcaaagaaaaagaaagaaaaaaaaagccgcacctaaaaaaaggaaaaaaaaggcagaaatgtgcttaaaaaagccgcattaagaaagaaaaaaaaaccattcatccttggagtatgttttcagagtgcagagttgtgcattgattcatatctagtccttagtgttgtcgggtgcttgcttgagctagagttgagtctagactaggccagcacattgactagtaatttgaactattattcaactttgcattttctgattagtacaattgtgttcctttgctactatatattgtgcctcccaagttccacatatattcttctggtcagcactgctttgatccttgcaatcgccacatcacgtccttcaaggtgtcacgaaccagccactggttgtaccgtccttagcattgctggtaagacacttgtaagagcttagtaggacgcttccatttgcttgtctccactacaatccatgttctatagttaatagttctctcttttctattgacaatggcatgtgcacgtgatgaaagtactctggtgcaacaagtgctaagttctcaaatggagaaagcggagcaatggcagtaccacgaattatttgaaacaaagtttgtggttaaggatagagcatgtcatgctataattgatagtgaaagttgcaacaactctgtgagttcagatttggttgacaaacttgagttgcctacacaaccgcatcctcatccatattacatcgaatggttcaactcttgtggtaagttcaaggtaaatagaattgtgagaataaacttttcgattggaaattaccatgacactgccaattttgatcttgtccctatgcaagcatgttctttgttgtttggtcaaccataggtatgtgataataatggatcgcatgattttgttgctaatacatacacatttagacataatggtcgggaaatgaaattggtacccatgagttttactgaaattttcgaagataatcttgaaaggatgaagaatggaatcgaggaaattttcaaagatagtattgaaaggacgaaaaatagaatcgatgagattttcagacataccaggaaagatactaatattgcgatgccttcaactaagtctgagttattacaaaacgaacgtattgttgtgcctattgctttggatattaatatgttgcaggcatctgagaacaaccaaggtaatgaggaggaagagaagaaagacgaagagcaaaaagatctatccatagctccatgcatgcttgaggaatgtttaattgatcaagcgcctacaatttcagaagatgagaaaaaaggtaaagataatggtgctacaactgctcaaggtatgcatagttatgatgtgccaattatgtccactacttatactacgttagagaaacccatagtggaaacaattgttgaaatacctttgtcacaagacaaattgcttgatgtctcttgtgataaagaagagttgtgcgatgcttcacttatatccatgccacaactagtgaatgaacatgttagttctgtagtagagccacccagcattgagtttaaacatgttattcacattgatagcgagaatgaagagcttaaattgctatattctttaaatacttggggttatattcaatttaatgatttttgtccactcaactgtttagagaaaaaaattatttgctagatttgaattgccatgccgttctgatgtgatttttcatattattggcaattatgatagtaaaggagaatataatgtgcatcgagtatatatttgttctaatttgactatcataaaatgtattgtctagagtaccgcatgcatataagtaattctctatctatggccatcaagaaatgttcctcaccggatgttgtgatacataaagataagttcaatacgctctatgacaaggtgaaaccgaggacggtttctaatcaagaaggggaggatgatgaggacacaactagctcggatataaccatgactaccttatgtattaatcaaccaaaggtgcagatgttttacattagatttacatgttataaatttgaacaaacgttgctacacaatgagtttcttgtgtttttgtttgcataggtacttgcttgggcgaaagaaaagagaccgagcgtaatgaattcatgaatgatcaaagaagttgattgggaccatatcaagaccttctccaagtacacttccatctcatcacgtcacttttggtctatagaagacaagagataaagttctacacgttttggattcggattcgggcctcctgacagcatcaacttcaaacagacctagccactgatctagaaggaatttcggggcccatgagtacttgttggaaagcttatgtagtctactttcagatggttttggtcccacatcaaaactcctaccgagctgccgagaatctgcaaaacaagccacgcacctcatccagtccgaatctgattttgagttttggcattgtaattgtgtcatgggcttagcccaagggggtgtgcgccctagggcaaccctaggatgtcactaatcatattaattcggtagccgtcatcgtttagagttgtgttttgcttagattattctgtcaagaacagtttcgccgctagatcggtttgtggaaccccaaattcgtgtgcttaatcattcatatgcaatttgattgcaatctatcttgttcttgcctgtattcttcgattcgcatgcagggattagccttctcggcgaggtcaactgggtttcagcacggttgataaccagaggagacgtggtgctgcgattgcggggctcagtagcgtgtttgttcagaagccgaatcgagttgtgtcgcgactccgcccaaatcgattgtttatcaatacctatcggaagatcgggacctaacaccctcatcaaggtgggtcaaccgaggcggcggcgatgagccgaagggcgttgaccatggcaatgtggaagggagattgtagatctgacatgtgatctgacatgtgggcccaagggcattttagaactgtcacgcgatttctctctcatctttaaccagaaattattattttaatagatgcaatgtttactagcaaatatccaacttttgagagtttcttcccgaaaagttacttcacgcggtgtcctacaactaaaattttgaagtcacgatgtccttttgccgtgtaatcccgtgatcggttagatcaccggtttgctcgttatggaaccccaacatatcaattgtattcaattcctatttgcaattcagattgattttatcttattcttgcttctttcttcgatttgcttgtaggaataaggttgatctgcaccgacaagattaactacccacagagaggtgtatcgatcgctaagacacaacacaacaacgtctcgtacgattgtagtcgggtcggcaacgtttctcccaaatcgtagttatcttcaactcaccgaaaaagcaggccaataatagtcgtgggtgcattgagtggagctcagggttcatcatagtcggtcaaacctttttaactaacttagcatatgaagtattaactaatatataaatgctatgtagctacattgatgactttatgtgcagttattagattatcatggagaatactttcatcatataactttatctacttatataatactttcttttaagaaactgcaagtaaaaattatcatattggagaccgatgtcaatgcttggaatcatagtgaatatgtgatggcatgaaaatgtatgcatgctatgtactacttcccttttatattataaaacaatttgatttttttcctaattaaacctttttaagtgtgacgaagtttataaaaaatgttagcaatatctaaaacgtaaatttagtttatcaaatctaatattgaatatattttcataatatgttaatattatgttagaaatattgctatgttttttataaagttactaaagcttaaaagtttgattaaaaaaatcaaagcgttttatagtatgaaaaagagtgtaaccgactctatagttcatggctcatgaaatcatctccagccttacaggtctagattttgatcgtcgcaacaatgtggcttaggaaatgatttctggcatcctacaatcgatactggcttagaactatgaatttggtgatttggcacgattttgaactatgaactgtgaatcgataccggcatttctggcagtttctctccccaaggtcgatagcagatcatgaatttggtgattgtttcccattgcgacacgttttgtgccgtccttataagttaacaccagtaagccaaactatgaaaatccccaatgccacactcccaaatgccatattcccaaaaaaacttgaataaattgccattggtacacctacattagttgatttcctgccattttggtccattcttaacgccacatcaacagccacctcatgacaccatcaagaaaatgacattgatacccctgccctttcagtccaatttttttttcggggactttcagtccaaatttaacacagcccacatcaaataaaacacaaccgacagatgcacaataatttcacaagcaaacacagcttggaacatacaaatagaatttgcaaacgctagacagatcaatctaccaaaaaaagaatatcagggaaaaatccgatgccaaaccaaaaggagggaaaaacgaatgatctattgctcttttacctgggccaccgccggcagagtcgctggagaacggagcgacgcgaagtcggacgaggagtagggacgcaaagcctagagcagggggcaatgcaaatatcagagtttttctcctactcccagtgtgcaagggcaaaacagggatttcaccccatccaaagctgatgtggcataaaagaaaagaaataaaatggctgggaatcaactaatatatggatctagtgacaatttatctaaacattttgggatgatggcatttgggagtgtggcattggggaagatagcaaatagtaaaaaaaaatcctgtcttaccttaggttcatacgagcatagaactgattgtgatacccacctttcaaaagtatccttcatacctaccgttaaaaatgtctatgaacaagcttctaaactgatggacacttttttgcacaccattacaaattctgagtgatccagacctcagacgggaataacccgtagatctgttctttaacatcacaaaagggaacagtacgctcaaattttcctgttttcacgtcgtacgtccttacacctccccaaacacgcagtccaagaagccaatcgaatgcatgtatgatcacgggggcagagaaatatatacagtgaggccgtatcccgggcaaattctgggtgggtaagcatgcggagtgattcaatctgaggaatagcgcatgatccatcaaaacattcccctgcaccacccccttgcatccatccggatcaaccttgcagatttggaacgcgatgccatccgggtagtgacgcgcgagaatcacacgaacctgcaggagatcaccccatggcgtcgacactagatgccgagtgaggatacatcctaatcctccgtagggccttgcggcataaatcacctcccttgttggtccgttgctcgctccatcaagatcccacttctccaccatcctgtgcaatgtcacggcgtggaacctccccttgtggtacgcacagtcgagatatctgtctcccccgcttagagttgaagccacctgccacctgctctggcctgccttggcaaaagaaagccgctcgccgttgttgtggatgatcatcacgacgtagtcgccgcctctggatggactgcaagacagcactgccttttggtagaaccatatccctaaccgatacgcttcgaacctgctgtttgtttccaaaaggtagttctccaagttccctccttcgctgccatagaccgcctccacgcaggcgaaatcggtaatcggtgggagggggatcatggccagtgtgacagggttgtggagcacgagattggagaggtcatttgccaaaaccagccagccgtgagaggccccgtagcacgcaacaaaggagccctttggaaaactgactctgtagatcttgtcaactgcatcaccagggtggtagaggttgcaggtcaccgccgagcggcgcctttcgtccagccttttgtcaacgtggttgccccatgacatgatccatggagtgcgagaacgcgggacaccggcagccgtggcggcggaactccatgtggtgcagactgcggcgaaggcaagtgcatgaggaagctccagtcgttccaggatgattaggaggagatcaatagggaggtcggacaagctggggcttgcacaaggtcctgctgcagcaaacattggtatattgcgaattaatattcagcacaaataaaacactctgcatgcaaacatatttgttactagtaagagcgaacaaataaattccatctatagttcggacaacagcccctcctggtaagcagggcttatcgaattggaaaggaacattgaatccaattcggacacgaagaaaccaatacaaaagaatcgaacacaacgattttgcaattggggctatcagaattagaaccggactcccactcttctggaaaacgatctacgtacgcaactcatgataggaacgaattggacgcctaatatatagcaaaaaagaatttaaaaggaaagctacccgtgagattgtaaaattaataacaatttaataagaagcagatataaaattaatagtttttccatgtataacaagataacaagtgtttgtcatctcgctaacgttctctttcaagatttacatgacccgaatactaaaaggatatctgtactgaaatttgttgatggcaaaagtacatgtttagaaagacgacaaaagtacatgtttagaaagacgtgttaacatatagccatgttatcaacctggtgtaaactgaagcatgtatcacggtatggtatggagaacataattacacgaatggtgacgtcgtgttgtacaaagtaagtggacattggtgagtaacattcggatcatcaatttactatcttctagattatgttttcgaattaattttgatcatgagaacctacctttgctcaccagtcgggaacgtctttatacacgatattttattgccaggtcccataaccaacactacaatctttaagcaaaactaattccgacacactgggagagatgagaaattgaggaattttatggactgatgcatttgttgctattaattattatacttgcccatgatttttttcattaaagtatgcgtctgtttttcattagtatcataaggtcattacatcacaactgttatattacgtgtcgactgtaccatgtaataaatagtgttcccatagaccctttgtctcataagatctacactcccctaaatatgttagctatagcatgtgacaatccaattattgtggactgtgtaagtttattttggtcatagattcagaaaataaaatgagtttgaatgaatattatttacttaaattgctcctaagttggttcaacagtctccaaaaagatgtgaggcaatgactgcagttagttagttctgtatacagagtgtatttgccagttgccacccttgcaattatttgaggggcaatacttttatgaagcttaaaaaatgaatttcaatacatctgccctggcttgaaagtaaacatgattttatttttaagattgcattttagtttacaggagatgtacagtgtagctaggtctgtcatttttatttgtaaaactcaataggtgtaaccgctgctattttaatgcatatttcaaaaccatgtataccacaactggtactgttaagcagttctgcatcaacactggttattatttggtttttatacaataccactatgttaattagtgtggaatcacttacccatgtcctcttaataatttatcctctgattgcactaataaaattagggtgctatatggcataagttatgcacgcaatacactacactaaaattctgaatgtcttgtaataaaattgttatgcacgcaatacttcttatcaagatattctaaagtaaaacgtctcaaatgcatttacaaacaagttgacaagcgggcatattacatccacacaacattgtattgtttcaggtccctagaaatatacctaatgctacgagagctattcattcccaatttagatggtgaaactttcttgaaaacaagaattaatcattccatatgtgcttaccttttactttggagcaattaggcacgggcaaggtgattctttctgttccctcaaggcattctgtttataccccttggaattggttgggcttgaatccaaaaatccagagcataaaacaatatataaataaactcccaatgaaatgtttcaaaactcccgatcacaatagattcattggtctactttacaatatcttcctccttgccctctactacatgcaaatgtagtaggaccagcccagttgaaacaaaaacgaaattaggaactacatgaaccatctatttaaatccatggttgtggaagtaccgtaggttaggctcgtataaaagggttaactcaaatacatcactcttcagttattcgccatatgggtggcatgctaacgctacatacaccacaatttagtaaagcagtatccttttaaaaattgacagcatctttttagagtaaatgtgacacacatgcagaaatagatcatgtgtgaaacatagatgtatacaattgagtaaccggagtatctctagagtaactttgatagcttgaataactggagtgtggagtgaagtagtcaacagcagagcagatttttcctgattcatgcaaaactgtaaacgtcggatacaaggaagtggacataaactattttcataagataagatgcatagattattttcagttttattggcttgatctcttgcagttaagtgccatatatatattagtatttgacatgtggaactatagccacgaatccgtttactgacagatcaaatcctccaagcataattgactataataaagaacacattggatttgaatccaaggaaacatatcacacatgcacgccatcaatcacgggtgcatgtactccaaatatacaagggtctaaatatacatttcactgatatagtacacaataaattatatttgtaaatatacatgtgtcaatcaattggacaatatcaaatatgtttattttttgggagcatgtatattgtacctgattggagccggcctatgtaacctgacgaatgagtttgaaccggcaacggcgcttccaatggaaggggaggttggccacgacgaggctgtgtccctgaccggacggcgataaggctttgcttgataccgtgacaggaatcagggaatgcggcggcggctgaaaggccggatgagagtgatggcacctatagaaccatcttctcaatagagtaacataacaatgcatagtagtcaataaaatcagtttaggccatacatcagtgcttgcacataaccaatgcagcacattttacatattcaggtgtcattatttgaaaagcaatattatggcgtaactcatcgaatccactgccacacggataatagacccaccctggatatttctttaaacaaatagacaaaagcattatggaattttcagaaagtacatagtttagctcatgtaaattttatatgtggctggaattagctcaaggaaagaacgaatcccatcatcatgacatcataccatctcattgtcatgttacattttcaagggaaaaaattatcactgcagaaagcagaacttggatataacctaaaagtaccagaagccactttgaaacttggattaattccattgttgcagcagttgaacgatataatacttgaaggttgtatatgcacgctactaattaaagcacttcatctgaatttacagacataaacatcctgatcataagagaaattaaatcatttgcattatataaaaagttgcagatgctaatcaaattgtttaaaacaggacgtcgtcattgataatttagtgtgatatgtgcacacacatcagaaacatagcactgtcaatccgcaagtaaatgaattgccattgcttattaaattttggaccaatcgaggaaaaatcaagaagaggaaagagcaaatgaaataagagaaaaggatctccatgtaccaggcagagagggccattgacactgatcaggtagaccactggtgaatcgggtagatgatggacacgacctggcggcagtgaatcggcgacggggctacggccgagtcggcgctttgtgtggtggcggcggtgacagcgtgagtcaatctggaggcaggaatcgaatgagaaacacatgcagataataactttttgtgtcacacatgcacataataatttgatttcaattatctcactggtgtattctatagtgggagggaggaaaattaaacagcaagtacaaattcatttgtattcactattttatctctatttcagtaactttgaacagatgcataatagccattgataatttaatattaggatgattcatagtagaacggagccgctccctaatgatgaagctcaccacgttgatccaatgcaaaaaaaaaaaagaactaaacaatcaggcctgaaatgttcagactgttcatgcttatgctctaccaattgctatacaattaaagaagaagatccaagaatacatatgcgtaaaatatgagtttccacctcacagcaagtttcttctctgacaaataaaatgatctaaactcacatcacagtaataaaaataccacaaccaatatcaaaacttaaatactacaggacctaaacctaacttatatctggattggatcgtaactgctgaaggcaatactactcaacacaacggtagaaaatgtgcattatcgttaaaatacctgctcatgatagtgtaacctataaagagatggggatttcagtgcattcgcgtttgggaggggaggaaccggaatatagatttggattttgcagtgaataaagatgtactaattatctgacggggaattaccatcgatccatccaatctgcaaggtgctctctactattgtgaccttctcgctcccgctgtcctgcacacacacgcaaataacaaagaaaaaaaatcagagaagggggattggagtcaaggaatggagataaaaaaaaaggaaggaccaggaagtctgggcctctccgttaaaattcaaagagttagggataggaatttaggagatcggggatggagaccttcaagtgtacgatgcaggcaaggaggcggtcttcgtggtgggacgggcgtagaggaggcggccgacagcgacagggttggcgcgacggagtcttggcggcatggacctcggtgactcatgtgtagggtatggcgacggggacggagatcctgaccagcgaaggagaacgtgcggagcggatgagggttgcagcgacggcggcgtcggcgtggatcgtgggtggctgggtgcggcggcggttgagggggagcggctgagaaagaggcgttggacgatcggcggaggcggcggtggcagaacggctgaggcgcgatgggagagaggggagcgatcccgcaaagagatgggagtgaggggaaattgcgaaatcacggatgaggagatcacgcgaggggagaggggggaggtgggagccacgggatggtgaggggatcgcgattggcgtgaggcagcgtagtggttggcgtggtggcagggcggcgtccgttttttgcgcggcggtgtggcggcggcggcgtcgtgcagtgtgcgagagagaagggagagggttgcgcgcaggttgggggcggcgaatcagagaggggctgcgcaatcacgcgattgatggagggtgattgatggaggtgggaggcggggatagatctataccgttcaattttacacagagatgatccggaccgttctatgaggaatgaaaaaaatgagtgatgaatgaatgagtgaaaccatttgttgaactatagggtagactatagggtagatacacagaacccataaatttatgcaccgaaaatgcagattgttttttttcgcaaaatctaaaccgagtgcgctctcgattttgtgttaaagagcgatgcactcattcgtgagagaaggtccagtgcttctagcacgtgagagaaggtcctgtgctgctagtacagctacgtgagaaaaggtacagttgttattagtgcacacaatgcatgcctattttttctttttatagaattttctctcaaattacttatccgatctacaatctgattacaccattacgttcgttgcaattaaatctttacaacaagatcttacatgattatattacgatgaaaaaatatttctatttataaattacttttattatatacgtaagttacttttatcatatatataagttacttttagatttgactaaattacttctatacattcataatgctctaagttgattatttttattattgtttttagttaattctttattttgtggactttataaatcttatctacactttacttgtgaatttactttacatagttttttatttcagctcactcacaatataattatttctactacagagagttactccccccgtttcataatgtaagtcattttagcattgcccatattaatatagatgttaatgaatctagatataattttaaattaaagttactttcttttcttttcgttataagttacttctataatatatgtaaattacttttaagctttactgaatttacttttatatgtctaaaaaaataacttagtgaaatctagaagtaatttagacatatcataaaagtaatttatggtttttcatcaaaatataatcatgtgagatcttgttgtaaagatttaattgttacaaacacaacagtgtaatcggattataaatcagatgagtaatttaagagaaacttctctaagaagaaaaaaatacatagatattgagtgtactagtagctttttttttttggaaagaagggtgtctctctttagtactatccagctagcactctcggtatagttgtgttcttcttcttcttcttctttttttcgtccaaggccacttgtgagttgtggctacctgcaagcacaaaccatctgtgggcaagtggagccgagaggacctgagagcaagtttaatagtatagctaactgctagctccaatttatttatagccaatgtaatagccaattcatataataactgcttactatactattaatacttgttcctacctatcatacacatattacgtcttagagtccgtgctacagctggctacagatctgtagcccgctgctcttctctctctttttttatctctttaaaatatgtttatagctgacttatcctgcaactgtacctgctctgacacgaccattccaaacatatcgaaatagcaaaacccttgtgtcgccttccctccccggcaaacccctcccgccgaccccctcgtctcgcaagtctcgcaatccacctaacctaacctagggtttggatttcctctcgcctccgccgctcccgaattccccaccgcgccaccgcctcggccccatcacctcgtcgccggccggcttcaacgccacgatccacctcccctgctcccggatcccccgccgtcacgcccggggtctctcctcctgattcggcaccacgatccacctccgggattgccgccgcgccacctcctccggctccatcagctcgtcacgaccggcgtctctccctcctgcttgcttcgacgacgccacgatccgcatccccatccgcgatcgccgcctcctggacccgggtcttcaccgcctctcgacttcgtctcccagtacgcatatgcagctgccatgccgactgctacaggtggggaagcgccggcttcggcgcaggagtgcacttccgtgggtttgggggctagattggtccgccttgatggcaacgccattaccacagtggccgaccttcagttgtccggtccaattccttctccacctccccaagacattgatacagccaccatcatctatggagaggatatcaggccgggtacctacctggttattcatgcaggagttgatatccttgacattgccagactcactttccttgaggaactaccggtggctgccaggaaagggtatcccacggaagcggaagaggagaaggacgccaaagctgtggcactggcaggcaggaaggggactcccactgaaatgggagaggaggagaaaggggtggtggcaacgccccatcaagagaaaaacatggagaaactggaagaaaagaataaagaagctgagaggttgggaatggaggaaagagaggaagaagaggggaacgaaagattgcgggaggaaaaaccatggcacaaccaactgtggggcgaaacagtgcgggaagaaaagaattggcacaatcaattgtggggtgaatcagttgaggaggaagaccattggcacaatcaattgtggggcaaaacagtgcgggaaggaaagcattggcacaatcaattgtggggcaaatcactgcaggaggaagagcattggcacagtcaattgcggggcaaatcactgcgggaggaagagcattggcacagtcaattgcggggctgatcactgcaggaggaagagcattggcacagtcaattgcggggcagatcactgcgggaggaagagcattggcacagtcaattgcggggcaaatcactgcgggaggaagagcattggcacagtcaattgcggggctgatcactgcaggaggaagagcattggcacagtcaattgcggggcagatcactgcgggaggaagagcattggcacagtcaattgcggggcaaatcactgcgggaggaagagcattggcacaatcaattgtggggtgaaagattgccaaagaaaaaacattgccaccaccaattgtctttgagactgtggcctggattttctcgtgcggttcttgttttacactgttaagtttaccccctataagtttttcttaaggaaagctgtagaagtttctgccgttaatatattaggaagaagatagcaaagggaccaggcagttagaaaaacaattaagttcttgtttcttgtctgagaagatactgcaatacatgtaggtgtgtgtaggagttggatgtaggtctttcttctttgggtgcttttgctttgaggtgaaaggacttaagagttttcatctgtatgcttaatccaggttatcctagaacgttgcccaattgttatcttattgaggacggttagtgtccaaacacttttgattttttttaaagaactgctgaatcttcttcttcagttgttaagaacttacgactatcttcctgggctgcatcaagttggaaaatgatctcatcatgactgttgccaactgtaaacgaatgttgcccacattgtctgttccatcttatcagatcttttgccagctgacctaactttagatgcagctttaggtagggattgcatgttacgactggtttttcccaagatctcttcacatcatataaaacatgtgcccacctcttacattacttcccaccaagagaagtggggaatggtctgaacaatttgtcgagaaggtgtgccatggacgctgttgagaacattaaatcccattcagttgaacagactgctctatcattttttttttgtctgagttgtgttgttagtttcgtttgtccaagttaagcgacgcccattaagtggaaattcctttatgtgtaatcatgcccttaaaatggttatcattcccaaattcaagcgattgttatttttgtctgtggccctcctgtaagttttactcctgtgcaatttatctcataatagtaacttgcttttccttcgtaggccaaggttcatggaaagcaacaaaatcatatagcttacagtggctgagatatgacaacaaagaagcacttttcggattcataaataaggaacaaaacagaaatatcaaagatgctgagattttgttaagcaccatggtaacagtcatcttttatacttgtcattgtagggaaaaattccatttgattctcgcaaactattttgtgtcgcttaaaatgaacatttcttcattattctttattgtcttataacatttaattctgttgcagaccttcaatcactggaaaacaggtttgatgtgcaagctagaatttgaaggacacctggtacataaataacaactttctgatataagatgtttgataccttttctgttatttatcgcatttcatcttactctatagcccaatctctgtgacagtatgggtatgggattaaatcccagcatggataacttcaaaatcaataaactgttaggtaagaaacctatatatatttgcatgcattaaagtgttgcaatgacaatcaatcttgtcaatgaaatctttaacaggtaaaggtcgatatggggaagtgtatgaatgcacttattctaatggtcaatatgcagtaaaaacgattgatgtaaccaattattttgaccacactgaaccaaggtttgtgagtgttatccttctctaaggtttatattcttaaatatgccattttctaagttgtaaatttctttatttcagagaagtcagcattatgtcttgccttcaagacgcaaacattgttaccttttaccaggtactcttaagtccctaacaaaaaggtctttacacttctaactgcaactgttaattatgtttctgaatttgaatttattaggcgtggtgtgaaaacaagaaagaggaaaacaaatttcatggttttggtgtacatgagccgaaatatatttatattcatatggaggcctgtgccaggtacaaacacattttctgtatgcttgttatcaattacacttcccttcaggccacatgagaaactacaggcagctaaaaaaaatccttttaaaacaagccgattctcttgttgtggttgacatgattatatctatagaataatgttaaggatgcttccagaaacatgcaaaactgtagaaacgaatttgagaagtagcgaattggttgaagcattataattcaataggagcttgtattgaataagagtcgatatattcttggaataagaggccactacgccattgcactgtcccaagcgattagaatgacggctgttaatcaacttttacagcttatagacttctcctgaaattttatatatcacatgcaggaccctttatgattttctgtgtggaaataatgaaggaacaattcaggacaggtggtctctttttgagagaatcgtaaaaggtgtaagatgcatccatgctactgggataatccaccgtgacctcaagccatggaatattttccttggaccttgtggcgctgttagaattggtgatttaggacatggttgctggtctaaatcttactgtgatggtcgacgtggttcacctgattgtggaaccatgttgtattcggcaccagagctcaggaatgggctgttggttactgataaggtattccttatcacagtttcacttttcaaacgttttcaactatcagttaatagtttcacatataatttattcttgctgttatcgtaggttgatgtgtacagtttaggagtgatatatcttgagatcttcatgcctgctgctgttagtgttaacaacagagttgatgcattgatcgatttgatggaaagacgatacaaaccagaatggacagcttggtccatcgatatggaattcttgaaggacctaactgctttaaacccatgtgaccgtccatctgtgggtacaattttggtacgtacttacgactagcaataaacattaaactgcttgcatatagcattaatttgatcattttttctgtttttatttttattacaggaatatatcgccgaacacgcaagtgactgttgagtgctaatgtcagatgtgcaaagatgatgataatatcgttagtacgttgttccaaagaataatcagaccaagcatttagtacttagtattttgcatcagcagacgtattattgattgtatgatcaatcattgtagctatgtagtacctagctttggtactcgatgtagatttccattgagatgaactctcataatctgaactagaaatttctgtcaatcctcaatgtgtattgtcctatgatgaactctcacatcagaaatactctctctgttgtcccaaattagatgttttaactttttacttgcaatgtttgatcattcgtcttatttaaaatatagtgtaaaaataaaagaatgataagtcgtagcagtgatacacccgcagcgctcgaaatagtaagtcaagcgccacacgccgatctcccttttttttcccttttttctcaacctccctcccttcgatttttcctcccactctgtttcctgattttccgtttctctcaacctctcccttctgaattttcctctcactccgtccgatcaaaataaatagagtaggtctggctcgtaacagcgagagtaacaaaattactgcttacgagaaaacaccgagagtaataaaaatagaatcatgctatacgtacgacccatccatccaaccagcttacgacccaaacggtgtagcaacacattgcgagacggtgtgaggattcgtgctgcatgctgctgacggcgcgtacatcgacgttgtagtcgtctgacagagtcggatgtgtgggtcgtgtgtgtagcattttccataaaaatactaatctcggtttctctgttccacacatccctcctattccttcctggttgtaatataagataagtgagaccatgtaaatgaataaatgattttggttttcgcacatccctctcgttccttgccggtcctaataccaatcctattttactataaagttataacccactaactcctaaagcttaacatataaagatgtcacatcatcatcatccactgacaatcaatacatttaatatcatgcaaacatgttatattatctataatttaaaatttattacattttagagcttttaaaataaaaagcatgttaaatcatcatcccgcataattcacataatattttaatattgttgatataaaaacacgaggcctgagagatctgcttaactccagtgcaggtcaaaaacttgcctttgggtgtgtgagcatgccagttgatttgatcctgcaattaacaagaaataaagacaaagaaaccatgattaaatccataaacgatagccaatcggctaggtgccgatgacatataatttatttttgagccgatgtcatatatgcatcgatcggcagtcattaataagtaagaaagaactaaatctactcgatcggctgtagatattagcaatatataatccttatgttgatatatacttaaatcaagtgattgagatagatcagtcgccatgccgagacagtataaatcacttagatcgaaataaatattaacatcgagaatatatatgttcatagcatagccgatcagatagatctagcatgaatcggctaatactccgataccactctatattaaaatattaaagcaaatagaatataccaaacagaagcctaatatacttaaatgcaacaagatcttaacataaagggcagatttaacatgtcaactaagcacataagataaatatcgtcaaagggcagatttaacatgtcaactaagcacataagataaatatcatcaaatcaggtaggatcggctgaaaccctgatgctaccctaatcggcaaccaaaggcaggctagagattgagattctaatcacgactcataagatcaaactcaactgatgcagctataagtatgaaaagaaggacaatatctagataatcaaaccgttggatgtgtcatagagtggtggatatcctatataatctaagtcaacatcggtatttaacctaatcggctgccttctactgacagatgttagccgattataggttagatagcgatattgccgaagattatataagatatatgataactcgacgaattaaataaataagattagagtgtcatgaagatggaagcactaatcccgagaacacaagccgccataacaagttttacctcttgttgaagatcagaacagatgcagctcaacccgaaagcaagaactcgtcgagacaaaacgaaagtaaaaaagggtggtgatgcgccgagattgtattgaacgtgtgttagtttgattatatggggctcggggtctatttatacccaagattacaaaatatgtccatatcggacacgactcttatctctaacaaactctaagataccataagtctttgcggcagacttttgtccaagcaaatctctaaggaaattacataaaatatcctaattaaaagatataattgccttctcaggactctatatccatgcgtggcaatcctcatgaagcacatcaacccaacccgaccacgtacgccttgtcatattgtcggattcggcttagtcgattaaccctgtccaactcaaactctatcgatcctggtcgcagccgattcggactccagctgatctttactctgtttccgggacgatctccatctcgaactccgtcccgattccttcttcatctccgatccttggattaccaaatttggtcgttaacaaatatatatatcttcattattgtttataatatcttatgtacctatgtaagttcatcatcacttggttaatgttatttctctcttatctaattaagccatatcgatatcgcatcaattgattttagtgcttatgtaaatttatgttgtttagctatcttacacattatttttacttattgttatcatactgaagtctcgcagcaacacgtggagtttgacctggttactaaaatgattattaccagcctctcccatgttgatactacctaggcgtaaccgcctaagtaaaaaaaataatatacaaggtaaaaaatataaacactttagacggtgcccacagtttaaaaacattaccagccccgttgataaaaaagggatttgctataccacagcttgctggtccatttatccattgaacccattcacaagtatactccaatggatccaaaattctaaaggggctaaatggttcgaaccctagaaaactgagaacatactaatcgatccagactcctctcgttgctagacaccaaaaatcaatggcctataacaatctcaagatatcgtctccattaagcattctcacggactgcgagatccatcatgtatttataaacattcattttgatgaaatcatgattaatagggtttcctatttccgtgtgtacattgttttgttttcatcaaatacatggttttgatcttcagtatatttaacatcatttatattgtatgatcacagcctccgttatgtccttacgttagacgccactgacttttcggtatatgtttgcgtattcttcttgtaaaaaaatatatataaccattatttaatttttatgatttattttatgtaagtatagcttaaattttaaataaaccaatgttcaaacatacgcagaaaaaatcaacggcattaaaaaaaaagaaaaaactgaaggtaggacaaatttttttctaccgttgcaaacgcattggcgctaactggtagaagggaaaatcgctccaacagttcatctacaagcaccagaagtttgcggccagtacattttgagttcccacaagagaatgcatttgcaaacctataaaaattccagccattagagtacatcctgccatcacaaaagcaatcaccagcaatctcccaccacaaaacaaatctgacatcactgccacaacaaatacaatcagaaacagatttgtacaccgccatcaacacatgaatatcgatctcaatgttccgaatcttgaagtagggtaccataaaaatgatcgatacaagcttaaaactgatagtgagtacctaactataatgtccatagacatgcttctaaacagataacaatcttgttttctaattattgcaaattctgagtgatccaaacctcagatggaaataacccgtagatctgttctttaacatcacaaaagggaactgcacgctcgaattttcctgtttccaggtcgtacgtccttacacctccccaaacacgtagtccaagaagccaatcgaatgcatgtattatcacgggagaagagaaatatatacagtgaggtcgtatcccgggcaaattctgggtgggtaagcatgcggagtgattcaatccaaggaatagtgcatgatccatcaaaacattctcctgcaccacccccttgcatccatccggatcaactttgcagatttggaatgctataccatctgggtagtgatgcgcgagaatcgcacgaacttgcaggagatcaccccatggcgtcgacactagatgccgagtgaggattaatcctaatcctccgtagggccttgcggcataaaaaacctcccttgttggtccattgctcgctccatcaagatcccacttctccaccatcccgtgcaatgtcacggcgtggaacctccctttgtggtacgcgcagtcgagatatctgtctcccccacttagagttgaagccacctgccacttgctctgtcctgccttgacgaaagaaagccactcgccgttgttgtggatgatcatcacgacgtagtcaccgcctctggatggactgcaagacagcactgccttttggtagaaccatatccctaaccgatatgcttcaaacctgctgtttgtttccaaaaggtagtgttccaagttcccttcttcgctgccatagaccgcctccacgcaagcgaaatcggtgatcggtgggagggggatcatggccagtgtgacagggttgtgaagcacgagattggagagatcattcgccaaaaccagccagccgtgagaggccccgtagcacgcaacaaaggagccctttggaaaactgacactatagatcttgtcgactgcatcatcagggtggtagaggttgcaggtcaccgccgagcggcgcctttcgtccagccttttatcaacgtggttaccccaagacatgatccatggagtgcgagaacgtgggacaccggcagccgtggcggcggaactccatgtagtgcagactgcggcgaaggcaagtgcatgaggaagctccagtcgttccaggatgattaggaggagatcaatagaggtcggaccagctggggcttgcacaaggtcctgctgcagcaaacatttgcatattgtgaattatattcaatacaaataagataatctacatgcgaactgtatttgttactagttcatatataagaacgaacaaatcaaattcatccatagttcggacaaggaatcccttctggtaagcagggtctcccaaattggaaagggacatcggatccaattcggacacgaagaacacaacgattttgcacaaagattggggcagtcagaattagaatcagactaccagtcttctggaaaacgatccgcatcacacaactcatgatttggacggattaaacgcctaaagatagcagtttttttttctacccgtgagattgtacaaaatttgttgcattcttgagaaggtacatgcgaaatttacgaaacaaaattgcttttttttagaagctatatgtgagattttagggggaaaaattgcatctttatcacagaaaggagacaacaaacactcattttggaaggattgagaaatccgatatagtcgctgtgtatcgtagtgtgatttgattgcaaggttaaataaaagcaggcttattattactcacccaagggcgacatggcagggagaaatcggatccgtttggagggattcctccaattattttactgaatgaatcggatccagtcaccgggaatccacgttggcccaagaggggagggcgacgagctcacccttggcctgaagatgcgccggatctggccggtggatccccgtccaagcagaggggatgaagggggaagcacggccaccgatgaagttgatgccgacctcgtctagactagacctcgccgcgaagcttgtggaggtcgatctgcccacggatgaagtcgccgccgacgatacacctctcggacgggtcgtggctcgttcaatttggagctaggacgagattaggggtctgtttggttactacctgaacctgaagcagtatttatttaggtctcaactaacgcataataagcctgaaacttttgctactttgtttggttcaagcctgagaaggcgctggacgcagggcaagtcgactcaggctcaggcgtagtctgtatcgaatatatatatatatatatatatatatatatatatatatatatatatatatatatatgtatagtcggttacaatttataatttagagttgtaataggtattagaactagagtatgagtcaaacttgtcacctagcaactatggcatccctgttggattcgagacacgtggccacgcacaaatcttggaacaacttcatcttctaccttcccttcctctaatcacccggcaaagaatcaggtttcgaacgcttctcctaattaccccgcatggaaccgctcatccatctcttcttcttatctaattaatgatctaatccaccggcacaaaatcgagggaacgcgttgctctcgtcctacaactacaacacaggcgatactagtagtccatcgccgcagatcatgaacctgttacctgtccagccggcctcattcatcaaaaacagattgtttctccattacttccaatgaactacgaaaatacatgtgaccaaaacgctaggtaattagtttaatcacccgaacttaatatactattcaaagctagtcatttaatctccgattaatcaagtaacggtgtaaatatgaactctattgttgatctgcaaaagaaagttctgataattcacttcgtatatgtgtaaggtgatttaatttggtgcaaatgaaagttctgataattcttcgtgcaagaagagacaaggtataactcacttcatcgttgtatggtagattaatagatttcacggtaggggatgaagatgaagatgagatggtttcgagattcgtatagccacgtgtcttaaatccaacaggggtgccatagttgctaggtggcacccggtgccatataactttttttcccagacgctatcctaggatctctcataaatagatagacgtgtctattgtaactgtatggcgacttagcatagcgagagggagtggctgccggcggcgactgaccatgagtcgttgtaactctgatatgctgtaatatgctggatcgaggaggagcgcccgtaatcagtgccccggagatgtaggctacaggtgaactccgttaccaaatatcgtgcctcggtgtcgtcatcgtgtttggatctcctatggcgttttcttccgcggtttggtttccgatgtgatttcggggctggttttataacacagatttggtggcctctcactcaagcagctatgttaaaaaaaattgattacgttgggttatgatattctgactattcccttcctccagagaaaacctaatctagctaggaatgaaacactattctcactacttaaaaaatacgtagtggtgatggtgaagccagcgcagacacgcgatccaacatagaaacgtacatcaacacgttcagagcgaaaaaatagtgcacactcctcctccgaaacgaaaaaaaaaataatccgacccacgccccgtgcagccctcaaccgccgacacgggagcaggaggtcgacgcgtgatagactccaaggggacgccacggcattctccctctcccgcgtggtccttctcatcaccgctgaggtgctgcctcctcgccgccatcgctgcgacccgcgccgccctcgaccgccgacgcgggagcaggaggtcacgccgcgccatcaccgccgaggcgccgcctccttgctgccatcgttgcgacccgcgccgccctcgaccgccgacatgggagcaggagtcacgctgtggccttctccctctcccacgtggtccttcccatcatcgccaaggcgctgtagtcgctgccacgggaccaaggaggtctccgcgcgacggactccggggacaccgcggccttctccctctcccgcgcagtccttcccgtcaccgccgaatcaccgcctccacgccgctcgtacactgatctcgatctccgccatccaggccgccaccacctccaccggtcacgattgccacggaggtcgatccgtcgcctccgcctccgcctccctcctcgacgccaccgtctccctctataggtacaggtcccctcctgcctcaccccaaccctcccccttcttactctaccctatctattggcttcaccatcaccctatctgttgatgcaattttcgattggatgatattgaatatgccccatgatttcttagctgctgggctgtactcctgctcactaactcagctgagtatttcttcgcagttataatggcattgctcactatatggtttgtcatgtcatgctactgcacaagtagctttaactataagtgggcatagggcctcatacatcaggaaaagagcaactttcatatacaaacaaatggaatcatttttttttgccccatcaggaaatggaaaacacaagttgctttgatttgtgattgttcaatgactatgattctgaacgtttaatcaaatggtacgttttatttttcctaaagggtttcagtaatccatattattatccatttactgtcagtgccactaatcatggttgctgctctttcaaatatgacgttgtgcagcatggaaataaaaatggtttctctttcatgttaaaataagctatgaaccatcctgatattaaattgtcaatggctattatgcatatgttcaatagtgactggatcagttatctgatctacatcagtgatataattaaaatcaaattatttatgtgcatgtgtgacaaaaagaagttattatctgcatttgtttctcaaatttagatagcaggcctaatcttttatcgagctaggagaaaccctgagttccctggttaggaacaacctggagctatggatgatgaatcatgaataaagagtttttcagtgttatgttgtagcggccagaatggaaaatgcctgaccatagctctgaagatgagtacatcttttgcaaatcttgatctgtgcacctcttcagctgactgtcagcatgaaaaaaatatgattatgatcaggctttttgcaagtcttggatttgtgcacctttttagggatggatagcaatatgccaatatgattgccgtagcttgaggctttgaggtagatgaagagttaactagtttcagtgcttcttcctaacttttttttttctaaatagtttgcgcaaaagtgactcatgcaccatctgtggtgaataggtcggtgccctagtatctccttcttgatggaattcaatatgccagtgtgcctattagatattatgcacacttctctattcagcccaatcagacgttgtctcactatgtcaatgaaccactcctagttggacgtgttctcactctctaccagggcaaacgccaaaagaacaaggtgtaaccatgtatcaatccctattactgtgagcaatgtgcctctgaatttaccggtcaagaaggtcccatcaattgctaacactggcctcaaatgcttgaatgcctccactgactgccaaaatatccatgaagcacgaccaaatacatgcctagggactccatccaccattcttgatttctccccttgaggttgatgagaacacaactagttcggatataaccatgacttccatttgtattaatcaaccaaaggtgcatatgttctatattagatttacttattatatatttaaacaaacgttgctacataatgagtttggtgtgttttcgtttgcagatgtacttgcttgggcgaaagaaaagagaccgagcgcaaggaatgcatggatgattaaagaagttgattggggaccaaaccaagaccttcttcaagtccacttctacctcaccacgtcatgtttggtccatagaagacaagaaataaagttctacatgttttggattcggattcgggcctcctgatagcatcaacttcaaaccgatctagtggcgaaactgttctgtcattcaacaaggaaatgcatacttgggttcttacttttgatagcattcggtagcataggcaagcgaaggtatgcctcgtcccaatctccccatatgaccttcatagcaactcgcttagcatgccaagctttgtcgtacgtaggccaatagtgccatatgtgctcaactgcctctacaatagctacaggagacaatgtaggttcagcactaacaaatgtctgtaatctattacctataaacctcgaagttagctgcaaatgtttgccagatgcttccgcattagagcatgtgtggtgtttgcctacactagttatcctccacctatcacccgccctctttcttgtacgaatctgccattcacaataacaatcaaggcatgccaccatgtacttaacagatgcattgaactcgttaccatggaatgggcggtgcacccagatagagtagctctgcaaccatatttttagctcatccatggatcgaaactccaatcccttcctcggttcctcccccattgcatcgaaggctctatcgtattgtggatcaccgtctgcaacagcaagcctgccattgctaaggccctcgaattgagttatttttggatttcaaccaatgattttctcaaacacggtcctctcctcctccgacatcctgctgtcacatcctgattttcatcttaggatttataaattatttaataaattattattagaatttatatgaaatgttcattaatttacaagtgaagctaaatgtgggaaataaaatttcctaaacataaagcatggctggatttaattttattaaattatccatggttaattatactctctgaaattttctcggatttttcggagctcaattcttaattttaataatacaaagagcagttcagcaattatttaaataataaattaatcattaaatggtctgattataaccttgttaagtactttgagtgtccaattattttcaggattgttcttgaaattatttgagaattggaagtatttttaacaattcaaagatcatttcagtgattaatttaattggaaaagtaaattgaatcctcttttccttttcgggccgaaacaggaaatgtcctctctccttctcggcccattctcccttcctttcagctggctttattcctcctctgaagtccatttcttgtccctccaatcgggctggagaaaaagaagcccagtcaagtctaattcgcttccctgctacagtgtcgtcttcaagcttggacagagcccgtttggagggttatgtccaagtttgaagatgaatttgtaggtgaaacttttataaatgtgttcttggtgacttaaaagccaatgttgaaaaagaaactatattgaaaatatctcaaaagcaatctcaaaattaagcttgaaaattcaaattttgactttttctttaactgattaggccatccgatgggagcctgaatttgtaaccacgcacagaattcgacgcgaatttggattcgttttcgagtttatctcttcaccaaaccctaggttttcccggcgcgattcctcgcgttctaagcccgatctctctctcccatggctataaatagagtcccctccctctcctctttcggccgccacctctccctctctctgccgtcgcttgtagcgccgtcgccacgttcgtcttctctgtccaccgccggcagccgctccagctgcccctagcagccgcctcggccatcgacgacctgcgccatcgcctctctcggccctgcaaggtcaagctccaccccgtccaccccttacccgaggccgaatcccgccggaagcttgccgtcaccatgaaccagtgggttgttgccacggtttggtctccagccgcgtcgttcgtcatcgtccgtcgtcgccttcggtcactgtcacttcctttggattcgcagctgtgaggagaagcccatccatccctctgttgccgccgaagatcaccggaacatcgctgtcgttgtcgatcagtaccttgccgccctttggaactcgtcaccggccatctcctttgctgtccgtcgtcgtgtaagtgttggtaaggatcgtcgcgttctcctcttcctccctgtgctcatggtttccgctgtcgtgctgccgtccaccggtgtaggtttttccctagggtcttaatccaatctaacctaatccgttgtttgtctagtgttgttgtcgtctctgtgtgttgccgctggatcgtcatcgttgtctctccctctccgatcgttttggttcggtgagacttctatccgtgttccctcggttaggttttaatctctagtttgtgttgtcgagtagccgccgtcgtgtcgcgcttagctgctgccctagcgtcaccgctgcgctagtcgcctagccgccgttgtgctgctctctgctatagccatgctgatgctgctgtgcgaggccgcttgccggatcaatccaagccatccggtcttggtcgacccggtcaaggttaatctcagccatccaaaatcaatataaatcttgttatcccttttcaatggcatattagttctttttactgtatatcgtctactaaattcgttccaataatttccggaggatgttttagtcttatatctcagtcataaattatttataaattgtttaattaaattggaatagtcttttctttaatagtctttaattggaattaatcttgtaaaacataactaattcatatgaagttggaattaagtggttcaagtctctaaattcatctaaaatcttgatctacatatttgtttatttttatgtactatttatttggtttttattagtctttttattcgttttgcgtgttagcttgtcgtttctgtcgttgcgaagatttgtgaatgcgtcggaagtgttcaaaaagattaattgaagaccgattattgcaaggcaagtcacacagatcccaaacacaatcctttgagcatgttgatcctatatttaaattctctatttatttcaactgtgcatttattttcgaatgtcaccgggtcgtgtgaacctattcctttgtttatggccaatttgcattgattaccctattccttgataccttgggtaataaattgattagcttgaaccttatatattggtttggttcagctaaatgccatatatatataattgcttagccatgcttagaaacattagttcattaatgggatgaatcatactacattattatttatgattatgtttaatggtagctcacgatggttaatcgtattatgataattaattgataattaaaaattgacaatggtgggttgtgagcacatggttttgaaggccgtgctcatgacaattaaggatcggttcacgagctactgttgtgagacattaaccgtgccaaccacaagccagcgtgggcaacggctttaccttttgtataacatggttcattacggggcaccagactgagaagcggtgagaagtccgtgggggtcgctggggagtccatgcctcttgttatatttatagagggggtgattatgatccaggattgatgcactgtggtgagttgtgttgtgtgaggggtactgtcacagttcctttccgaggtaccgtggtggtattgaggtgcatggtgacatgtcgtggagctgtatcttgtgggtatagtggtacacctctggccagagtaaaactattcgaatagctgtgcccgcggtcatgggcgggttgagcagtgtttttcgtgattagtctcacacctctcacaataattatggatgctataactggtaataatttgcttagctcctggtttggagttagatctgtacagccgggtatggttgttcagtatggttgggcctgagcagcatgggtgtgctgttcagtgttgattaaaattgatgattaaattactctattgttttactgttcttaaatgtttgctatatgctgcttttgcaaatgagcctatattatgccatcctttggtatccttgtgcacttgcatatttgctgtgtggcttgttgagtatgttatatactcaccttgcaataatcaatcaacctcaattgaagaaaaaggatccagaaggagaagaagttgcttataccccagttgagctgcctgtgggagtggagctgaagccatcgctagaccgttaattccgctgctgttttttttttcttttgtagtatgtaacgatgttattatgatggatttgtatattaaattgtcagtttgtgtacctcggctgattcctggacgaggattttatgcacaaattagttcggaaattattagtgaatttccgggcgtgacacctgcccattagatgatcgtcatcagaaagaatcagatgcagactcatccacttcattgtccaaatcagcatacaacaaattcgagtttaatccattaaatatcatgttttcctcacactcctcgcgagtgtaaatttcttcatcaagcaagtctctgatgaataaaatcaaccgcctctcgtcaagttcaactgtattctcattatctgattgattcacatccataccatcatctgacatttcctgctctacctccccatcctccacatcccggtgcctctcctcacctatatccacatcctcctcaacttgtttttcatcccctacctgcacatctccctcaattaattcttccttccaatccaccacgaacacatctttatgtatttcgtcccctacctccacatctttctcaattaattcttccttccgattcaccacaaacacatcattctttaattcatgacaatacatgggggattctatgtgcggactttcattgaggtctaaaaattctttcgtcgattccctacgctctttcttccaagcaaacacctcaagcgatttgaactgtaaacccaagactatatctacatatgtttcccattccacctcaccattcaaatttaacatgaacatatgcgacattgcaccagcacctatatcatatatccccttgcataccaacagactcatcactccaatccaatttatccttcgtacgtgaaattaactcatcaaatatgagtttggcacgaaacactgactgcctgactaacatcccctcaaattggctaccatcggtactttcatctaccacactgccaccaaaatggagtcataccaatctatctatctacatcaaataaccgataaataagagtgcattattctactatgatacgtcgctataaagatagaaacttgacatgggtaccccagacctaatgaaaagatttttgaatttcgaacgactaaccaccagtctcgatgttcctaggatctatgccaatcaacatcaacattaatcaatatgaatccccaaaatatttacaatacaacggctctacacatccatctcaacttcaccattagcaaaatagtgcataacttacaaaaaaaaactatatgaatcctctatactaacatcaatatacaactataacgtcgcatcgttagccacattcactaatccacaccacaacccgagcaacatttaacaacccatgatttcaaccaaaatactctataaaaatgagggaaacattgaggaaattaggcttttggaggggatttaccttgcaaaccaatatccaaagcaatgctcactaaataaccttcgatttgaggtggatttgagaggatttttggaggggaggaaagagggagttgcgcctgcggaagaaccctagccgagtgcggggaaaagaggaccagtgacgggccggggcggctcagccacgaggtaaaggctgctacctcagcgccaacatgcctggcgctgaggttagccgcatcagcgccaaggcggttggtgctgaggtccctgccacgtcgacgtgggggaaaggctgggccgccacgctggcagggctcaatgccgatgcggctggcactggtatggccaaccacagcaccaagcaccctggcgctgagccccggcctatttttggatgaagttttttcgcgggcgagtttcgaaataagtttttcaaaagggccaatttgtcaaaaaaaaaaagacgggctggtgttatagtatagtatgtatagtaccataaaaatcaaaacatatggagtaacacgatttgtactcatacccatctacccaacaggtatgaatttttatctattaacagatccgtgggtaaaaaaattagaccgtagagtaaaacaatttcggctcatgggttattggaccctgttgccttttctaaacacgaggaatggaagatgtgatcgaacagaaagcgcttgaagacagccagttttttgctacacttggatggtaaaggcacattaggcatctataaacagcagggtaagccagtggatttgaagttcaaacccatagtttaagggaggctttatgctaacttccacggaaggaaagaagcaaacaagggcatatggcccatgcacggcaaacccaaaactgaaaactcacacgacacactatatcagaactctcatgtgatgctatgtatatatatatagaattatagctagacatctccgagagaaaaaaaaaaactagcaaaccattgtgacagtctcaattttgcatttttgctatactgcttgcagatccatggggcgttgggttaggcctgaggtcagtatacagtctcctcttaatatattattctgcacgattattttgttgagatattgtactagtcaagagaggattcatcattttccccaaaattggttatccacttggcttttgtcccaacttggataattttggtagatctaatccacaatagatcgatgaactacttaacttagggtctgtttggtacagctcccactctgagactctaatctcttgaagctagagttgtatcaaatactttcgagaacttgaataataaagaatggagcttttatgccgtttctgaaaattaattatactatgagggtgaagcgacatttctaccgctcctcaattccgctccacccttggagtaacagctgtgccaaacgggcttagttttgctccactctatgtatttacaagaaaaaaacccaattttgcacgcgccaatctcctgccacacccgtctactcttaccaaggttgacaatttttacacaaactgatcgaaaccacgaacttttgaggtttcgacatgggatgaaagcatatcccgaatgaaatttcaaatggttttcaaggattcaattttggaacggcaaattcaaccaaaatttgatcgaaatgtggtgaaattggatcattagtggtcagtatctggcgctcaattggaaatgtgaacccggactattactcatgctcatgaatttgttctttgtattcccgcaactcagtcctgctacaccagctctgcccacctagctagttcccttgtaatggcatcctgccgcataagattgaaagtggcttactcgtgaaacccactaattttctgatgtaaaacttactaatagatgacaaaaagctacgaaactgtttattttgatcaaccagtgggttcgtgggttagccacttaaacccctaccctcgcatagtaagagagtgaatagtgatagcgcatgcatttggtggcttgtttactgttagacctgaaatagaccgctcagatcaaagcacattacagtaatcaatagagtaaattttcccgacaggtaaatcaggcagtggatcgcagctgcattaaactgccattaattgtttcatgcgttgaatcaccgtagagcaatttcagtttactgttgcgggatgactccgtattacagcagaatgaactggatccgcatcggccatgagctgagtagcgtcagagatggataaagttgacagaattaaaggctaggatgtaactgcagaatagtccgtcgtctattcattggaagaatgggaggaggggaatattggtaggaaggatggaggatgggaaaaataatgggatagagggctggtaggtttgggccggggacaagagctaccacgactgcacgagcagctggttggtttgggctgcggcccatttccagcaagcggtagcagtagtttgtcgacaaaaactccttgtatacctcaaaattttctctaatcctttttatatcttcaagttttaatcatctctcttagggcttgcagcacagtacctacatttagttccatgtctacattttactttccgtggatgtagatttttttcattattatacgaaagacgcatacacgcatacaaacatatatcaccactcacttaaatactattaagatcgtaaccgtgtatacataatatataccactccctccgtttcaggttataagacgttttgacttttgttaaagtcaaactgctttaagtttgactaagttattatgaaaatatattcaattattaattttatgaaactaatttagtattataaatattactatatttgtttataaacttagtcaaacttgaaacagtttaacttt

SEQ ID NO: 9569 - DNA, 77143 bp, Oryza sativa
aagtaacttagtgaaatcttaaattacaatttagatatattacaaaagtaatttgtgatcttcatcaaaatataatcatgtgagatcttgttgtaaagatttaattgttacgaacacaacggtgtaatcggattgtaaatcagatgagtaatttaagagaaaattttatttgaagcatagatgatagaaatatttgttctatttgcttgatcaattattactatagtaaagtatgattcttcaagacatatctggacaacggctgattggatgataaggtcgctcattatgactaaatcgagagcgctctcgatttagattttacggatttttaaggtagagagttcatcgggatgttaagggagtattcttcttcggagattacaccattccatccctcaaacccttgaaaattggttcattttatcctgatccatcacatctctttagccaaacacatattaaaaaacaaatatgatacgcaagcattgtttccattttctttagttgtgcttctccattatcaattgccaaaatgagattctaaacccaacattatttatagatgtgcagtggctaagcttggctgcaggatcagatcgaaggggccaatagcccaataccaaatgctagcacgaagggaacacagtggttggaggaatgtcaaacataacttatcattgtaaaccagctagcattcttctatagtaccgtactattcattctgcgtaatctaatcatcgagataagggagggttaggctggcaccattttggtgagttacaatacattaaacctctgatcagagcttgacaacgttttccatccatcaaagatatcaaatttttcgtgcactcggatcagagaacgatcgaccgacaatataatcggccggtgaatcgatccggcccaagcagacagcaccactgtctgaactaactaaatgtctgcaatattgtagtacgtagtacttgcagagccggtgttgaccaactgatcaaactgttcgtgatatatcgtcgtgtacgtgcagatcgatcggtggtacagatgtgggcaattataattgagatcgaccacgctgatttccaacgattggtcgtgcgtctctactacgtacgtacgcgcaggtggttgacacatggatattaattaactatatgcacagattgctactaactgatataggagtacatagtaccagtatctcttaaatttctctccctctgtactctatatttcctgcttgttgtattggaactactgattcgtgcgcatgtgcggtgaacatataactcgcacacgccacaagtacataaacaatttttccaagatgactaaaacagattttcgcgtgcggacctgtgcctaggggtctatgaaaataaaaataataataaaaaagaataacaaaaatttcaaaaatccctcgaaaccataggtccgccgccacccggtcgccaccgtcaatcaaaaccctagcccactgcctccacctaggccatcgtcgttgaggtcatcatcatcgctttcgaggacttcgtcgttgcgggggagggcggccgccaccagaaccgtgcaggggagggccgttgccgccggatccgcatggggggaaggtggatgccgccggatacgtgcggtggatggccacctctgccctccctcgccgcccaagccctccaccaccgttgggagggaggagaggggagatgagtgggggagaagaagaggaaggccgggacacccgccatcgcccgtcaccgctggagcccgctgtcgggagggaagacggggatagccgtcgccgccatcacgtgcctcctccatcctccctcactgccgagccatccatcaccttcaggagggaggagaggggagatgaggagtgggagagaagaggaggaaggccaggacgcccgtcgtcaccgtcatcctcgcatcgccgtcacccttgcttgacgtcgcagccgctatcggagcctaccgtcgggagggaggagaggggaaagcaggtgtgcataggaggagtggggagaggaggtggggagatgtggagtagggagaggaggagcgggtggtgggagagagagagagagagacgggagaggagtaggtggtgggagagagggaggtggggagaattaaaaaataatggtaagaggagggagtatttttgcatgcgggtgacttatgaggcccgcatatgaaaatacccttattttcacaatgcagtccttctcaagaggtccgtttgcgtaaattgatttttgcatacggtcctcttaagcagtcgtatgaaaaatgcgggtagatttttgtagatacggacacttatggctcatctaaaatctattggggtgctcatctggaaaaatcatttgtgtagtagtgcgcggcgcacacaattgtccccattgggcttcatgccatgagaattcgattcatacatcaaagataagtcgtccgaatttttatgtaagaatcacaaactttcaatttaacaatatgaaaatttcatcttaaatcacaaaaactttcaaatcaagtctgaaaactttcatcctaagttaagcaaacctttctcctcaagtctaaaactcttatatcaagtctaacactttcataacaaaaatagaaaataatttcaattaaatatctaaatctttcatcctaaaatcacacaaactttcaatgcaaagtcttaaacattcttctaaaatccacaaaactttcggtttagacatagagtatttcatctaaatactcaaatccatcttcgtcttcaacctcagtttccacaacatcctggttgccaccgccagcatggctacttcgccgtcttcccaacctcaaccaccgttgtcgttgctgccatattgccaccttcccaacctcagctgccaccacagttgcgacatccccaaggactagggttgagaagctagggtgtcccactacatggtggaatgagcttagggttggcaatggggcgggacggggctaggtttggacaagaacgaccctacccccgcttcgttccaggcctagttattaaaaccggactggaccgatggtcggaccggaaaaaaccggaaccagagccacgaccggtccggtccaggtaaaagaccgacatgcaatcgaaccagcaatgaaccggttagaccacccggttttggagaaaaactgccattaaactggggaataaaaccgcttccaaccgggcttggcggctgctgtacgcgcgcatgggtgctgttggggggaaaacgagcgaaaatgtgcatgggcctagttattaagaccggaccggaccggaaataaccggaaccagagcctcgaccggtccggtccaggtaaaagaccaacatgcaatcgaagcggcgatgaaccggttagaccgcccggttttggagaaaaaccgccattaaaccagggaataaaaccgcttcaaaccgggcttggcggctgctgttggggggaaaatgagcgaaaatgtgcatgggtgggattcgaacccaggaccacatgggaggaagtaaacaccccaaccaccaaactatcatgttacttgtgtatagatagaatgcttaatatatttaagagttattgaaccggattaagccaacggttcaaccatttgaacctgtgaaccattgaaccaagagcctcaccggttcaattaccggtccagtcttaataactatggttccaggtaaaccctgttgtagccccggattgaagaatggagcgaaatttgtccccggcccggcccctctggggccctcactcatcctgggtcccacacactcagtgctagcggtagttgccggtggcagccagagggagaggagaatgcatggggcacctacaatcggaggaagagggagtagaacgacgcaaggagtagtggccggccggcgagatgggggagacgacatggagcagcatggagccgcgcacctgagcgcctgtgactgagagcggtgatgtgaatgcagcgtggagcctcgatgggcactagcagggtgtggtgaagctgatgagcgacgcggcgtgtgtccctcgttgcagcctcgcatgatttttttttcatatgagcgtcacactaatgcactatggtgagccgctgctgttgggaacgatacgttcgttgtggatttgttgagatgggttagggtttactttgtgttttaattttatcttctctaatgggttgcacaagatatacttgctaggctttttatggctactacgtatgggttgtttccgatgggctttagactgctagtggacaacattatttctagggttaatttgatccatgccattgcaaagttgtcatattgcaaaaataccattactattcgtgaaatcttctacatgccactgaaattttgtaaaattcgaaccgttcgattgtcgtcaacatttttgtcaacatctccgtcttagcgcaaaaaaaaatatccaaattgtcctttcttttcacatcctcattctctctcctttgttcttctccaactccggcgtgaatagcacgaagtggccggcagctacggcaggttctgaatgctatgaggggagtagtttaattcgggagcgttttctttcttaattcgcagctaatcttgcaagtggtcgcctggccttgtagagtgcagttgataagatggacgaaagaaataaaggcatggcctatgagctcagtttgccggctgagctagtcaaagcgattctttgttgttttcttttgcaccactaccactaccaacctgctactaatagagaacatcatcgcacgttagatctgactaaatagaggccaaggacatctcgccgttcgtcatcgctccggccactcccaccgccacaccagcacctaccctagctcccgcactacttctaaaggccctgccaatatgataggcatgggtgctgatgggcaggagtggtctggctcctctgtgaggacgaccctaagcctctgtcgaggcctagctcctcccaacttttctgccgatgccattggtggccatcacgactccacgaactggtagcaacgggaaggatagcaccgccgtctccttgcttctctacctatgccatcggtggacaccactagcaggtggggaaagaagagacttggacggggtgctcatagaaatcttgatggcaatggaacatttcaaattttataaaattttagtggcacatagaagatttcatgaatcataatggtattttttcaatagggcaaattcgaagtggcatggatcaaattaacccttgtttctatacttccgggcccctatgtatgaccagcgggtgaagaagctgactcggccctagccacgcacgaagtcggggccccgcccctactcacccgtgggtgaaaattctcccccactcttggtcccataggggcaggtcctcgccggatccccggccccaacagggcaaatgccacccctagatgagctaagggcggatgaaatagaaaggatgagggaaaatgccacccctagatgagctaagggcggataaaatagaaaggatgagggagaatgagagggatggagaccatggctgggcaccgactccaggcactagcagcgcaacaggaacgatgaccgcaacaaggtgtgaaggcgacgaggagtcgaatgagaggaagttgggaaagagcgagaactcgagaagacaacaatggttcggtcatcggtctccagggttgggccggtgtggccagaagtgtgtgcccatggtgcatatgcgtgaataagcattctagtgttgtgtttaccctcaaatttgtaccccgataaactctagtgtgcaccttctctttcttataatgatagctagcaaggacttgctaatggctttaccacactagggttatagggatggaacgggagggtggtagggttggtagagacgatgggtttagagaggtattgctaaggcctaagtagcagcaaggaaaggaaatgatggtaccatatccaagtcatatgctaaagaaagacaataggacaataccaagtgacgagagtaacttatgacaggcagcaatggcatatctagtgccaaaaccattggagatggaaaaggagataaaggaaaattaatacgataaaatcggcaatgatacgtagaaagaggaggaggagggggagggaagcgatagtcaggaggacaggagagggtaatgatgacaaaccgatgagaagcattggcaacaagaatggcttgaaaattccctatttactgtgtaacttttcccctcgcacttgtgtcacccccatgtgggccctagccgcctctagtgcccccaactcatccacctctggcctcgccaccaccagagcaagccgttagtaagttgcgtcgtgagctatgaaggaagtaggggggaaaaccctagaggcgtgggctagaatgtggtgcaatgcttggggggtatagatgaagctagtgcgacgtggcagatagggtggcacagatagaggttgtgcactggtggaggttgtggcaatgaggatctagccaatgcaactggtttgggacaccgggagagcgaacttggtgatggtcagatccactgtgtggcagtgcatggccaaggtgccatgatatgacgagagggtggcgatgatgcgggctagaggtatcgtaactgatgatggcacacagggaggtggcgatgactacgtgtagttggaccctcccagcatggtggtgcgactcaccccttcttgtcttggtgagattggctggcaagccattgtagcacgggagccaagaggcgcaagccttgacctaggaggtgggcgggcgggcgatggcatgggacaacacaataagaggcaacaacatcatggggtgatgatgaagcgattagtttgcctaaggcggcaacaacgtgggaagtgagtttggcgtagggtggcttgcaaatgtcaagccctacctaatggtcagttggcagcgtggcgttggcacgatggttccacgctaaaggtgctttgacatgagagggtagaaggtttatggcaaaagtctagcctattcgaggctaacaatggcgacacttatggacgttgtaactttggtgagggcatcacacctctggatacatatgaggggggggatcaggaagcacttggagatgctagaagatggaggccaaattcatatcaagttagagtcaacccgaaatccaggaccagcccacactaaatcattgcccagagctcatccgaactctttttttgacattttacatatgtattgaaagctaacgggactaccttcctaaagggtctggtctcacggcaaaaacatcttctaagtcaatgggaaatgttgaacaagagagcctccaaaatctatccgggtgttgcgccattgtctttaaacccattgggccatgtattgtgttggagtccatttgggacgcatccaggggtcatcggtcgatcctagaacatatttattcagtagccatcgtcgaactagggttgggttttgcttcgattattctgccatttgtgacattcatcttatatccgcaatatattcagatcgtatcttctactctcttgcttgtgttcccgatttgcttataggagataaccttatcggcgaggttaaccgtgtttcaactcaggtgatagccaatggaggagtggtgcagtaattgtgaggggttcgatctatatggtcggagccttgggatcatcaatgttgaggctccacaatcgacttatccaataccaataggaagatcgcgacctacttcttcatcaaaccctactaggacattgttgtgtaatctctctttctatttctggtggatctcttcaagtgaaaaccacgtcttagtttcaagacgaacgatggtggctttcttggtgttgtaacattcctgaatgcgtcatttcaaaagatccattccctttcaaacctctcaatgctggtgtctcttttggtgtcggtgagccactacaagatgaccatgttgatgggctggttagggggggagtggtttcatcttctcatgcaccctcttcctctccagcctaaagacgtggacggagttgggtgtttcaggtatcgggtttgtttttgctccttagcaacgtgtagtatctaatagtagaacattgtttccaactagagacaacctaaacgcaggctggtcgttggttgctggagaaatcggtgtgcatgcgcgctggaataaaggcggttggccaattggcaattagccagacctatacgtgcacaaatgttaatcaattctagtaccactaccagctagtatatgacataccaccatgcactatatattttcagagattcagataacaggcgcacgcggggtgtatgtatgtatttataattggcccctcttgccattgcaaaatgtatgcatatatatataattacgataatcaattaatatccatatcatgaccgtaaacaatgaaacttgggtcttgataagctgatgatctttaattaacattatcgacacaattagatgattgttagcacatcctaacttctgtaggtattgtgatcgacgacctaacaactcttcttcacgccctgcacgtcttagacacagcagtgttaaggagaagttgagttaattaatttattagtcagtgttttagcataatttaaatgtttctagcataactaattgtctaatttgcgcgcgcacttgcatataagtgtgcgcctaccggcgctaaaaagccagagatcactccagccactaccttcttctgctagcttcttctcaattccttcaattcttactttagctatagctagctagctgggacaatggccgggaggaggctaccggcgttctgccgcggcggccggacggtggcggtggccgcggcgacgacgacgacgagggtgaggaagcgcgtgcagcgggtggcggccgcctaccacgctgcctccaagctgccgccgccaccggcggtggcgacgaaggcgagcttgggcggcggttgcgctgacgcgccatgcgcgggagggtggtgccactcgtacggcgacggcgccgccgccgccgccgtcgctggcgccggcggcggtggcggtggcggcaagaaggacggtggcgggaggcgggtgatggtggtggcggacgggcgcgcggaggcggccggcgcgctgcagtgggcgctgtcgcaggccgtcaggcgcaacgacgcagtcctcctgctcgccgtcgtcaggccggcggcgaacgcgtcgtcagacggcggcggcggcggcggcgagtcgtcctgcgtgaacatatcgaggacgaggtgctaccagcagctggacgccatgaggagcatgtgtgaatcagccagaccagaggtaattaattaacaaacacatcaacttcttagttaacttgtgtaatttaaatctccttgggttcattcgtgctatgcttaaatgatttgactgttcaattagaccccctttttaaaatgccagaatacattttctacagtaagttgtcctctaaaaatatgttacagcaaagtttgagaggttgagtatactcctatttgacaagaaacagtgatcccaacatgtaattagaagtcaaagatgcaattaaatcgtctctccagttcagccacgtgttgattggacggcttacgttgcggccataagtagttcagtcgattatctactaaccattagcattacaataaaagttttttaaaaaaaataaaaagaaaacaaagctttatagccttataggcagtgatccacttagcacatttcgcggaatggaggcgtcaaaagctattctagctaagcatgcagcctccggatccggatatttgcttcatcgtcctccatccctttcaaagcaaagaatattctaaacttaatttttttcagagtttcaattcaataaaataatattcagaatttcaaaaggacttatatatttttcataatttttgtacacttcaaattttactagaaatataagaaattctactagtatttgctaattaagtggcgttgtgcatgtgtgtaggtgaaggtgaaggtgtgcgtgatggaggcggccggccgggagcgcgcgccggcggtggtggaggcggcgaggcgccacggcgcgtcgctgctcgtgctgggccagcggcggcggcggcgggcggcggtcgcgcggtggctgcagctggcgctctggccggcggtggcggcggcggcggcgaagagcaagtactggcggcggaggggcgcgcggaggtcgacgacgacggtggagtactgcatcgagcacgcgccgtgcgtggcgctgggcgtgcggcggcggagctccggcggctacctcgtctccagcaagcgccacaaggacttctggctcctcgcttaattaattaatttaatttaattaattactagtgctttgtactagctaattgctgcgtagactggtcaatttgattcacatgatgctggataaggaagatgttatttacgggtggtttcatatcctctatagtaatgggaccctgatatgcgaggtactagaaggtggaactcacatatcagtaactgtaatggcagtaatattatggtagaggatcctcgccttcacggtggggttaaagcgcactaaaagtcggggagtatgctgtaatgtataagtgattggcataccaaatatcagacggttaaactacaaaccaaaaatatgacacgataaaaccctgctcgttgttgcgagagttaactatgataacaacaagaaaaaaaaatgtgtaagatagtttaaacaatataaacttacataaacataagtttacataagttgatgtgatttaaattcaaatagtatgtatacataagttgatgtgatttaaattcaaatagtatgtagagtgatgatttaaatgtaaaagaaaaataatgtgtctttgtgatagaacacaagaaggaagataatttagaccatatgagggaagaaaaaaaaagataatttgaaccatggattaatcatctaaggactaaaaatattgatgtgatatgacttaacaagagaaaaaaaaatagcatgaactaagtgagaatgaactactcactccgtttcacaatgtaagtcattatagcatttcttacattcatattgacgttaatgaatatatatatatatatatgtgtagattcattaacgtcaatatgaatgtggaaaatgttagaatgatttacgttgtgaaacggaggaagtatataggtatataggatataaaaaaataatggagatatattgatatattatgtgaatttaacatgtttatatttaaatctctaaaatttaataaattattaaattatagataatatatcatgcttgcatgatacttaaatgtaataattactagaaaaaatatccgtgcgttcaactggtgaaggatattttaatcttattattattgttatactgtttaattaaagtgaaatttaatgtgggatgaattcgtttggatatatatatatatatatatatatatatattagaaaatcatgagttgcagttatgatcgtctcaaggtagcatgcgagttttttttaaagtgatttcttatacaactctttttgtattttcaaaagtgaacaaacttcaaaaccgattcaaatatggatatgtatttccaaaaccgaacggacttaaaatcgactcatacacagatgattaccaaagtatcggtaaaaacatctttaatttttataatagtaaagattagtggatgatgatgtgtcatctttataaatgtgactttatagtaagagatgattagtcatgtacctgttacgtagagtagcgtagttgaacgttctaaacatgaagttttacatatttgcatgggaaaaaatgataatcattattttcaaaatttacctggcaaagtttttggataataatcaaaagatattttttaatttttagaacttgattttaggattgatgggaaaggctcgaggctttgcaacctacctggtcttaggcttaatttcagcggtgtaggcatctcctggacttcgcacattgccggatttgctactaacttctatcaacatatgtaaaatttgatcaatcgctgtaagacgctaatagttgtatggaccttagatatgagtgatattgtgatctaagttaaaccatatagaatttgacacatgagagggttcaagcatatctcaccataacaagcggccggacagtgacacagaccaggcaaatgaatagaatagttcaaaatgataaatattatggggattaattgatacgattctattacaaccataccatacgatgccttaaaaactttcaactctattttatttttttaaatcaactcaattttgaattcttctaactcggattttgaagctttcagctcaaattttgaaactttcaactcaaaatttaaaacttttaacttagatttgaaaactttcaactcaaaatctaaaactttcaacttaagctatgaatactttcaactaataattttaaatttttaacttgattttcttatatattactccctccgtttcaggttataagacgttttaactttggttaaagtcaaactgtttcaaatttgaccaagtttatagacaaatatagtaatatttataatactaaattagtttcatcaaatcaatagttgcatatattttcataataaatttgtcttgggttgaaaatgttactatttttctctacaaacttagtcaaagttaaagtagtttgactttgaccaaagtcaaaacatcttataaccaaaaacggagggaatactttattacgaaaaatgattcaaaaccataattaatgttaaacgctattaacgctaagcgcgtaactaggcccgcgtgggcacgtgatgtgcgcaccaggtcgcctcctgctgcagacgcgctgtgtcagagggtgaattcctcaagtgggggatagtaaggcccccttgttagttcggctgggggcagcgggtgagaatcgaggactcggtggaaggtgtgatgtagagggggtcgggcccctcaagaacgatgagacaagagcggtctatacaggttcggaccgctgagaagcgtaacactctactcccaggggcgaagccaggatttatagctagggggtgtgggcagggtgaacaagtcataagtcaaggtaagtaataccgacgataaaacaatacacaatgtattctgccataaaaaagcttgaatttagctttttagttgtatcattagatgtttgacagtttgagacttgagacaccatgctcaataacgagacgcaatgggaggacagagagacgtgtgaagccgaagcaatgatgacgaggagttgatttgcatcgtctctccgtctctttcttattaattgattttctataccatgtttattaataatggactaattaacatgctaatgcgctagttagtacaataagcatggggtcggataggggggtgttggcccccttcggcaccccttgtagctgtgcccctgcctactcacgtgcttggttgatcgagtatggaatacaacccttgaatctctgagacactagtgtgagttagccaaagaatctttctctttctctccctccctcacgaggcctggacctccttttatatctcaaggggctgccacatgggcccaaaagtctacctagggatgagggaggacattctctacattaaatgcatgtcttgtcgcttaacttggaagccataagcacgggcgccatggcatggggcccatcaaatcgcaccggctgacacgggggacgcctgcgtcatttaccatttaatagatgaagacttctgggtcctcatgcgcgccgggaaacggaaaccccgcgttgaccaggtcagacgaactgactccggctaggatgagagactaaaaaacctttgatcatcatgacattacggggcatgttaggtggcacgccgcctgacatgtgaccagtgcgcaggcgcactatctcggtactattggtcactcgactggtcatagaccagtcaggcgcatagcacgtcgcattaagtgcggcatggcgcgcccgctcaggtcgccttaaatgcggttaggtaggcgttgggaccgcccacctaactccgtacacgtggtgtcctgcagagggggtcggggcccgacccctaggcatggagggggcggccactgctctaccccgggcccgacccccctcgagggagttgttgatgcgaaaaacacacactggcctggaagatctgcttaacttcagtgcaggtccaaaatcttacttttaggttcgtgagcatgccggttgatttgatcctgcaatcaacaagaaacaaagacaagaaaaaccatggttaaatctataaacgatagctgatcggccagccgccgatgacatatcatttattttcaagccgatgtcatatgtgaatcgatcagtagttgtaaacaagcaagatatgactaaatctgctcgatcggctgtagatattaacgatatacaatccttctatcgatgtatatttaaaccaagtgattgggatagatcagtcatcatgccgagacagtataaatcacttagatcaaaatatacattaacatgaggactataaatgtttatagcatagccgatcagatagatctagcatgtatcggctaatactccgataccactttatattaagatattaaaacatatataatatatcaaacaggagcctaatatactttattgcgaataagatcttaatataaagggcagatctagcatatcaattaagcatataagatatagaatagctaaatcaggtaagatcggctgaaaccccgatactatctctctcgacaatcataaaacaagccagatatcataataataaatattacttaatagatcgaactcaaccgatgcagcattaagcataaaaataagtacaagatctaggcaagatgatgaaaacctataagagatggtggatacaccatataaattggattagtaacgtaacataaccctatcgatcacttcccaacaataaggaacagccgataacaagttataaagcgcaaccaatctagattacagcgtgtatatgataactcgatggattacatgaacatgattaaagtgtcataaagatggaagcattaaccccgagaatgcaagccgccataacaaactttacctctagttgaagatcgaatcgatgcagctcaacccgaaagcaagaactcgtcgaaataaaacgaaagtaaaaagggtggtgatgcgccgagattgtattgaactgttgttttgattacatggtttcgggctctatttatacccgagatacaacatatatccttgccggacacgacacttatctctaacaaactttaagataccataagtctttgcggcatatttttgcccaaacatatctctatggaatttacatgaaatatcctaattaatagatataattgcctatctgagagctttatctccatcgtggcaatccctgtgaagcactttgatcgattccagaaacagccttgaaaccatcttcatcggaatcggctgtatcacctctatcggctgtgttggctgtcctctatccaatccatctcagccgatgcaaactccagtcgatgccttcgcagccgatgcatactctattcttcgaatcgatctctttgtcgaatccgccttaatcccaatgtcgaacctgattcacaatttaccaaatttggtagtcaacaggagtgccacgtgagtaccgggtttagcctcttccctctagccttgatatcctcaggcccatatcaccgacacgctgattaggagcccctagaaagtctcacaaaaccgcactattgattattttaagtttgatctatcacaattttaaattctaccatcacatcttaaatttataatcttttatccatcatataaatattacatgcatgaaattaaagctttttaaaagtttgatatacgactatgtaaaattggttaacgttgtggttttctgaaactttcggaccataatacctgaggttatttttcacgtgtcaaaattactatggtttttgtgcaacttgaatggggttttatgaaattttacttttaaaaattaaaaataagatccatggatcaattagaaaccaggaaatgatcaaatgataagtggcaatcccagctgcagcagtcaatgggctaaacgcttttgggcctccaaatccaaacgggcctaataggcccattagccgacagcccatcaacaacagcaaaattagggaggcagcggctggagcaaacctccactaaaaccctagcctccccgctgctcctctcctccccccgtcccccggcaatggcgaagacgaagcccatggcggctgccgccgccgccgccgcggcggacaagaagaaggggaagggcaagaagaagaagcaggggaagaacggcccggctgcggtcgcgatgaaggcccgcggcgccgcggcggcggcggcggcggcggcggcgtcggggagcaacaaccccttcgaggccatctggtcccgccgcaagttcgacgtgctgggcaagaagcgcaagggggaggagcgccgcatcggccgcgcccgctctgaggccatccacaaggtaaacagtcaatcaatcgatcaatcaatcagctagtggaaggggcgggatttgggatgggtgaatcgatcggctgatgattttggtttttggcgatgtgcagagggagaacactctgctcaaggagttcgagcagagcgccaagtcgtccgtgttccaggaccggcggatcggggagagggacgagacgctgcccgagttcgacaaagttatcctccgccagcagcgtgagcacatggtacgcgtctgcgctgtggattcatggttggagattttctttttgagagagaatgcatgttttgcgtagaacagtcaacacctgtagcatttctctggtcaggacagatgaataaacttgatggattgtagttactagtaaaaatgaagtaaccttagagctttttcaatgaggaaaaattaatttgttctccgcttacaattgttcctagtgatattcgccttgtaatgtaaccacattgttcttatctctggttagtaactttaggatgatatcgttataagtgttttcttgtattactatagtttgttgagttcccttttgtaattctatctaggcaaagctgaaacgagaaagcaaatacaatctatctgatgatgaggaagatgaggttgatgttcacctgcctcactctctctcgggaaaagatgattttgatgaagaagtgcctcttgatgattatagtgatgaagaaggtttgttccatactctgtcttagtgtcttagcttggcatataatcatcttattttcttcttggattcctgtgaatcttccttttctgacattcatatggaaattttggtttcttgaagctagcgttctgttttctgcctcaaatgatgaatgtattaaatatttgttgtgttgttcctgaaaagaaacagtgtgcttgtttggtttggagccaattttgccctaccaaattttgtagtatagaatttgagcttgtgtgggcaaaaaatggtagcaaaccgaacattcatttcatactattgaagttgtcaaaatttcagtagggcaaaaataggcttcaacccaaactagcccagtaactattgatggcctgcaaaatcctgtctgttgatcatttgtgcaattgaggacgtaaccctttttaggctcagttttagttgatactggcaggtagcgatttttcccccttacgtgtagaatgtaggtatgtgtatttttaatggttcattatctataaaaagtgagtcctttttcttgcatatactacatattataataaataaatggcttacctgtaataggctcataaacatgcactaattttagttttcttttcatcattttatttgttaacttcaccattggagaaattaagatgacattattacatgaaattgttttcttgcatcatagtagtctccaaaatgaagtagagtccctatccacatgaatcaacatttatgattagattttgttcagcgtgcttaatcctctgtaattttcaggtcacatgatcctctcgaagaaccgcatacctctccaaagtggtgatgttccttcagaaattggtcttcctgaaggaactaatgtaagttttgataggatggtattaggatccaaatttaatcagtccgtctcctgtgacctcaatttaattacacttgttggcaggttcacaagagcaagaaggaagttatgtcagagatcattttaaagagcaaattttacaaggtacagcatcttctgtgattagatgccatatgtgttactttggtacccgtccttttgttcttgtgtgatcatttaggaccttattttgttttaatattaagtagatcgatcgaactgtcattctgctgtttttctggtatatgttgaactatgaaactttacaaaaaaaataatctgaattcagtccaggggctaatatgatttaatccatcatactacttacagtttttttgcttagcccttgctttttgcgaaccattctcggagataggccagtgaaacctggctttaaccttctatccctgtattcgtcgcaagcaatgataaagtattcttgaatgtttccagtaatactctgttggtcttatagtattttgggaatatgcactatatcctgttactttttggacgtgctcattattagatctacattgctaaaatcaaacaagctgaaatacttgaggaaaccccattaaaacacaatcgtttttagcaagtgaggaggctcgcctatggaatttggttggggccaaggggctatctttgatatggaccctgcttatgtaggcgtgtgcgttatgatgttgtaagagccttgttgggcgctttggcttttgtttctttcagcatgtatctgtgtcatggatgcatcttttcctcctattaatgcaaagatacacagttctcatgcgtattcgagaaaaaaagatctaagttgctgtacatgactaacatacgctatacttgcagtatttttgtctcatgtttccggaatgttattagttgtgtgtgacatgaagaggatgaagctgtttcttaaaacacaaaatttcttccttgtgcaggcccaaaaggccaaggagagggaagaggatgaacatcttgtagacaagttggatagtgactttgcaatgttagcccagacacaggcgatgttgtccttgactcgatcagctagaatggatgcaaataaatataattcaagtacagtccagaaagattcatttggtttgactgccaaggagatttttaataaggtatgttcttagtgctacgcttcttgcttctacataagttgttaataatcacactgttattcattcaacacatgttctattagaagaatgggtttgcacccggtcacttggatgcaacagttggttaaaatggttttgcatgcatgtccatgagatggacaaatgattaaaatggtttatgttaatggttaatattgttagctgttaatatactttttaaatgtttcgttcaccttaaggacctggatatggtactatgacattatgaagtcatttttctttggataaattcattttgtacctatagattacaggcatttgtctttgctccgtttttgtgtcaacagactttcattgttggctgtggggaaattcacattgatgtattttttattgacgttatgatggtaaagtctgatcagtatttgttgccaggaaaaaccagatgcatatgataaattagtgaaagaaatggttatggatcaacgtgctcgtccatcagacaggacaaaaacaccagaagaaatagctcaggaggaaaaagaacgtcttgagaagttggaggtttgtttcatattatttcagggttgaatgcagttattgtattcttgtttatttaaaatgtcccagtgccacaaattctcctggtggatgcaattgtcttacctaaaacttcttacatcaactttgtcattggatgccatatattctttaacaatttatttatgcaaacactggtgcaccatttgttttgtgatttaatcaagcatctaattaaattttatacatgcaattctatcacatcatggttgtcttttcgtatgaaatactgatattgaatctctctgatgctggttggtcttctagaaagagcgtcagaaacgaatgcttggaactgctgagtcctctgatgaagatgatgatgatgacgaggagggtgaccgcagcacgaagctagacagctcaaaacctatatctggtgatgatcttggtgattccttttctactgatgagccagcaagaaaggaaaagggctgggtcgatgaaatttatgaaagagagggtaaaaagattggtgaagatgctgaagggtcagacaatgaagaatctgatgatgatggtgatgacgatgatgatgatgctgaggatggtgatgatgatgctgaggatgaagatgaagaagaggatttaagtgataatgactttggtaatatgtctgctagagactgggagcaaagtgacgatgatgaggttaccgtggaagaagatgaaatggaaggtctcaaacaaaaggaacagaagatcagtggcaaagtggtgaaaaaagatctacaaaattcaaagaaagagtctaatgcagaatcgcaagtcaaggatgacaatcttccttttgtgatagaagcaccaagtaacttgaaagatctatgctccttgctagatggttggtcagaaactgaaataattgagattattagtcgaattcgtacatgcaattcaataaggcttgcagctgaaaatagaaagaagatgcaagtatgtaacttttttttttactgagatcaatatcgtatttatagttctacaaatatttactgatttttttcttaaatatcttacaattcacacggcatttattaaatgtatcctcaagtattgtgatctcttttggcaggttttctatggtgttctcctgcagtactttgcagtattagctactcagagtccagtgagattcaaactaattgacacccttgttaagcctttaattgagatgagtggggagactccatattttgctgccatctgtgcgaggcagcgacttatccacacacgtactcgtctatgtgaagatataaaggtttcaggtctgtgagctgagaacttggacttggtaggaaattggttttattatcaataaactgtgtgatttactgtgattgcttttgaatatatcttataggaaagagctgctggccaagtttgaaaacattacttcttctgcggttatggtctcttatatttccctgctctgacttccgccatgtggtagcaactccaatgcttttgcttatgtgtgaatatttgatgcgatgccccatacaatctggtcgagatgtagccgttggttctttcttgtgttccatggtgcttgtggtatgttctgtaactctaaatcttgttccattaagttcttatatgaatgatgaagaactattagctgaatttcttactcgacatgaatttccttttttctcttcttccagttctgcataataataactctgattgcaggctactaaagagtctaagaaattctgccctgaagctgtcgtttttctgcaatctcttttggtaacatctctgggaggaaacctgggatctgacctacgaaaaaaggtattttttagtttcaggcattgaactttttttttctttttttgctcactgcttgatatcaagcgaccctttgtatagatcaatgatcaatttttggagctcaagacaatggaaccatggcttcatatccatgaaaaagtgcacgaggtgaatccagcgaatatcctggaagtcatatgcatggattctgatgctccttatttctcctctgataatttcaagtgaggatgtgttttctctggcattttgaatattattggtttacttaacacataatcttacactcgtacattttctaacagggctagtgtacttctatctgtggctgaatgtttaaggggatttgttattatacacgaagaactatgttcgttccccgaaattttcctgccaatctcttctttgatgcaagaaattatggataaatcagacttgcctggattgttacaatacattttacatgaagtcattgagttgattaaaaacagaagtgatgaagtccatgcatcaaggcagccactccaaatgcgaaagcagaagcctgaaccaatcaggcagttgaatccgaaatttgaagagaagtatgcattttttggtgttctattctgtgttaacagcatgttgtattcttcttgaagggttttctgttgttcattctttattgactccatttcttctctttctgcagttacattaaaggccttgattatgaccctgatcgggaaagggcacaaatgaagaaaatgaagaaacgccttaagagtgagaagaagggtgcaatgcgcgaactgcgtaaagataattatttcctgtctgctgtgaaagagaaggagaggataaaacaagagcaagagagagctgaaaagtatggaaaagccatggctttccttcaggagcaggaacatgcttttaaatctggacagctagggaagggcagaaaaaggaggcggtaacattttctccatatttagtgtgtgtaaatatattgattatattccccatgctgttcagttcaccatctttcttgggtactggagatttagacacagcgaatggcctttgcatgctccattttaactgcctgttgtaacttctagcttgtggacacaccgaaatacaaaagtagatggtcagaactcccttgttagcaatatggagacggagcgtcacttgcatgaaagctacttggaagaatgtttttgcaatctccccaacaaagcaccaacatggcaatggtttttttatttctcttgtatcgggaaatggattgctctactgtgttatactcctgcaatagcaattttgatgtatcacagccaagagtttttgatgtgttccctttcctttttgcactcgtcagatgtactggaatgtaaaccaatgaaatccttaatgtaacattacttccattttatagccattccttgccatgttgttcactgtttctgaaatatttgctcatattgcaagggaagcattgtgttcaccagcattacatctaactctattgctgttggtgatgatggtgttctgcatcagaagataaattaggctggtgctttagatctgcccaaatgctgacctgctttgaattgggaattgggatggcttccatgtggagagcaacatcaccatcagcacctgcctagatcttgatgcttacatctgcctaattgcttatcaatcagagaggccacttgtgttgtgaccatccactttgcccattattcagacagtcccactcaattcatggagaagcttaggcgcatgcgcctaatggagccgcatgcatgcatacacgcacttgcattttttctgtgtgcaaagcatgaacaaaagctgctttactgtttgctaatgtgatcatgtcctgcttctgaaggctctagttctgacctaagcctgcattatttgcttttttttatcagtgcttgctgctgcctttttcatgacttgctctctagattagatgtcaccaatcatagcagcaatatgtgcatccaatcaatcatcaccagagccaaaaaagcatcactaagtgatgggcaaagtcatagagatccctaaaggtaagagacattccaaactaactctcatgctgcctatttcttgattcccatttcagctgctcttttttttagccgctcagcggagacgtcagcgccatgtcatcaaccgaggaatcatgttgacgaataacagctaatgtgattgatgacagtgttgcaggttagtcaaggaagttgatttgcttttgatgcatcattatcagaatcaggctaatgtgatattgctttgatgcaatatgtctttgtcagcaaagcttcaggtaagaagataatagcatgcttttgtccactgacttgcatctgcttgccccaccacagaatttgaagccattgctgtcatgaagattccagcttcaggtgagaggtgagctacaataatttgaaagcaatggccaaaattgctgcttttaaaatgaattttctaaggagcaatatttttttgttaatctaacatatttcttataaaacaatatcttccacagttatatttacatgatttatctacatatgtacaatgtggacatggcgaattcgagtatatttacaaatgatgatgatctataaacaacccctacactactattccattcctgcgccactccactggtaagtcttgaacagaatgaaggccctctctgtaacttcctgaattcttgggcctcttcgtcagctaagaattttcagtgcggttttcgggatcggctcatgagatcagcgcatgaacatcccgaaactgtagagagatctcggtcgaaacaggttggcgaagaggaaccatgtgggtgactctttcttctgtggctctgatggctcaggctggcctttcacctgaatgttctggcctatggcttgcctgatggagtctattgtcttctgatcaaccgtccctcctgtggaatcgcgaacatagaatgtgttgacagccatccttcctctcgtgctcacctccgctcttgtgacagtcaggctgttctcgcggaagattcgggtgacctctgacaggaggccgaccttgtcatttgtgcagagctcaagcttcacaccctgaaaacaaccaacattcagaagatgttctcgagtgaacaccggtcctgatttctactttgttgagacagtaaaagttcattcagttgttacctcagacaccctccgttcaatagcagcttcaaggcactggatgactcgcaacctgtcagcttcagtgtgcattggagatccatttacatgcctcacatagaattcctacaaaagcgcccccaatgtcacatgttttctcaaactgaatctcatgaagaatggatatggcaaattaggacatgtttggttcagcatattcacctggtaagcttgattatccttggcatcaatatttgcatggaaaacaacataatgcaggtctgtcaaggtgcaaaccgtgtcgaagagaagcttcggccggtccttgcatcggatggtgaccaccgagtagtccttgtcattccaattgctcaccgtcacattgggcctctgggactgattcggaggatgccgatggagctgctcatggtcgccatcatccagcatcatctggtgcagcctcctctcggtgtgcgtgctgcaggtccccgtcgacaccgccatggccgcgccgcgcgagaggttgcctccccggagaaggtaggacagcctatccctgatcctctcgagcctgtcggcgtccgtgacggccgatccggtgccctcatcggtgactcgcatcacggcggcagccctggtgttatgggtccagatctcggcgctgacaacgttgcacttgaggcttgcaagaactgcactgacttcagagaggaggcctggccggtcagtccctgtcagctcaatgacattgtgatcactcgaagcagcgacatctactgatctccggcgagaaggtatgtatcttgaatctgcacccaaagactgtagattttcagaagaaaaatgcattagttgtcagtccaatttgggtgatcattcagtagtcatactgaagattgccaaggattcttgtataccttacaaatgtagtcttcaattcgcgcaatagtagccttatctttaagcttctgcccttctttgtcagttatattaaagactgaaaccaaatagggatttagttaaaaaataaaaaataaaaaatgaatatgtaggtgtaaactaattagtaaactatatgctttattattaccatccatgacccatccaccatctgaggttatgtacgccttacttatcacaagattcagatcaatcagaacttggattacttcaaggagaatcccatactcatttgcactgtctacctatgcaatttaccaccaaaaccgaatcagtatctattctcactaaagagatgaatcaagaatcttcatcaagtggattaggaatatcctgcagatgatagtagggccattattcacttaaaaaaaatagtagggccattaccctgacaatcgtggcgtcgttgcatgaatcattatcgatctcgatcctacagttaataaaggaaacaagcaggatgaagaatcgagaattaataacataacagtatgagatagtaatctcccaaaattgagacaagcaggagcagaggagcacgtgaatgcaccttggcgggttcatcttgcgtatgaagttgtcgtactcgtcgtcgctgtcccaggtagggccatacccttcatctgtccacatgcagccattaaatttcactacagcttctgatgaacagcaagaaacatgctgatttttcttctctctcatatttttttttcaaaaaaaaaaaggttaaaactagtatgatgaataatatatgaaaaaaaatcagattttttatttctgatatggcaatatctgaaagagggtgagccataaaaaaaggaaaattgataaacaaaatcaagaacagagcagaaagaatatccttccttcctaacaccgttactaaatgaaatcaagaggaaaggaaggacaaaggtaccataaaaaaaaagaaccaaactttacattccaaggacatgaacaagaaagcccaacacaacagggagagagaaagcagagatggatggatacccatggacatggcagagcaggagaccaagaacttgaagcctctctctctcctggatgaacgaatgcttctcctgctcctctctctatctttctctctctactcttcttcttcctcctcctcctgtgctcttatgtgtgcggcagtaaaaagcgtgggatgtggtggatggcggcgatcctagagagaaggcaggagatgagagagagagagagagagagtaggtggtggagaagagaagaatggcctcttctctcctcttctctctctccttgttcccccaaaatcttggctgggattggcctacgggttgtttttcatgcctgcgcattttgcacctacgcccctgggttattccggatttgcgtgtggacggctgtccagctcaccaaaccacggacagaatctggagaattgtttggttctgaggctgtccgtcttttgcctgcttcgttcacactgggggatactagtaccaaaaacagtgtgcttggagcgcctattttttttctctagttttttttatattttttgatccttttaaataaaattttaaatgtaatctttcatgcattttatttatgtaaacttttttttctggtcaagacaacttgatagctatggtcgggaaattctacaacgacattggttcttggcgtgcagtatcgtggctgaaaggtctaatttctttagcaattggattgaattgtttcttgtgaactttttctttaaaaataataattctgattctttttagttcaaaatggcagagcgcaatgaattttttttcctataattaaaaagaataaatatgtaattattgctagtgggtaataatatggcatggttgtatattgagctttaaaagttggtgggcataattttatactaagatatgatatgttgagctaaaaattgcattggtgaacagatggaaggttgagggggaaataggaaatgaatgtgcccatgcagctgtgcacggcgaacatggcaaatcggcaacatttttttttaggcatggcaccatttacttccttttatgcatgtgctacccttttcatactttacacgttttgatttttttttcttagtcaaacttttaaaatttgattaagattatagaaaaattgagcaaaacctatcacaggattaatgttattaaatctaacatttaatatttaatagtatatttgttttgagtttgtaatgttgcaatatttttttaataaatttggtcaaacttaaaactaatttgaaaaaaggcaaataatcatataatatgaaaaggatggaatgttttttccctttttttgcacccagatgtgtcgtacgaaaaggaaattgcctcgtctctcactggagtacatcggccaaggagcaatgagcgagaaagcttacctaagtgggccaccatgtcaatgctctttcaaataatttggatatgttttcaaatatataaatcaatgtttagcctgatccaatggtcaatttcgctagttccaatcctgctaatttaagccagttttcttcttattatttcagcatatcctccgcaagcaaatgagtataatattctatcgaaaacgacttacattaacaaattaaataaaataatgtcattaccctagctaaccaaaacaagtgggaggacagaatatttgatgacatacgtatgtttttttcctagtaaatggcatgtgtcgttgactatatcaatgcacttgtttttcgtgtacaatagtttcaggcacaaatattattcttttagggggaaaaaataaactagaggactacagtgagcattttcttaccatttgtgacagattaagaaattttctcgagtcaattaatatatgacacacatgcacaatatccactcccttcgtcccataaaatagcaatctagatctggatgtgacatttcatagtttaacgaaccaggacatgcatctgttcatattcgttatcttataaaaatgtcttgtctggtcttaggttattatattatgggacggagggagtaattatgatcggtgggggagtacactgcaagcaatcttttttaagatgtcatgatgaattgcagttaattcctttatcatcttttgagtaacacctgagtcagaatgcagtcagccatctctctcacgttcaacaccaaaattaaggaagattcaagtgagctcagctaattgccgaacaagacaagtatctgtatcaaaagagaacgaaatgattcagatactttcactagctagtcttaattactagtacatgacaaattaaagttgatgacacatcgaccgacaaattactctaaaagaaagaaagaaagcttgcaaaaaaaaaacatatgaccagctagcccattggagtaatcagtcttatcattagcagcaaaaggttgcatctcaatccctctctttccttttggtacttgccaaggaatattcaggttgacttttcgacaatttgtttagcaacaatgaaacagtagggtagtaattaaggtcgctcgataacaataacatcgttgtctagtgttaattaagctgtttgggatggagccatggagggagtatatcatctttgctataatagttcttcaatttcctttaacttactattatacctaggacgtacatgtgccactcgtattaaaacatttatattttcatcactaatagtcaaacccctgttgaccgacggaaacgacatcttaatttgagaaacaaaaacgtcacttaggtagcacatatgaaaacgtcatactcattacttatagtataaaaatcaataatttcaggatattagcatgcttttcacaatgcaggtgcatgatcttatattcttatctgtcattaccaaacccacgaatatctagatgtgcacatccaccgaaagcatttctttgtaactaagcttaagcagtaattaactaaacaagtggaggaacaactaactaattaaggatcgatacaagcaaaattcgactgtataaagttgagagttttggactggcagcacgtagcatcgaagtttcctgctcaacttccacttgtgataaactggtgattacgtgtaccttgccatggtcaagtcataaagttcctttgatggagaccatatcactactacaaaatttgtcattagtgtcgctctatcagtgcccgtggataaaatccggcactgatagaggtatctcgcccatccacacagtcaatacccagtataaataagatccaacaccgatgactactcatcagtgctgatgagtggattattcatcagtattgtgaaccggtaccgatgagtagttatcagtacccgtttttttattataaatgttgtgctaggggataacccggcacatataagaagtcccgactatcaccgatgaatcttttctgtagcagtgtgaaatatttattagggagatggtccattaaaacgagcaaaactttttgtcgtgtgtatatgtgcccgcgcgcaccagtgccaccaagcaaacaacatagttgtatttcttagtagaaaatatgtatcccttttagtagatgtcgttttaaatgcatacatgtagtcaaagcatagttacttttatactattactagatacagcaaggtcatagaaactattttctaactaaaatatggaatcatttaaaacgatatctactaaaatggatacatattttcatctaataatttccatcttttatactattattactagttacagcaaggcctgaaaactaacggagccatcgttttgtttattcgtggaataagtgaaacggcatatttgcaaacgaaaagtaatatgtgaataaaacttttatatacgtgttcttaacgacctaaaattaaaggctaaaaaataaacttcgataaagaaacctcaaaattacctccaaatttaaggtttaaaattaaattttgactgataagtcataagtataaatataagcgaaaagataagaccctaatatttttattctattattgacatggtggttttaagaatgcatagatgaagaatcttttctgtcgttaccgagcccactaattaatctatatattcatattatccacatttaggaatttctagttgcttgtcctaaaaaacctactcctgacttcctataaggtgaagttcaaaacagaaagagaagactaaaatacctttaattaatattatagaatggagtagtattagtggatggatagataaataatgatttgttttaagataaagttgaagtttactttatttcggaatggaaggagtaaatcctaagctagtaggagtaaatacaattggaggaaaaagggtacaagcaaaattcgactttaacaagtacatttttggtgcagcacgatcgaagtttcgtgccaacttccacatctgatcaactcttttgtcgtgtactatgtgctactgagcaaacaatatatatatttttcatatttaaaaatgcaccttttttagtttatatggttttagaacacatatatatgatcaaaccgtaaaaacttttactgttgataatgacacatggaaaagattaattcagtggatcatggaaatttatatatattcatgtcattgcatattcattaaacaataactcttcctatcatctaattctaaaaaagtgacagatgacggccatatccaaaaacgaacaatatactactttcgatttttaatacatagtatccttgacctttatacatatatatttgactaccattttatctaaaatattttacataattatttttacttgatttatcaccaattttaaggcgatgacttatatttttacatatttgcacaatttcttttaataatataaataattaaatatgagttaaaaggttaatggtggtcatttattaaaactagaaagagtacaaagatgaactactccctccgtcccataatataagggattttgagtttttcttacactatttgaccactcatcttattcaaaatattttaaaattattattttttgacttgttttattatccaaagtactttaagcacaacttttcgttttttatatttgcacaattttttttttgaataaaacgagtggtctaacagtgcaagtaaaaactcaaaatctcttatattatgagacggagggggtaatagagaatggagactggacatcatgtcaccgacttatatatattcccccctacactcttgttcatacaaacttttttgatgagttctttaattttctaaatgattatctgccaaatattaacattcttgtcacatggcatggcacccgggagttctcagctaaccgtcactgatgtggttaacaacggtagtgcattgctggttaatttgacaaatacctccttcaggatatggccacgatcgaatagttaaccacaagtaaatactccctctgtttcacaatgtaaatcattctagcatttcccatattcatattggtgttaattaatttagattcattaacaccaatatgaatgtgggaaatgctagaatgacttacagattcattaacaccaatataaatgtgggaaatgctgaaatgacttacattgtaaaacggaggaagtatatgttaaggcagtctgcatgcctaccctagtataccttaccgtcaactctgagacacgatcgaacttaggtcgtgtttagttccaaaataattcttcaaactttcaatttttccatcacattaaaactttcctacacacataaatttttaacttttccgccacatcgttccaatttcaaccaaactttcaattttggtatgatctaacacccccttgtgaactctgagacatgattggacatggaaatggtgttccaaaacgtatttcatcggcaggccggtcaaccaatccgcgcatcaaagaaaaattaaccggtcggttcatgtcctttcccttgtcatcgtgtgaagaatagatagtgatgtatcccttgttgtttcgcttcatgtgtgtttatccgaattgcttattagcaaataaaaaaccatttatgagtaaacttttatatacgtgacattagcaattaaaaacaaatattgtaaaataaagtacgatgaagaaaaaaaatcaaattcaaaattaaattctaaaatttagagtttagctcataagtataagcataatccaaacaatcataatccaaacaatgagacacagtgaacgctatgtccagtcaaatccatatacgctgaagttaatgtgtcgaaaacggtgatgaaaattcttggcggaccgagcatcgtttttataaaaatgatattatttttagtcatttctgatcctagcttatatataaaatttgagttctctaatttgtttcggctatgtattgcaatgaccacttaataattaaattggtaaatatgaaaaattctcaatcgactaattttctaaacaatattgttttcaaccatttttatctagttatcatggatgaccactcctttcacccccgttgataagctctcatgtgccctgaaatgacacatgcattcatgatcaccaatatcgccatgactaattcttcattaatatctattaccatggctaactatatatataccatgcatgttgtggctgtggacaacttttaattttataactttgagtgaaccatgacaggaaagcacatacccattgcatatgcacactctcttgatttggaagaatatgtgtctgtgtttgtttctagtttctttgcataattatcccgtcaggcaccattctgtgtgctaaagctgacacatgttgcagaggaaaaagagaaagctacttgggccatatgtgcaagtggatcgatccaagctaagttaaattagctgatatatatagaccaagccactgatctagtttgcatgcatgcactcgccctggcatatcttaatccgtaattatctgctccctccgtttcacaatataggtcattctagcattttatatatttatattgatattaatgaatctagatagatatatatgtctagattcattaacaccaatataaatatgaaaaatgatagaatgacttacattttgaaacgaatgaagtacataacatgtagtagaacatgtagtagagtatgtatatagatagggtcaattggtcatgcactcttgcaacaaaatagatcatgagcagatcgagcacgcagtttgtgttgggagactaaatgtaagagatgaccatgagcacatagctgcatctgcaatgcacaagttggctttggtctatctgcatgattgagcgacagcgggaacaattattgacggtggccttggccgaatcgctgaagggataatgttgttgaccgacgacgatccttcttgtgcggattggtggtgtgggtttggacagggaatcgcgggcgaaagccttgccgagccatttggccggctgacaacggcggcgtcatttggcggtcccctccttggaggcgttgttttagcatacccctttcctttccctaccatattctccgagtgaaaaccttgcttcggttccgaacgagcggtggcggcgatccacgtcgcatcctccttgggggcaccgctttggagaaacctcttcgtgcaacgatattgtcattggtttatgcattggcttcgaactacagtcctagacctggacaaggccttctagcttcacattttgttttacttttctcaatttgggtcctctcttctcttgtttagtgtgttcaacttgtcttgaactacactctcttctcgagtggatctttgtaataattggctgtagttctttttgagcaaagaccaggatattatattccattatctaaaaaaaatcaacacgattgagatctgcagctgttaagtctgcttcttcttcttcttctttttttaaataaaagctcttccctgtcaaaagtatttcatgtttatgataagattaaaacgtgcttttaaaattcagataattaactttacattccaataaatttatgatattattgtggggtgacagtacttttcgaggcacatttacttacattatttcttttatttttaaactgactatttgagaaattattggtggttagaattttaagagtttcaccgggtcttatcctgatttttaacgggaggaagtaccctaccgagatgtttttcctttttcctatcaacatcgatctatgctagctctttaattgtgggagtacaccaaagaaaacaacaataagaaaagaaatccacatgcaagaggttaatttaatttctcacttttaaggaaagtgttataaaacaatactccctccatctatttttgataggcatattttcaaatctgaaaaatttatttttgataggcatatttcaatccaacaacttatcatcttaatgactttctcggatttaatgcgtgactctccattcttccacacaagattggctacatgagcatcgagaaatgtaaatattaatgaatcgcttgtttacgagaaataactagtagcatatttaaatgtataataagtaaaattacttatctttgtctgtgtgctaagataaaatataactatcatggagggagtaacgtatttgggcctgctagactttagttgaatagtcgcaggctcaaatgactatatattctgatgctgggccatcttgaattctggtgaacacaggtcaatttgtaagactaatgaattcccctttttaataggagcttaattaattctgattatagagtacttcctccattccaaattgatctacatatttcataggtacaccaaaccaagaaaagctaataactctctcatactatatttactctagcaacaaactcaacgcatgcaccatccccactatttcctagccaatagaaaattaagatattgcatgtgggttataaatacatgtgtgcatagatgcatgcataaatgtccatttactccaatgcacaaataacgaatagacctaataaatgaacacaaatatatagattatttaggaataacctaaaaaaactatatgtagatcaatttagaattgaggaagtagtaagctttataaggaaaaatttttagagatatacgtattttctgtagaatttacaagaaaataccgaacgagtaaagatttgcaaaaatataccgccgtcgcggtttcgttgagcgagaccgtggtctcgcacaattgaggcgtgagaacgagaacagtatcgctcgttcggtcagcgaggacggagcgcacttggtggcctaggcggtgctacaatatcgctttgccgattagcgagtgcgcatggtgtcgcactctaaggcccttcacagtgcaaggacgtggcaacggaacctttttgccacctaggattttcgtcgatgtggcgcttgcacccgggaccaaacagagaaactcgggaccaaacagagcgacgcgaaacttagtcgagggcaacgctgaaatcgcgagacacgcgcgctgtgggcagcgtgccttcgccaccccgtgccctctccctcgcgctgtggcgccggctcccaagaaacaaaaatggcggcggcggcaggatggagtgggggagttagagcggaggggcggcggacagagagggaggggaaaggctcgccggtgcgccgcccgtggaaggttttccctaaaatcgcggaacaaatcaacaaaatggcggtaacaaatcgcaacaaaattgcaacaaaatcgacgccgccgctgcacggcccggaggacgccgccggtggatggggaggagggagaaacggcgcggcgccatcgtcggtgaggagggtggggcaacgccagcgccggcgaggagacgtcgatgctgccagctccctccgtcgacaccgccggcttgaagtcgacgagcaggtgagcccggagcgcggcccctccccccacctcctcatcctcctcctcccaccccgtggaacagagagagggaggagggaggagctccgcggctcgccgccgtcctgctttcccgcacgccgcgggagaaagagagggaggagggagggggtctgccgctcgcctcggggacctccgccgccgaggtccagatctgagccatcgcctcgaggacctccaccgccgaagccatgaccgctccgaggacgacgaccacgagcacgaggacgccgtcgccgctccactccggatccgcgccgccgccactgtcctcccgcgccagcgctccggatccgcgcgcgcagacgaggagctgggccgtggcggggagggacagagagcgacgacgggatggcgcggccggagtcaacgtcggtggcgccgtcctgcttgctggccgcggcagacgaggagctggatccgtgtcgccgccggggacagagggagagagccggcgtcggtggatttggtgggagtgatttggggattttgggggaggaattaaatttgaaaatatactatttattcaatttttttaaaatatttgggatgcaaaatcttttgtataaatatactatcggtctcgcacaatcattacgcgaaaataacgtggaaatgacgtcgcgaccggtatcgtgcagggaaagtgcgagaccgcacggtctcgcgcaagcaaacagcgataccactcaagcaatcaacgctatcgctcaagcaaagatcgataccgtgcctccccgatttaattagcggttaattatcctaattagtgattaattaattatttatttattaatcactaattaagataattaatcacaaattatcattagttaattgttaattaagtacttaatcactaatcaaatggatcccattggacagtgtcgctgatggcttctgcgagactgttcggtcttgctcttccattacgcgagaccgtgcggtctcgcgccgttacccgtgcggtctcgcgctttcgccgcgcggtactgtccgcgacgtcatccccacgtcattttcgcgcaatggaagtgcgacatcgatggtatatttctgcacaagtttttgcatcccgaatattcctgagaaaaaattgaatgaacagtatattttcaaatttaattctttaggggagggggaggggggaaggatatccgtgggtcccactcggtgggtcccactcagtgcttgcactatgaagaaattggctctgaagctcttcatcctacgtgtcactgtgtggtacctcatagccggtgcttccactgtgaatggcctaaaagtgcgagagcgagccggtgggcccagtaactgtgactgcgacccatgcggtctcatgctacaggaacacaagagcggtgggcccctgactgcgacggcgcggtctcgcgctagaggaacgcgagagcggtcaggtgagccccactgcgtgcctaatggtgttaatgttaagttaattacgtagaaaacttcgtataaaaataaattaatcacgcgtgagcaattagaaattaaggggtgtgcagcttatttcatgacaatcttcgtacatcgcttaattgaaaaactttttcggatgcagtggtttactattgacgtgttccatttttgctactgtgattgcatgtgtgcttattgataatgcgtgtgagtgaatgcttgacgggagggtgtcagtgtcacatcagcttcggtctcgcaaaaccaacgtgtgagaccgcgcctcccctccgactctccgagcaatctcgcgctcccaccgtgcgataccacggctgccggatctcccaactaaaaaaaatcctgtgggacctactccacacctgttatcgcactctgaaagagcgatatcgattgtgctctcgcgattcgggcgtgcaacaccgcgggcccacgctctcgcgcgtctaaacccgatagcgatcccgttctcgcgctactaataagcgagaccgatggcgctactccatcccaaatcggtacgacgtggcgctctcactctatgaaaacacgataccgcgtcgatatcgcatagccaacaagcgacaccgccagctcaaatctcctcgcccattcgacgcgcgagaccatcatgctctcgcgcattggtaatgcgatacagtggcgatatcgcactttcccgttgcgaacctcggtatcacgctttctaatgacgatttcgatggtatatttatgcaaatcaatctacatccagtatatttatgaaagaaagatcgataaacaatattttattaatttttttcctttatgagagcatgtataataatctttagaataaatttcacaaagagtaaattgcgtcttataagaaggtttcacctagatccataaacttacaaaacccttatcgagatccctaaacttagtttattgtattatcccaatccaaagccttgtttgagtatggtcttgcctatgtggcatgccacatggacgataccaaggcaaaattttcatttttcctcctttgcctccaccgtgcatgtcgtgttgcctgtcggcttcacccacggcccaacggcgagcggattcggtggttgcggtggcgtttgtttcacatgagtggatccagaggaagctaggcgagacgcctgcctggaccaagcctatgaccctgtcacggggctcggtcccgaccgaggtgctcctctctcatattgtcccctgcgggtctgtagccacaatccctcaaacagggtgccggtgatgcaaggagacagcagatccaacgccgctatccatcgggcaggtcggatctgacgcaaccgacacaaggggacgggatccagcggcaccagggctacgagcactccgacacgacgctccacacagctccatgccattttccccatctacaccatccacaccaccacttaaatcggattggaagggaggaatcccaaccgagcagaagcagtggcagcagcagcgctcacgaagtcacgataggtcgcggatgagggagtagcaacagcattgtgccacttgctggtgcaggcatctaccgacacccatcttctttggctgcgagctcctccgctggctagggcccccactccagctcaaatccaacctgaccaagcttcaaccaatatgaggccgttacccccccccccctccctcccagcttccgtttgcttgccgggctgaccccgccatcggcacctctgcctctgatggccgacatcgtctctctcgctgcctccccccacccccccccccccttctctgtctgcagtcagtcccaccactgtcaaccgccgatgcatttagtggtggagtatgaagagaagaagaaagggagaaaattggggggggggatttttttccatgtgatcatccacgtggcatgccactttgacaagatcaaagtcaaatgaggcttttaactgcgatgataaaataaactaagcctaaagatctcaatgagcggtttgcaagtttgtggagctaggtgaaaccttcttacaagtttaaggaccgttggtgtaatttacttttgcacaaaactatagttactttggttagttatcacaaaactatagatttatcatgatgtgttacaaaactacggatttaacatggtgtattacaaaactatggatttaatactaaatttatcacaaaactacaaatttaaagtggaatatcgcaaaactacaaatttagtaataaagttatcataaaactacaggtttaataccaatttaatcacaaaacttggacatttacaactcaaacatagtattagtgttaaggatttaaaccccaaaatttgtagtttcgtgatagttttattattaaatctgtagttttgcgatacttacccttaaacatgtaattttatgataatgttattattaaatatgtagttttgtaatatattatctaaaatatatagttttgtgataatttaatatttattagcggaattgatataaataatttggtgatgtggaaaagagagtgggaagaaaggaaaacactgtcgctatacataatattggcttagagtcgactattaacatttactagagaaaattaaaattttgctgcatgaggtagagaaaagaaaaaaaataaaaaatatatttatgtattagtagttaagataccttattgttttttacgtaaagatatcttattgttacggaaatgctatctgatgagatcccgtcccaaccatgatggacgggatagggcagcaaccaaccaatccaccgattctatctccttctaccttatacattctaccaaactaccttatctctctcaaagcatgactgctgcacgagctccggcgtagcatggggtgtggatggtaggggacgcagtctcaagcgatgagctcccggcgtggcatggttgtggacgacggaggatgcaacctccgacgatgagctccggcgcatggctatggacggcggaggatgcagcctccagtgacgagctccggcgtggccgccggcgacgagctcccggcgtggcgtggctatggatggcagaggacgcagcctctggcaacgagcttcgacgcgacgcgatgcatggacaacggaggacgtggccgctagcgacgagcccggcgtggcgcatggcggcggaggacgctaccaccagcaacaagcctggtgtgggcgtggtggcgaaggacgtggccccggcgacgacctccgacgtggggcgtggacaacagaggacgcaaccaccggcgacgacctttgatgtgaggcgtggatgacggaggatgcagccaccggcaacgacctccgacatggggcgtggagggtggggctgccggcgacaccgcctcgatgctcagctcctgatacctagtaggaatcacctgatatccggtaggtatcatctgatatctcgtaagtatcacccgatacgtggtagaaatcgtctaatacctgataggtatcacatgatatctcacgagtatcacctgatacgtggtagaagtcatctgatacctgataggtatcacatgatacctcacgagtatcacctgatacgtggtaggaatcgtctgatgcatgataggtattacttgataccggttaggtttcagaggtatcatgttctgaaaccctctaaaacctaaccggtatcatcccgtttaaaaacgggattccgttgcatagtggccctctattgttaagagaacagtctctatagactctatcagactccactccactccagtatgtaccttcagcttcaggtgggtgcggccatgacactgtcagaaacgagatcgaggcccccctcacagtcgcggccaccgccgataccacgcgctagctcgccgcgccgccgcctgcttccgactcgcgtccgccatcgccaacctagaagctagctagaggcttacgaggtgttctcgtgatcgagggccgttcgatcgcactggattgggagggagggggacggcgtcctgcagtttttcgacagaatgcgtggcaaggtatgtgcttcttggacttgtagacttgtagtgcgtgaactaatctttgttttactggcttaaagctatggtgattttagagacaatatcttctcttcttttttttgagatggttataactgatgtgatccccaacagtggctagcagatcgacctaagctttcaatgcctgcattccctatttggctgttcattttcatgttctctttctttcttgcagaatttacaggatcttgattgtgtgattcatatgcatttttttctcttttcccacgaaagaagtatcataaacggtgttgacagttggtactagttaacatagttttagatatgtagctcacacatagttcggatttgatattccccgctacataaacagctggtcaaatgttttccaacttacatatgttgccgtaacatactaaacataatcttatactagccttgtctgaactctgaagataagtatgaatacgataaaaacacatatcagttattatcaccaaaaaagctactaaacatgctgacttcttaggaacaggtatgtccataagtacataacgatgaacatgtgtctgaaaaacatgtatagcaactagtttggcaatgcactgttagttgcacacaaacaatgaaatctgagactgagagccctataagtatgcaaatggcagattgcattgtgtgtcaaacctttctttgtagtcaagtagcaaatcccgcattcttaatcactgtcacctgaatcatttggttgccatgtggatgatgcatagagtatccttcctttccatcccaacactaaccattgatcttcctcgtcgacaagaaaatctttgtgataaccctttcttaccatatcttgtgtttctctgacgatggctggattcaatggaagctgcaccagtcctgccttaaggtttcttaccttccacttcttgtaactctctggcctctcaatcctctctggtccttcacatgcaatgacatttagcataatatattgatagatatctctctctattatcattcttgtctcattatctcgtggaatatttttatcaagcatatcaaataatgaattgtagtggtacatgacctctttgaaacgtgttaaaaagaaggggacaccataagatccattcaacactccttggacaaaaactttgggcttcatcattctaattgtattgagcaccctactccttgcactgttaattgatattgtctcatcaccaagatcctttattctgtaaatgcaattgactatgagaacttcatctttctcaatattaaaatcttcaggagagagggcttcccatttatttgatgatatatgctgatattcaaagggtatgttaaatgttttagcataatcagctaatcgcagcccaatattattacttctagcatatggtcggaagcctgactcaggtaattctataccagtaatccgaagcttaggtggtccatcttctatttttgcaagttcttcaaatagtgatggccattggaaaccaaagcaaatgccaaaatctataatgtggacctgtggttttccctttgagacatcaacgatagttctgttaagaaagggcatgtagagagacacacatggaatacctttagaatatcctttacattcctccttttggtgatgaacttgtggtatatctgacttccagttcccgttaatcgtacatcaaggcaatacgctaggcaaagtgctagcctttgggaatcatccccggtaggtgaagcatggtgtcttattatcttcagtatgtcactagctaggctatggttgctcacagatactgcttgtgcacaattgataaggagggttcttagatccacaacatctctcttttgtatccttttgcctgttgtctttcgccgagctgatgtttttccttgtccaatttgtgaagacttgcttgaattgtttgtcatggctctgctcaaactaacaccttcatctagaggcttatgatcagaacatagtagaacgttgtcaaacatctcatcccgaatcggttcatcatagtaaatagcatactgcttgttgctccttccttctaacaaatcaagatcttcaatacacggataactttttctatcatgaacctcaaacaatggatgcttcctcatgtaatgcgcatcaatttgaagtgaacaattgtcctggctaggcttttcggaaatggaaaggccatccacttttagaccaacaaccattctatttgagtgatgagtgaactgttctgtctctctagtaatggaagacaaactccatggaaactgaaacccttgaaagttgccattggaattcatacttgagctaatgtttgtcattctagtgacagaccaggtattgcatgcgtgaccattagacttgtcagtgttggcactgaggttctgcaggtgatcacatacacaaagtggttgttgctgagggaatgccggatacttttctccaagaagttcatagaagggctcctccatagcttgaagagcagtatcttcattgcctctgtcatcaatgtcctcctgcatcagtatcttatctatgtagctgagagttatatctgaatttatgctgcttttctcaggatagtctcctccactagtttggcaccaatctgttgtcccatttcctttctccacgtataattgggggttgtagattttgctacagaaggatgtgcttggtgcaatataggaatccttttcagagacaattggtagcggtgcattagttcatggggcttggtgggtataaaaataattctgaaatcgttagacttgcttactagattgatggattcctcattagaataggcatcacttcctggtccgtttgtgatgacatgaaaatcatcaaatcttttattgtcatcggagcccatatttgatcttatgacgatcctaggaagtcctggctcctgagtagtttgcacaagaaacaagcagaagagtcttagagaacaaaaaaccataaatcactataaccttggtttttataaattaacacatgattaaaagaattcatttcattcatgattcatctaagaaggctaaagtaaattcaaccatggcgcaggaaggttagttgacatgccaaggttcttaatcattaagttacaattaacatcgttggatattttcacattattttattggtaaaattatactcaaattgaacaaagttacatatggttaactaattagtgtaattcacgataaaaaaatatcattttaagttttaaccttctcaagaaaagaattgcttacccaccagtttaatgttaattcaaaatttcatcttagactgtagaaaggttgtaaaaagttattcttaaagagaatgatgatggggagtgcaactttcgtcacattagcatcaatcaacattttatacccaacctttgagatctgagttatctgtaaatagcatttctaacataacaataccaaaaagtaaggcttaattggtgcagggctcagactatttatgtattctttgatgcacttaactggaatgcttaaggttaaaataccgaaatcatcagaatacttttaatttaagagacctttcatgtttccagtatgatcagatcatactttttttttttgggggggggggggggggggctagtgaacaatagggaaatggatgtttcattttttccttgaaccattataagtacaactttaaaaataaaacatctggtaatttccatatgtgaaccttttagccctgctatttgtgctggaaagctaactgtgtacaagttgttcgtggatgctacaacagccgaactcagatatcatgtcattttgcatagatgcttccaacagatatcatgtcatttaccctcgagcatgctgtataacacacacaggaaaataaaagaccgacagaacataacagaggtttaatttaccgtttacctgttgcagggatcacacagaactcagggagacgatgcaaattctgcgaggcggacatccagctgtggatactctcaaaacgaacggcaaactgagggctggcacaaaggtgaagaaaaatctgcaagcaactacatgattacagagatctgttaagctgcccttaataagtaactccagctagtttgccacaggacaaaagacacatattgctggcagctagctgcttcaggatgtggtgctggtggatttgccaaggcagggggcgtggatatcagtggtggaattcgtcatatccttgcttcttgcgtaattaaggtcgtcaatacaggtcgtagagagaaggttgtttggtctctgggagatagtagtatctgagtattgcagttgccgtctttggtgaggattattaggattagccgtgagtccggaggttttgttgtaggtgacaaacctggagcctaggattttcagttggatgagaacattctatatcttacgtgggttctcatttgcatggattttttttattgtttgctaactttttaaattttaattttacaaaaaactcttctgaaacctatttttagttctaattctaaatctttttgccaggctagtcttggtggcatggcaaaataacgttgccacgcacacccacggcggacatgtcagtgttgttttaccatgccaacctagatggcgtggtaaaacctttgccacgcggtggtgtggccatataatggttccatgtcaagggattagtgtggcaataatgttttgctcgacattagtgtagtcagatggtttagaattgaaaataaaatttgagagtatatttacaaaaatttaagtagaaaaggttaaaaaaaataaaaatatcttcgcgaaatgatgtacaacaaatatatttgttgtttcaagtaaaatgtacggtctaggacaaattgcggagtggctgcgatttagtactacagtatgagaataactgtagatacacaacttggcttgtgttgcaaaacaaattacaaagcaaaatgttaggattttttttacaatctatttactggacatgttttgtttggagcacactgctgtttagcatctgaattgtccattcacaccggttagtgaatctcctttgcatctgtttatgtaataataattaactaatttacttgggtattattatttccatttgccttactcctctttttgttatgttattggagggttcatatcctctgtctttgaggccaaaggcaaagtttgccgttgctgccatccatcccatccatatcttattcaacggctctgcatgtttttttccaatttcaaggttaactaacagccaattaattaataaaatcagttgtactggaccaatttaaagatggatcgttagtattgccacacgtacttaagaaatcctcacaaaacttcctgataccatttgatttaactatttgtagaaatttatatttactcacaccaggtcgaatcagtgtttatagaagttagtaagagcgctttttcctatagccttttctaaggattagctgtgcagcatatttgaaaacgaaaaataatttatgaataaaaattttatattcgtgttcttagctatgtaaaagcaaaggcaaaataaacttcgatgaaaaaacccccaaaatcaactctaaattttaggttgaaaattcaaattttagctgataagcataagcgaaaagatgagaccgtacttttcttttaaaacaacaaaaatatggtattgtacagtggaatttttattgtttcttgaatgaatcgataccaatggttccaaaaagcgaagattgtgtcgctattttttcctgctttgcctctggagattgttttctttatatttctggagagtaaattctatcaaataaatagctggtagtaagtcacggaagggcctaacggttgatcgagggatggatggcgtggatggcagcaacggcaaactctttggcttcaaaggcagaggacgtgaacccattattggatcatctgccaacctattcggtgacgctggcttgcaaatctaccaaatgatcaaagatggcgcccaatgttcgttcatatactcttacacgtgctgaattccaaatcggtcagcattgtagctgcactcgcctccccatatctcttgtggagttttaagatacctcttttgtattgtattgtacttgtattggtaggtcttacttatattgttgttgtaactgtaggttgcaatcatctttttttttcttataataatcaaccatgttttggaaaaaaatatatttatggtacactaaaaattattattattattgtaaactctatatggccaatcttaatacaatatcgtagtttagtccatcgggaaaaaatttgtagtttacgtatagaaggtgttttttaatatatatgacaccgttaactcttaaacagacgttgatcatttattttatttaaaaaattattttgttatgatttattttgttattaaaattttaaataagcatttttttaaataagatgaattataaacgtacgtgtaaaagttaatggtagcgtatgaaaacagatggagtataaatagtttggcttgaggtgaactggtgagatgggcctaaagttggttctagagaaagatggccttggatttggatgtggtgctaggcagggatgaaaacggtcacggaaattcccgatcgaccgaatgccgttttcgtataggggtaccgttttcaactgtaccgtttttggctatttttaatttttttttctaatttcttttttcattgtagtataatgccagcagtaagtagtttaaatgataaatatgttcaattaccggctgatcgagcattgtttttgaagagatgctaccgattcctggggccaggttggagtcgcggagagaaaagctggcccgttgttcaaggagggaccccaccacggcaccacctccatacgtcaccgggaggacccaactgctcgactcgatcagcagcagcctccctcactagagtatcagcgggcagcggctcggcacgtccctatccaacggcgtgatctgattctggtgggatcttttgccctgattcccaccaccaatcacgccccccgccggcgtcgtcaccgcccacaaacccatcaccggccggcgagggccctagccatttcgctagtggcggcagttggcgatcgacgtacgtttacctcctgacgccattgcccatccatcatcatccaccctattttatatcttttgctttgtttttgaccgcgggaggggggagggagacgccgcgtcgtccctctctctctctctcttcgtttccgcgcgcgcgcgcgagatccagggtatatatatgtactagtagttgtcgctgttgcttcgcgcactcctcccatctatcaagtgcgggcacgactggcgatagatagatccatggggtgggcggtcgcgctgcacggcggcgccggggacatcccgcgctcgctgccgcccgaccgcagggagccccgcctcgccacgctccgccgctgcctcgacctcgccaccgccgcgctccgttccggccgcgctgccctcgacgtcgtcgagctcgtcgtgcgtactgtttgcctctgcttgcccccaccttattaatttctccatcatacatacacgtatggagaactgatcgatcgatcgatcgatcgatctatgcgtgtgcaggtgagggagctggagaactgcccgcactacaacgccggcgtgggctccgtgctcaccgccgacggcaccgtcgagatggaggccgccgtcatggacggcaacaccttgcgctgcggcgccgtctccggactctccaccgtcgtcaacgccgtctccctcgccaggctcgtcatggagaagacgccgcacatctacctcgccttcgatggcgccgaggccttcgccagggagcaggtcaataaaatcaccattgctcccaccaccatcccctcgcctttctgcagactgcacacgaatattacagttacagtatcactccatgaagattcagataatttctgattatctttagctcatcgctaatttctcgctctgattatcttctcgtaaaataaagttctttctctgaattttattttaatactatcggtaaatcagcaataaaattcaggtcaactccactgttttgttccttgctctgatgatctgttcggaaatggtagaaagaagaccctcttctccaagattgcgtcacatttcttagaccgaatcgaatacaattggcgtgattactacgtatgattgattttattagtagagacaactggcactacatgagttcaggtgtgtgttgcatgaatggaaatagttgagtatcacacgtattgtgtgcaccacttagcttaggagaacttctataagggtgcgtttggttgcaaggatggaataggatgggatgggacgaacccacttttgaggttgtttggttgagcggtgagtgggatgggttggtccctggagaggaatattcctctcagatccgggaccaaccgatccggcaaattctggcggacgaactcgtcccagttgggatgagcgaacggcgtgacccgctcgagctcgaggccagcctgcgcgctcgccctactcgccctcaggagcagcggtagacaccggtgggctcgacgacagcgaccgtggccgcggcgggctcagcgacgtcgacggcgaccgcagcgggctcagcgatggcagccgcggtgggctcggcgacggcgaccacggccgtgggagggctcggctcggtgaccgcgggggactggacgacggtgaccggtgggggctcagcgacggcgaccgcggggggctcagcaacggcgacggaggatctagtagtgggaagggcggtggaggcggatccgcgtcctctgcctgctcgccgccggcctgctcctccaaccgcacccctgctcgcccgtccgtgctcctcctctgttcgtccgcctgctcgcaatattgcgccgctcctcctcctcgccgccggcctgctcctccaaccgcacccctgctcgcccgtccgtgctcctcctctgttcgtccgcctgctcgcaatattgcgccgctcctcctcctcgccgccagccatcgtcgcacctccgctcgctctcctctttctcgctgacggtgatagcaaatggcgcccatcccatctctagctcatcccttcaaccaaacaaaaaattgggattgtcctatcctacaaaccaaacacgtaaatggaatcatcccaaccccaaaatcaggaatggtttcatcccatcctacctagtcccaaaaccaaacacacgctaagttttgttttcccttagttttgagacctactccctccgtttcacaatgtaagtcattctagcatttcccacattcatattgatgttaatgaatctagacatatatatttatctagattcattaatatcaatatgaatgtatatatgtctagattcattaatatcaatatgaatgtggaaaatgttagaataacttacattgtgaaacggaggaagtactttttaagacctggaattaagtatatccatttggacgctggatttctatccataatcttaaaaagaatgaaatttactatgcattactttctttattaaaaaaagaataagaatttactatgcttagatgccttacttgattatatggtgataactagtcacttgtcagggagtggagactaaagatccaagccactttattacggaggcaaacaaagagaggctcagacaagcaaaagaagccaacagggtgcaggtactgtcacagttttgtctgtctgttttctaagttttggtgtttagtacatttcctaactacggagtaggtgattggattagatatcatattcccccaatcttgttcaaagttcgaaatatatctgatgcacatggccctgacaaatctatggttcatacatatgtatatttaggaagataattaagcatctgccgttcatactgtcgcagttttgtctggctcgttgctaagttttggttttagcacatttcctagctactacaaggtgattggattagatatcacattcctacacccccacccccacccacaaacctgttcagatttctaagcgatgcacatggccctgacaagtctgtggttcatacatgtgtatatgtagcacgataagcatacattttgcagttattcctctgttaccattttgttgccatgtctttgtctgaatttatattgccaagtgcatcagaaatgactaaataaatttgagaaaaaattgaaatgaaatcggattttgttgtgcaccatgcatttttttcccccatacactcagtacgggatatgcacgattatgtccaaattaatcactctaagaatgcacataggagcttcacccatttcgttaagctattgttcaagatgagtcaaataagaaacatactagtagtagtgtacctgattcagaaaaacaataatttttataagattagagctgtttcgataaaatcatcacaaaacaacatgttaacggtcaaaatctgatttcatttcaaattgagaaaatttgaaatgaaatcggattttcagagggagcaggacttttagtataacctccttgcttgttgccaggtggattacacccaaccaattcccaaggacgacaacagccgggtcggcacggtgggctgcgtggccatcgactccgccggcaacctcgcgacggcgacgtccaccggcgggctggtgaacaagatggccggcaggatcggcgacacgccggtgatcggcgccgggacgtacgccaacgcgctgtgcgccgtgtcggccacgggcgtgggcgaggccatcatccggcacacggtggcgcgcgacgtcgcggccctgctggagcacgccccgccggccggcctctccctgggggacgccgccgcgcgcgtcgtggccggcgtgccgccgggcaaggtcgggctggtggccgtgtcggccgccggcgaggtggccatggcgtacaacaccaccggcatgttcagggcgtgcgccacggagggcggccgccacgaggtggccatctggcctgacgacgctgatggtgctaattgatcttcgttcagcaatcttcattggacgatttgaagcaaagaagctatatttccattgtgtgctgctagtagtaatttgtatgatgtttcggtttgatttggttttaggacattatatacaatggcttttggcttggtgtgtcagacaatcagctcaatttatatccaaattcaattaagttaacaatgagatcattttttgtttccattacctcctcccagtaaaccaccgcatcaaatttggaaaaaaaatatatggaaaaatacatctaaagacgagcacccagcagtctggcacaatgatatgatgagccagtaaatttggaaatcaactttcaccccacgtcgaaaccttgaaatttcatagttttcgaccgttttccgtcagaaacgtgatccctgactatgggaatcagatcagagctagcgatgctccacggagaaaaggagatgatgcttcagctcgagcagttcacgagcctcagctttttttttttacagccctaaacaagtcttacatgacgtggagcttcacctttgtcgggagctttctacggagaaaatccctagaaactacagcaaaacactcggagaacttgctgccaattctggcgccataataatcttcatatagtacctgagttgtgtctacggtcaatgcctccagtgtaggggcgttttccactatgtgcagaagaaactcaatctggcatctcgcccctttgtaccctgtaatgtgcacattcttcagacaactgtattcgcagcgcgtaagctgcggcataccaggcccctggtctgcaaaccatatcttatcattgccaccaaactgcaggttcaaacaaaaacaatatgatcacaacagtgtacatatgacttccactaaagatatcacgaaaaaaagtgtgacaggggggcctatattcagatttatgttttagtgccatagaacaaattttgctacatataaacaatgataggcaccgaggcccatggttaaaaaaaataatagcatcccacaaattcacattggaaattaaatccatgaataatgaataaagaaattttctgaaaatctacaaaggtccaaaggtaaattgaatgggacataaagaaataatggaatctataagagggcatatcttgggcccaggaatctatgagcagaggacagagaatagtacttacatgaacctctatatatatatatatatatatatatatatatatatatatatatatgccaataccagttcatctaacacctctctctcctgacccatagatctgttcatccaacggtttatattaaaagttggatcaactcatgcaattagcgattccacgtggtaaacagcggttagcgaaaaaaaaaagaaaagaacccaccgccgccgaaaaaaaaaagggaaaacctatcctcctgcgcggcgccgcccgccgctcgcctcctgcgcgcccgccggcgccgctccgctcgcgtggctgcgctcccgatttccctaccccgccgctgcctcggatcgcctgtggccgccgcctcccgccggagccgtcgtcgttgccgaggaagcgggccgcatcgccgccgccgcctcctacgcgcgtaacgcgcccgccccccaccgccccgcatccccccttcccctgctgacgggtgctgcaccgtgccggcgccggaacggcgaggttcacatccgtcctgctgcctcccctcccttctagccctccgcagccgccgtcatcaacgtcctccgcgggaaccgcacgtcgccgggtccgccgccaccactggaacgccgcccttcctccaagtgccccttccaaccccatcgccccttgctcagctgatcaccccgccgccgcagaaggttgtcaggacggccgccggcgaggcttcccgctcctccatcctgttcaggtcagcgggcaggccgtgctacacgttcttcgcttcgccgacgatggtggtcaagcaggtactcatccattgcttcccccttcctcttcttcaacaatcaccgcacggttctggaaccaacccaaatgcagggcagacttgattcctgctgctgttgtgatttgtgaataatgataatacatctgactatctgagaatagcgaagtgaccttggtagaactgttgttttccgtaccgatcatctccctgggatgaatcgcagcatagaaagcttgccaggcatcgtcatatcatctgtgctcatttgctttgcttcagtttactgcagcaaagttggttctacatattgtgacatcgatctcgttcttggctctgagaatggcacaccgctcatgagtcatgattggcatattcaggaacttaaattgtccataaggaagctttactaagaaataaagaaaatcgctccatgatctgatgattgttgaggcttgataggtctgctctctttctcacactgaaactaaaaaaaatcgcgttgttcctattttctgaatgtatgtgtccactatattatcgacaaagtagactatttgattacctggaacccaaatcacaaatactggtatgcaatctacatttggccataggttcagttcttgcagttactaatttactccgttgcaactgaaacactcacagatttttagttgattagcatttagtcgtaaacttagaggtataattgctcagctgctaagatctgttttatagatcagttaataattaatttcttttggattcagcagtagtgccagaccgattggcatgacatgtttgcctccattcagtaaaattcatctgaattcaaagtgttccaactgtggcgttttgcttctgaacagctccccaacttgcacttgatgcgatggttctgttttgctgctaaaagtcaggttcaattgaatatcttttaatttcagagctgcaagtacatcttcaattaaataacttttcttttccttttcattttctgctaaaaagctaggttcaattgaataccctctccaacctaattttctatttgctcggatgtatgtatctattaactcagaaatgaagatggcaggatagcctaggtttggagactatttttagttcacgacttcatatatcactcgcttagattttactaatcttaatttgttgatatgtgcaacctaattttctatttttttttcagatttttgttcctattaactctgaaatgaacatggcaggatgacttaggttcggagattttttttagttcagttcagggcttcatgtagcactagcttagattttactaatctctatcgatatgtccaacctaattttctaattgtttagattttgcacctattaactctgagatgaaactggtatgatggcttagatttggagatgtttttaattctggacttcatataccaatcacttagattttactaaatttggtttatattgttactaaaatatgttgatacagtgagtcctgaagactaagctgaagatcacaaatcatctactgccataggagtaaaataaactatattgctccatatttctctatatttgattatatcaatgtaggtttccaaaaggaaaacaatgggtactgtttctttagggaataaaaaagcagtgctttctgcagttcctatagaaatagctcaatatatcttattgcctctgtcaggcatttcaattcagctgagatacaatatgtagcatccacaacaggttgaaacgagctgattactgacggatgatcagtgtcaagtgagctatacaaaatataattttcaattccaacaaattgtgaaactttaccatttaaatttgcagacaaacaagttacatatgttatacatatacagctatggccaagttatatgtttggattaattattttttcccatgtaaatctaataatggcctggtatatatggatggttgacagcaggggagagcagcaaagctgctgcacctgaccactgcacatctttggctcttcctttctggccactctaggagatggattacaagcgaggcaagggctccagatcaatatcatccagaagaaagtagtactaatttaaaaaaaaacttgttattttatatattgcactacttataatttataatttacagatgcctaaatatataggatgttgatttattaatgtttttatcaccgaactactccacagctaaatgccagagaggatggatttctcagcaattgtctccacaattctgaagcagtgaccatacttataaaatagttcatgtattgataaattggatatatgtcaaaatgttcactgagttaaatgctaggagcaagttgaatatattaaagttttcaagggaatcacatggaactatctcttgacaaagcttaatgtcaagttcatgtcataatgcaagcacttattatttgagttccttgggatgaccatgccaacgggtagactaagatggcagttgtggttggtcacaataggttttactttttatttttagtctaaattcagtcttctaatggtttatcatttgcccatcattttctgatattgcgtccacaaaaactgacattcaggtagctttctatgccaaagcaatttctaaaattgatgtgctttttactatgttttttagttggatatattttagaagttggattttactgatatttcataaatatttgtaggtttgatttgaatttaattttagtttgactactgcaacaggttaaactgaataaattggataaaaggagtgccttagtcatccggaactgtaagtaagccaagttttcaaaattttcagctagatgcgttgtgtattgttggcgattctgaatgtctcttcgatttccactgcccattcaagatataatataatggatggattgaatcgctttgcttatactgtgtccaattgaaatgtggtttaatccttggccttaatatgaaagcttggcttggtactattgctatactatgaaatactactttataaaataagttgcttttagtattcgtcctcttatcgggctgcaattttcttttaaattgaagctggaggacaactctgttgatgacaatgccatattttctttttttgtaattttctctattatttggtttccatacattcacacatatttttcttgtgatccattccttccagaaaaacgagggatataataatatagcaccttccaaacagtataaataatctcatccatctttatttttcttcatattagctgaaatagggtgtactcaattcttagtgtaaaaccatgaatgtttaacgtgccttgcacgtgcacacttactattattcagaatatgtgtccaactttatattaaggattgggtttccgtttaagattatggagggagaagtagtttcccggtttagcctacggaaagccgattcagattttatgtggccggatgctgattttttggacaattgtaaataatgctgattttttttaggagggcagctagcgcagaccagcatagagagtttaattttggacaattgtaaataatgctgatttttcactggataattaaacacccgataaattaatagatattttcaaccgtgtcgcctgctgtccacgcgattcctcgctactttccctagccggatcctcctaggtcgtcgagggagtgccaccgcagctaaccagagcagcagtgccctcttcctccaatatcctccttggtatcgcgcccctgacgtcttgaaccaacacttagggcgacgtagagagtgacatttgtcatggttatggataccacatacctaatagtagttgactaagctcggcaggacccactatgtaccaagtcttatagagaatcatacatcgtatatagaaggagatccggataaggaaggatgaatagagttctatatggaaacgacaaggactacctggattgtatccatattggtcttcctagttctatttggacaaggggacatctattggtataaatacaagactccctaggggagagatgacacaacaacaacaacaacaacaaatcaagacatgacatacaacagatcaagctaacacacgccaagacaagcgcaacaatccccatactatgcaaaataccgtagttgcgatctcaaacgtcgactagtccctagccgtgaagttgcagtagtagtaggacacaaggatcaagtcgaggggaagggataagaggagagagggataagaggagagagggcgtgtggtgcttgatacctcgtagccagccatgatacccgatacctcgcaaccagccatgatacttgataccttgcagccaaccatgatacttgatacctcacaaccagccatgatacttgatacctcgcaggtaccaggtatcaggtttgctatctatgggtaagtcatgataccatgggtactaaccatggtacctaccaggtatcagacccgatacatagcacgacgtacctacacacgctccggcaatgatcatgatggctcacgatcatgtcgccgtcaatgaaagctctagatctagaagcttcgtaggttgcccctccatcaccatcggcaacgcgcctagaaaaaggaggtcgagaagtccacgctggtcagcttccttcccgatagcctccctcctagctggttgcccccttcctccatgggagctagatccagtgggtgccctcaaaagcatgagacggaggaggaggcaacaggaccttgtagtcaacgtgcactcagggtagatctagcagtgaggaagagggggaagggatccgttttcgggggcttgctttgttgccgccatgcctgtatagagaagctctctgcaacagggaggagggggaggggggaaaagagggtgaaataggagaggcggagaaggaagacgaagactcagagagtgaaggggaatggataagatcgaagcgttatccacttattatgtttccacgggatacggttgagtagtttttctgtttttttgacaggcagagagagctcaattttggacaattgtaaataaaacagtataaaaaccttggaacgtgagggattttgtcctggtaggactcatgagttctactcttacttttactttgactagcaaagtgcccgtgcattgcaatgggaaaactacactgaatgtgtgttgtcaatggtggcggccttataacggtatggcagtactctcatgtcctactcacatatgcctcgtttctgataaagtatttgtgagcacctcacgcttcttctcccctagcaatcacgagatggctaggagaagaggtttgattaacgtagtctttactggctaggagaggagggttgattaacatagtctttaccttctccttgaacgtctctcgccatgagagaagtcattctcctaggaaatttgtggcttttttcacttcgacattggatacatatatctttgggtcgattcggtcgccataatgtagtgagatcgtttgcaacatcatgagtgatgaggacatcctccactattacccgttggcaaagacgtcaaagtcgggcagcgaccgtgtgagtctctgaataatcccaccttacttagcttgggaggaggaagccaccttaaaagggagagccacccttcccctattggactagtcttttagggagattgggcctttccctgagtgggtgtgccaaagaactgttggggtccgggcaaccttaagtgaatgatgaggacattcttcactattacccgctggcaaagacgccaaagtcgggcggcgaccgtgtgagcctctgaataatcccacattgcttagcttgggaggaggaagccaccttaaaagggagagccaccacccttcccctattggactagtcttttagggagattgggcatttccctgagtgggtgtgccaaagaactgttggggtgttattgggcctcggccaaccctacctgggtcggattgttatcaatgagttgctatgaggttaaggttagttggggttttcctcggcaacggcaccagaaatgcttgttagtatttgttacgcacacagataaattcgtcagcgcatggataccgttgcaatacttccccttagaatattccaagggtatcggtatgtgtatatatctaataacaggattcaaccaagaataacaactaggcttaagatagagaggattcctatggattcaactggctaacctagattcctatggattcaactggctaacctaagttaaaggtaaaactctatcgaatggtagggatgattcctatggattcaactggctaacctaagttaaaggtaaaactctatcgaatggtctatcgaatggtagagaggattcctatggattcaactggctaacctaagttaaaagtaaaactctatcgaatggtaggcttaggatagagaggattcctatggatttaactggctaactagagaggattcctatggattcaactggctaacctaggcttaggatagagaggattcctatggatttaactggctaactagagaggattcctatggattcaactggctaactagagaggattcctatggatttaactggctaactagagaggattcctatggattcaactggctaacctaagttaaaggtaaaactctatcgaatggtaggcttggatagagaggatttctatggattcaactggctaacctaagttaaaggtaaaactctatcgaatgcttcagacaccggccctcccctggtctgccaagctaagtctgatcttgagctctatgatgtatcataacgtggagagatgcaacggacggacatggatgtcaccacctgccacctacctcacttttcgtggagcacacaacaaatgaaggtagcctctaacctagacatcacgtttacgttatcaattactactctagcctcggccaagaactaccttctttatccaaaatcttagtaagttagtactagagcactcagttagacactaagcgacgaacccgcaccgataagaatacttaagtaaactaattaaataacacaagatcagagagagtgccgacactccggcactcctccgaactccccggagagaactccaaactttggggcactcccttcagagcttccctcactctcttcccatttctaactctactagagagtagcctaaatatcaaagtgagttgtactacacttgagttgtgtgcgcttgagagtgagagcttctccttttacagtgttgtaatgacggcttggaagtcgattaagcccggaaccacgcataaccgccgtcggggagtcatcaggagcgtacacgtggaagcaaatgacaagagggtgcaaagttggttcagcagagctaggagttctgtcgaacttctggcctacctcttgggcactccttttggctgggaggctacctggtgggcccctagcatattgtactttggctgggctcaattctaagtggttttgattgacatatgggttcttcaatccgtgtaaatgcgtcctgattgtccggaggtatattttatcacatggtgggtggtttttgtccataattcacctgcatacaaatattcacaaagacttgcggaaatggttagtaatagccacttttggcgttccattttatattatttcatttgcttttatgcaggttttgacggttgaattcggtacttaaggatcgtcaattggcagtgatggctggggagagggatccgtgagggggctccacctgagacggagtggcggcctcaaggcgcagcaatggctcaccctcaagatggagtggcgaagacgaggtgactacaccgaccgtgcatccactcacccacgaagtctgtcaccgccgtgaagcacaccaccaccaaccccatcgctccctcgaccatcgccgcaatcccttctgctccccatctcccttgacggcctccccgctacccactttgaccgcctccctgtcccttatcatctccccaacctaccccctcccccccccccccccccggttttgctcacgcgattcaagcagagaaagagacagaacgggcgatgtcaatgtggcacttctcccgcttccttctccacgctgccaccacaaccgcagtgtctgcctccgcgtccgcttcgtcacggcggtgtcggtgttagggaagctctagcggtgccggtatgctttgctcccagcggctgtggagcctacgacggtgccgggaaggatggtgaggtagaggtgatagcgaaggaggcgaagcagctgatgcggctggcgaacatgcaaggcctagggacggcgaagtgaggaggccgctgccgatggtccactcccgctccttgcaaacggccgaagagaagagcaacgggaaaaaagagaaagaaagagaaaagtgagagagagggaggaggaagaagaggagagaggatgatatgtgggccccacatgtaaatgggtcccacaatttttctttgtgtgaatgacaaatgggtcccacatagtttttttaattctaatgcctcgttgctgccacgttgaacaaagaccaggtcaacatcgccatgtaagtgtcacgtcagcaaaatagtcttctaaaaccgccgagggagtaaaattgcagcgatttcaatagtttggggtcgagatatccggttttgtaatccagagaaacgaatcaaattcaatagtttagggagtcaaagtagacttattcttccccaatccatctcaggatctctaccgatccatggcgatgtccgccgccgccgcctccgcctctgcctcctccttccccaactgggtgatgctggagcgattcgtcttccgcagggacgacgacaccagggctacagtactgagggcatccggttccggatcccacgggacccccttcaccatcgccttccgcatcgccgaccctccggcgatctcccgcctgtacgtgcggtggccgcagggcccggacccggaggagatggtggcgtgccccctcgtcgccacccaccgcaacctcgtcctcgtctgcttctgctacatcgtcgagtccccctccggcccggcttgcccgcaggactacttcatcttcaccgcgtccggctccggcgacggcgacgtcgaccaccacccagttccctcgccgctactcaaggccctccccccatgtacctaccatgatgagggcgacggcaacgacctatccatgcggtatccgttggagttccggtccgtcggcatcctgtgccgaggcgaagagttcgccgtcgccgagctgcaggtcctcagaaccgccagtggcagagtcaaagccaggctgtgcgtgctccgctcggccatatcctcctccaaagacgaagatgaagcagaagatggagatcatggaggcggcggccggcggccgtgggatatcatggagctgccgatcgtgtacgacggcgacgaggagcgctgcgacatcttctactggaccaccgacgccgtgatcgccttccaagaccacctctgctgggtggactacgaccgaggcatgctcctctgcgacgtgctgcggacaagccctagagtcgccttcctccggtttcctctggacagctcgatcatccctaccggcagacgatctcgccgcaatttctcccaggtgtaccgcggcgtgtccgtcaccaccgccgccaccggcggcgccgccctcaagttcgccgacgtcagccggcacgacggcaagctcctgggctccctagaacaaggacgaggaggctacaccatcacctgccacactctgaggtcgacgttaggggcggccgccattgatgacgagtggagctggagcaaagacttcgcgatcgcgtccgacgagattcttcggtccttcgagggcgcccccgagctcgagcctcgtgaggttctcctgttccctaccgtgagcatggacacgccgagcgtcatgcacttcctcacctgcgactacgaccgcatgatcaggaagatgtcggtggtgaccattgacatagccagcaagatagtgttgtcggttgttccatatgttaacggggaggaggacctttccggtgaggatgccgacatggtcagggcgaagtcgggctatccccagtccttcctcccctcagagttttccaagtacttcaattcaatctaagggtgtgtttagttcacgtcaaaattgaaagtttgattgaaattggaatgatgtgacggaaaagttgaaagtttgtgtgtgtaggaaagttttgatgtgatggaaaagttataagtttgaagaaaaaattgggaactaaaccaggcctaaacatggtatacatacacctgcatcttaattaattacctgctgggtgtgcatctgcaatttaattaggctagagcctcagcttttgatgctaggtagggcgactgtggtctagaaatgctgttggttttgatggtaaaagcaattgtgtcctgttgaaatgattaagcaatttaggttgtttctacattattggtggtgtcagtgttaggactaggacgccactttgatgttccacaagagaattccagccttgtttggtgtctttgcattgtccactggaattaagcatgtagaattgaagtatgtcagttttattcttatagcatcagtgcgtgggctaattcagtgatagtggctcttacaagcatacacatagctatgtattatggtactgcagccaagctcaatccctgattcacatgctacccctttcttgctaatggatattcaatattcaaattggcttcaatctaaatggagaataaatcagaagccctatagacggcacaattcctagttaaaagtgatcactaccatgtcactaccagtacaagtatttggaaataccgaagtgatcatcggttcacatgttttaattatgtagctatttcaatctacgtatccgcataattgatacagcttcatactgcatcataatcataatatttgttccctgtagtgcttggtaagcaccaacgttatcaaaataactcaagatatgggtgaatcgattttgtagatttgcatagcgtatccaactcacgttttgtacaaatccattttatcattgataccataaccatctgtggtactgctctgatcgtttctaatttgtatgagaatcctcaatatatgcaggaagaggaagaaccagggatgagtgttctgaattagtggtttacaaagtgctaaatgtttactttcatgtatttatttcttgcgtcgctatgaacttgaatgtcacacttcagaactccttgtagtgcagtaccaactagaagcgcattttgtggatccatttacacctaatatgaaaaatggctaaatcatcgagtaaactgtgttgcaaaatatatttctccgtaggtaagcaggggacaaaggatcgtttggctgcttcaaacatcgctactgctcgctgttcagcagcatcagcacgctcttaggcaacagctgcgtgcttttttgcaaaaaagtcctatatgaaagttgttttaaaatatcatattattccattttttaagtttaaaataattatatacatgattctgtttctatttgagcaaatatttttcgaatgggggaggaatgtctacctcagattcagctagccactacacgaaagtgatctatcgatagagctgctggtttgtctccactttgttttgcaaatagggaggttgtgtgattagagcttgatctcacacttcttttattagagcaaaatcactacctaatttgttttgcaattttacctttggagattagtctggttggttttagaggattagccatggggattagtctccctaggtttagaggatcaaattgagggaatgatccatttgttcactgatttgtttatttttgggtaactgtcagtaaaaagattgtattattgttgtttgattccacacagcatgtagcacggcaagaatacatagttcctctgcttctccttagtacaagaatacaagcagctaatcaagggatgcccatgacacctgatctccctggctctctcgatcgatcctgatttttcatgcatatgtatgctagatcatacagataaagctagttctgtatgtttcgtttacttctgaagatggcttacttttgttcaatttttaacacaataataaataatcttcagttttggttgtttagcataatagcatttcacttgaattcacttcaattcagttttgttcaatggagattaatagcatttaattttgtaaatttacatggatatatttgtctctcctacaaacactacttaactagttttgtctttgtatctttatatgattatattttcttttatgatttgccttcttgcaatctgcaattgtttgcacagcttgcatctcatggtttgcagaatatatagcccacatttcagcttctctaaattttataggtcctgacatcttctctgaatttttatcttatagttttccatttttattaatcataatatagaaacaaagttgtgaagaatggtcgtcagttctaatttatggctttgtaggtagttggtgaagagtaactagttttgtcagttttgttagcaatgaagatactaataagacagttttgtttgataccaattgtacttagttttgtgtaaatggacagtacctcctactgattaacctactaattatacttagtttttgtgtagtttgttagcaagcctactaaccttgttttattagaatgcattgtttgtgattttctcctttcactattctctttgttttggtcaccaaatttaattgatatagttatgtaacatttttgtgttttttttttcaaaaaagttgcaacaaaaaggttgtgtgtcccattcgtagttttggtattttgcccaatggttgctttgttggttagctcgacggttgattgctggattagctgtcttcgctggagcatgttcccaaccggaacagtgcgtaagaaaaacgaacgatccattagcacgtgattaagctatttttttttaaaaaaaaggatcaatacgattttttaaagcaacttttgtatagaaaccttttataaaaaacacaccgtttagcagtttgaaaagcgtgcgcgcgaaaaacgagggagatgagttgggaaacttagggtaagaacacagagtactaaaagcacactcttgttcgttttgtgtgtaatattcatgagctgcattattttatcgttttgttttttttttgttttgttttgtaagctaaaagtacttagttttgtcaccacactgttagctcatatctatatctatactactacttaaaaaaaccgtagtggtgacggtgatttcaaccctgtcagacacgcgtaatactaatcgtacgatcgtgagatcccacgcgctcccctcctacgcatctgccccatcactgcatcgtgctcctcctcctcctacatcacccccatcaccaaccgccgacgtgctcgtctccgtcgctccccctgccccattccccacgccgtccagtcccctgccgccaccgcctccgtcaaaccgctgctggtgcagggaggactccggttcccgatccaaccgacgacgcgctcgtctccttctgctggcgtggggagggcattcaccatcgccgtcgccagcgctgggaggtgcccgcgtcgtcacccgttccccacgccgtccagtcccctgctgccaccgtctccgtcgccaacgctgggaggtgcccgcgtcgttgcccgttcccccatgccgtccagtcccccgctgccaccacctccgtcgaaccatcgctagcgtagggagggctccgcgcggcggactccgaaaacgccgctgccttctccctccctcgcgaaggtcttgttgtccccactgattcgccgctgcgatgcagtccactcccccggtcatgatctccatcatcgtcgcgatgcaagtctccctctaaagttacatatccactcctgcgccacccctccacctcctctctctctaccaacccctaatcagtcaccctgctgcaaaaaaacatttagctgctattcagtttcagaactcacctctttattaatacatttagttgtttttttttatcaaactacaaagttattccatggcatgatgcatctcaaggcttccataatttacttaccatgtgttttgacaagcaatggaggtttttcgtctggcaaaccttgaagataggtagaaatatgcataagctttctagcggatgttggaaactcaacaaattttggtgcgttgaagaaagaaccattctgtacaacatccgttgagaatgaccaattgaataaattatcctgtattaaccgaaaaaactaaagtaccatagtcatattctagtattatccacaatggtagtaaggtggtgtttgggaaagagtgaaggagtgattcccaaaacaccactaaaaggcggactgacttatccttaaaaaaactaaactgttgccttatcccttcctcctgttcccctctgcctgccttcacggagaacacgccgccgcacgcccgcaaagttgtcgctccgccgccgggtcctgcggccacttcctccctctccctgtgcatgcgctctcttccccacctgtactttactttagctgctcctctgcccagttgcccacgacctgacgacccggacatggcgcaggctgaggcggggacgacgacatcgccggcgggttgacgcagaaaggagcgaccacccgagggctccgctggattttcaggtagctgagctgagctgaactgaaccccaatgccccgcgtttgcgccgcccctcgggcgccgccgccgccgtgcccgtgccatgtcggagtagggccgcttcggccgaggtggcgcgcctcccggcacggccctctccgggcggctggccaggagcagctcctcaccgccctgcgcgagcagccggaccccgacgcggcgctccggatgctcaacgcggcgctggcgcgggacgacttcgcgcccggccccgaggtctacgaggagatcatccgcaagctcggcgcggtcggggccctcgacctcatgaaggtgctcgtcgcggagatgcggcgggaggggcaccaggtgaaattgggcgtagtccactccttcttggacagctacgaggggcagcagctgttcgacgatgccgtcgacctgattctgaatcaactccaaccattgtttggcattcaggcagacaccgtggtgtacaatcaccttctcaatgttcttgtggaggggagcaaaatgaaactccttgaatcagtgtactcggagatgggtgctaggggaatcaagcctgatgttgtcacattcaacacactgatgaaggcgttgtgccgagcacatcaggtcaggactgcagttctcatgctcgaggaaatgtctagcagaggcgtggcgcctgacgagacgacgtttaccaccctgatgcaaggatttgtcgaggaggggagcatcgaggctgcactgagggtcaaagccaggatgttggaaatggggtgctcggcgacgaaggtgacggttaatgttttgattaatgggtactgcaagctagggagggtggaggatgctcttgggtatatacagcaggagattgccgatgggtttgagcctgaccagatcacatataacacttttgttaatggtctctgccaaaatgatcatgtcggccatgccctcaaagtcatggatgtgatggttcaggagggccatgatcctgatgttttcacctacaatatcgttgtgaattgcctttgtaaaaatggacagcttgaagaggcaaaaggaattctgaatcagatggtggatcggggttgtttgcctgacattaccacattcaacactctcattgctgccttatgcacggggaatcgacttgaggaagccttggaccttgcacgtcaggttacagtgaagggagtctctccagatgtttatactttcaatattctgattaacgcgctctgcaaagtaggcgatcctcatcttgcacttcgattgtttgaagagatgaagaacagtggatgcaccccggatgaagtaacatacaatactttgattgacaatctttgctcacttgggaagcttggtaaagcattggatttgttaaaagatatggagtccactggttgtcctcgaagtacaattacatataacactataattgacgggttatgcaagaaaatgagaatagaagaagcagaagaagtttttgatcaaatggatctgcaaggcatttcgaggaatgcaatcacattcaatactctcatcgatggtttgtgcaaggacaaaaagattgatgatgcttttgagcttattaatcaaatgataagtgaagggttgcaacctaacaatatcacttacaattctattctaactcattattgcaagcaaggtgacataaaaaaggctgcggatattttagaaactatgactgcaaatggatttgaagtggatgttgttacgtacggtactctgattaacggtctatgcaaggctggtaggacacaggttgctttgaaggtactcagaggtatgcggataaaagggatgaggcctactccaaaagcttacaatcctgtgctccagtctctcttcagacggaataatatcagagatgccctgagtcttttcagggagatggcagaggttggtgagcctcctgatgctttgacatataagattgtttttcgtgggctctgtcgtggtggagggcctattaaagaagcttttgatttcatgttggagatggttgataaggggttcataccagagttctcatccttccgtatgctagctgaaggtctattaaacctgggtatggatgattacttcattagagccattgaaataatcatggaaaaggtcgacctcagagagtctgatgtttctgcaataaggggatatctcaagatccgcaaattttatgatgcattagcaacctttggccgtttcctggagatcaacaaccctcaatggagttaccgatgaagcagaatacataactgggacaaattacttgaatagtattagggaaatctcaaagagtggatggaatttttgctggttgcttaggggaatgaaagtcttaaattgattataataggtgattgtgttcattcctcggtagggatgaagtcagagcatgaagaagctcatcttggtgcagaaacttagcttattggaacagaatctaggtgctaggtgctgtctgctgccagattagtacctagcgccttaacgaacagtggctgcagatcccatccgcttattttgatcaaatctgattcattttctattccctaataaaagcctgattcatcttcattgcatatggtcgaacctaaggctatcatgtacagttagatcccaacccttcgttctatgagatgttgtcccatagaagaaatatcttctgagtatatcctagtactctaaaatgttcactaatatgttcaacttaattagttttgtaacctcctaaaatagttctattagttttgtaaccttctaaaatatgaattagttttgatctggctgatcttcctttggttaggtactacaaattcttaattcagacacatatttggttttctgaaaatttcatctatatttggtcaggctggcatttgaagttcttattttagtcatatactttagttttttacaattttcatttgttaaagatgataatttatttgttagcacagagcatgtttagaaatctgaaatattaaaacatgcatgttctcatgaaaataaatgttagttttgtttaaattccaatccacatattttttaatcaatgtcagaaattaccatgcttcacttattgacctagtatatgtatagtatttgatggatcatgttgatttggatttgctctactaacttgttcctattccaacaaagatttatatgcatcttgtgttctaaaaatgctacatgtgtcaagttgaaggaaaattctagctatgtggtgtcctaattttggtagatggtacctagtaatagataacaattctgttttatagtgatgagtaaatttgactaaatcgagtctagaaagtgatataattttctggagaagtctttcttggtgatttgggaaagggccattacctatactgatatgaaatctggaactagaaagatctgaacatcaatgttctaaagttttttgtctgaatttcttgtgcagaatatgaaggaaggtggatctggaataggtatttacatgtcctgttcagattcctgcaatctgataaactactgcaatccaataaactcttgatctattgttttctggatttttttttgggtgtagagtattaggaaggtatttgctttgttacaggggttggttggatgttcagaaaaccaaaatctgaatacactaacacattagccagtgttttattttagtttatgttattctgaccacaacaccagcagcttcaattggtagtagaacacactctgatgcaattggtaggtgtacaacagataatttgccgtgaatgctacttaattcaaccattttttttccatacagtgctatacaatggcacacaaacatccttcagttggactcaaatttgtttcagctttgctattttacagtcacctgcagttttttctaatccatcagtcgattttgttggcagtagattctgcttcaagatctgtgcacgcagtggaggcacatttggttacaggctgcttcaccagacccgttaacccatgggccatggatgctcccctagtagcatatgttgttttttccaccaactgcctcttgtaaatcaagatgctcccctctccacatttgctgcagacttcctccccgtggatctgagacgaactccggcgaccggcggcgtctacgagccagcgttcaccaatttctcaggtatatgagtcgtcatctatgtgcatctgctactttttttttttggctgattggacgggttgagaaggaggtgtttggggggaagagagcagaataatcccattgcgaaacaagcgaggaaggcttgtcgatggtggcggcggtggccttgattatcgaagatgcatgcgtgagggaaactgtgtgccagggaggcaagcttggtggcacacatcgagtggtatatcttcaggttactgctagatcgaagatcctttggtgcttgatgtgtgctgttggtttggtagttttggtggtactgtggcaagtgaagacacgaaagaggagctagtagaggcttagagtctggagtcgtaatcgatgtgcaagagcatcaatgccatcagttcctctgggcagcacggctctgcacttttcatctgagaaacatatatattttgttgattctgattttgacgaattatccaaacatgcagtttttttgggttccgcgtgcaaagacgattttgatctcctggcagatttaagggtggtattttgtttttgttttgcatgtagatgatgcattttgtaaatcattttaggttgccccttttttttttgtttttgcgagttcttactgaatttggataagttctggttgattggatcgacattctgtacatttgcaaggggattctatgggtttttgcttattgctaatcaaattattttgtgagttttggtttattggatggtgagaaagcaagattacatggattttgcttcattgctgattttgtcgaaatttatcaggcatgcggtttttggtttcttgaatacgaactacacggacagtactcctatattcttggtgattttgaagtgtatttgttattttggggaggtggaatggttaatattttgttcaaggggacacttctacagatgtatacattacttttgtcattttcagcataacaaagagatttggtagattcagaattcagatggcaactacacgtcgaatgatgtatgcgaagacatggggaattctgatgctgattccactgaagaaagctaaacataattttaatttatttaccaactcatttttctgtcaacacatttgctagatagttgctacccgataaacgacatcttgaaatctgagttatacttcagtctattttttttccatactctgccttagttattcaaacaaaaaaaaaactctgttttggtgttagttctgtcttgcgagagactgctgcaggtggaagtcgtcttgattttagaagtcagggactaataatgaacccttacatgcaaattgcactccccaatcatcgaagttaccattttcaatcatgtgcaacttcaactacaaatttgtgcaattttggatataaatttgtgcaactattgattttattctataatttttttagttactagtctggctttacatcacttggacaattatatcatgttcatgttttctgtggtttttttttaaaaaaaagatgtatagttctgttagtaattacttggttactccggcactttagtgccattttttttttacttagcacataaattgattagttagaactatgtgcggtttagctaaagctattaggatgcttagccctacttagaaagatcggtgcattaatgggataacttatgttgcactatcacttattgctgttcatttaatggtagctcacgattgtcaatcgtgatagttcaaataatgaatttgccaactaaaatctgataatggtaggttgtgagcatatggttttgatggtcgtgctcatgacaattaaggattagttcacgagctactgttgtgaagtattaatcgtactaaccacaagccaacgttggcaatggctaaatgcgttgtatagcatagttcatggtggagtgtcagactaagaagtggcagagataagcccactggggtcgctggggagtccataccctggtctaaagggggtgactatgactcgggaatggtgcactactttgaattgtgttatgcgagatatcttgtcacagctcctttccgagataccatggtggtattaagacatatggcaacatgttgtggggctgtgtcttgtgggtaaatttgtacacttcttcccagagtaaaactattcgaatagccatgcccgtggttatgggcgagcttagcaatgtctttcgtgtttagtctcaattactcaacaaataataataagtgataattattttaaatccttgtttggaatggttaattcctggtttggagatagggtctgttcaaccgggcatggttgttcagatatggttggacctatgcaacgggtatgttgtatagcggtggattaaaattgtttaattaagtactttattattttataaattttaaaaaagtttattaaatgtcgtttatgcaaatgagcatgtattatgccatcctttgtactcttgtgcactttcatatttgttgtgtggcttgctgattatttcatgtactcaccttgcaataatcatcatcagagaaggagtacttcagcgaaggtgatgctctggaggattaggccttgtcgtagt
